United States Patent Application Publication US 2023/0026259 A1 - sequence listing, part 41

SEQ ID NO: 129672 - DNA, 1381 bp, Homo sapiens
  Payload ID: 5357
  Gene Symbol: ENGASE
  Gene Name: endo-beta-N-acetylglucosaminidase
  ENST ID: ENST00000578419
  CDS Start-End: 7-447
agtgtcatggaggccgcggcggtgacggtcacccggtcggctacacggcggcggcggcggcagctgcaggggctggcggccccggaggcggggacgcaggaggagcaggaggatcaggagccgcggccgcggcggcggcggccgggaaggagcatcaaagatgaagaagaagagacagtctttcgagaggtggtcagtttttccccggaccccctgccagttagatattatgacaaggacaccaccaaaccaatcagcttttacttgtcttcgctggaggagctcttggcgtggaagccccgcttggaggatggctttaatgtggccctggagcccctggcgtgtcgccagccccctctgagcagccagaggccccggactttgttgtgtcatgacatgatgggcgggtacctggatgacagggactttcatcacggagtggaatgaagggggaaggctctgtgaagccttcctggccggggatgagcgctcgtaccaggcagtggctgaccggctggtccagatcactcagttttttcgttttgatggctggctgatcaacatcgagaactcgctgagtctggccgctgtggggaacatgcctcctttcctgcggtacctcaccacacagctgcaccggcaggtcccagggggcctggtgctctggtatgacagcgtggtgcaaagtgggcagctcaaatggcaagacgaactcaaccagcacaacagggtcttctttgattcctgcgacggcttcttcactaactataactggcgggaggagcacttggagcggatgctggggcaggctggggagcgccgggctgatgtgtacgtgggcgtggatgtgtttgctcgagggaacgtggtcggaggccgattcgacacagacaaggtgggtggtggctttcgtccaagggccagcggcccagtgcctcccctgggacctcatttcctcatggaccttccattcccgtctgcacctcaaaggaatgacagcagctgttcttcccagagtggggatcccgtggcactgagaaacaggtgtcctgccccggccaagctatgtccccactgaaacccctttcccggctatttctacaatcagataatgtatttttgtgtgggtgttaccagacagaggcgcgtcgttcccccgctgtccggtcctcggcgggcctgggcctcctgtcccagctgcgttccttgatcttccccgtgagggaagcctgcggggacgcacaggggcctgcagcgcctctcactgcggctcaggggcgaggacgggggaggtgcccagggtttggggatcggtaggtgtcatgacgagggagcattttctggcaaggcaggtcacaccagcacagaggaaggagcgggg

SEQ ID NO: 129673 - DNA, 1208 bp, Homo sapiens
  Payload ID: 5358
  Gene Symbol: EBLN1
  Gene Name: endogenous Bornavirus-like nucleoprotein 1
  Uniprot ID: P0CF75
  ENST ID: ENST00000422359
  CDS Start-End: 39-1139
acaaaattgtgtgaaaatcacagaaacaatcacccacaatgtcccgcccaagaaacaacccacagaccagcagcccacaagacagtacaaaggatgggagcagcttccattactttcaagggagatttgagctctctgggaagagcagacagtatccagcagatgcattggagccccaacctggtattggagatgttaaggtcattgaaaaagcaactaagtctatgctagacccagcacagagatctcatttttaccttgtaaccccaagcttagtatttttgtgttttatattcgatggattacacaaggcactactcagtgtcggtgtgagcaaaaggtctaatattgtgattgggaatgagaacaaggaaacaggtactctctatgctagcaaatttgaagatgttttgcctaccttcactgcccttgagatgtcatcaattctgcgtcactgctgtgatctgataggcattgctgccggatcgagtgacccgatatgcaccaacagcctccaagtacagagacaattcaaggcaatgatgatatccattggaagacctttgcatagtgaaagtgctgatttattaattagctataatgcagggccagctatagattggatcaactcaagaccatgggttggaggattaatgttcacatttctatttggagaatttgaatcccctgcgtgcgagctacttgatcaagttaaagtagttgccagcaaagcacagatgatgacctactacactgtgagaatgttcctggatcagtgtgtggatggttccactgctttacccgctgttgtgttggagattccagtttttgagcagaagaaaccactggctaaaaaggtacttggagatttctttgaatttgggggtgtacttcgccaccctgttattggggtgctatcaccacaaatgttcccaaacctagcaacagcagcaaactactgggccaaaagaaggaattccacattttctggatttgaagcccttgacattataccaggatcaactattacattccctgtacttcaaatggcatctgctcagaaaatctccagaggaagtgacatggatccatatacacttaacatccttcgcggttatgggatttcgggatttgaataacaaatacgtgaactaatccttatatatacatataaaaagaaattatgtgaaaatcacattctaaaatag

SEQ ID NO: 129674 - DNA, 1679 bp, Homo sapiens
  Payload ID: 5359
  Gene Symbol: EBLN2
  Gene Name: endogenous Bornavirus-like nucleoprotein 2
  Uniprot ID: Q6P2I7
  ENST ID: ENST00000533473
  CDS Start-End: 424-1242
gaaaggcagggaggggaggttgtcccctgctgagaaccattggtttaaggttaatctggctctgctttcatagactactctgttacccaggctggagtgcggtgatgagtgatcatagctcactgcagccttaaactctagtgatcctcccgccttggccttccaaagtgctgagattacagatgtgaaccaccacacccagcccagtcaatttgtttttagaatgttcccaagaatatagttatgttgctaaataagatactaaaataatcccatactatatttcttgacagaaaaactattaaaatgtatacatgataaaaatttcttttatgaagcaaaatatgttttgttttgctcatgaacgtgaggtattttggaaaaatggtaaagaagtgcagagtcaagtcatagcgactaataatgggttattttcttaaattgtatgcttatgttaattctcacagtctttttgtttgggtctgtgacagatcttacaaaagatcttttagacctatgattcttaacaaaattaaagaattaagtcggaaccaattttccacaatgtctcatctaagaaaggactcacagcccagcagcccaggagatgacgcaatggacaggagtgggctccctgaccttcaaggaagatttgagctatctgggaaaaacagacagtatccactggatgcattggaaccccaacccagcattggggatattaaggacattaaaaaagcagccaagtctatgctagacccagcacataaatctcatttccaccctgtgaccccaagtttagtattcttgtgtttcatatttgatgggttacaccaggcattactgagtgttggtgtgagcaagaggtctaatactgtggttgggaatgagaacgaggaaaggggtactccttatgctagcagattcaaagatatgcctaactttattgcccttgagaagtcatcagttctccgccactgctgtgaccttttgataggcattgcggctggatcaagtgataagatttgcaccagcagtctccaagttcagagacgattcaaggcaatgatggcatctattggaagactttcacatggtgagagtgctgatctgctaatcagctgcaatgcagaatcagccataggttggatcagctcaagaccatgggttggagaattaatgttcacacttctatttggagactttgaatcccctctacacaagctacgcaagtcaagttagttgccaagaaagcacagatgacaacctattaatgctgtgagaatgtttctagatcagtgcatggatggctccattgctctacgggccattgtgtctgagatcccagtctttgaggagaaaaaaaacaatggttaaaaaggcattggggaaatattttgagtttgggggtgtactttgccaccccattattggggagctgtcaccacgaatgttcccaaacttagcaacagcggcaaactactgggccaagatgagcaaccccacatttttgggatttaaagctcctgatgttataccaggatcaaccatcacactccctttgcttcaaatggcatctaccccgtaagatcttgaggggggagtgttgggtggaatcatagatccatgcactcctaacatgaactaattctcattatttaaaaaaaaaaaaaaaaaaa

SEQ ID NO: 129675 - DNA, 2719 bp, Homo sapiens
  Payload ID: 5360
  Gene Symbol: ERV3-1
  Gene Name: endogenous retrovirus group 3, member 1
  Uniprot ID: Q14264
  ENST ID: ENST00000394323
  CDS Start-End: 502-2316
ttcactgctctgtgtcttctgctcctagaggcccagcttctgtggcctcgttacctgcaggtattgggagatccacagctaagacgccaggacccactggaagcctagaaatgttgcaggaattgtgccttggatccatccatccagtcagctgaaaccagcagcccaggacaagtggaccagccaacaggacctagaccatgcaacccagctgatcctacgatggaaccaaggtgccagtgagatgacaacagccctgctctggtcactccggaagctgaccagtccacacacggctgaagcttgaggagacaacagccctgctctagtcaccccagaagctgactagtctatgcacggccgaagcttgagtcatcatcagggaagtaaatgtggttagaaatctgaagtccagtaattttccttgtcatattaattactttgctattaagctgtcactttgcttagccttctccccccaggaaaaagccttttctgtccatgctgggtatgaacatgctactcatcactttgttcttgctactccccttatccatgttaaaaggagaaccctgggagggatgcctccactgcacccacactacgtggtcggggaacatcatgactaaaaccctgttgtatcacacttattatgagtgtgctgggacctgcctaggaacttgtactcacaaccagacaacctactcagtctgtgacccaggaaggggccagccttatgtgtgttatgaccctaagtcttcacctgggacctggtttgaaattcatgtcgggtcaaaggaaggggatcttctaaaccaaaccaaggtatttccctctggcaaggatgtcgtatccttatactttgatgtttgccagatagtatccatgggctcactctttcccgtaatcttcagttccatggagtactatagtagctgccataaaaataggtatgcacaccctgcttgttccaccgattccccagtaacaacttgctgggactgcacaacgtggtccactaaccaacaatcactagggccaattatgcttaccaaaataccattagaaccagattgtaaaacaagcacttgcaattctgtaaatcttaccatcttagagccagatcagcccatatggacaacaggtttaaaagcaccgctaggggcacgagtcagcggtgaagaaattggcccaggagcctatgtctatctatatatcataaagaaaactcggacccgctcaacccaacagttccgagtttttgagtcattctatgagcatgttaaccagaaattgcctgagccccctcccttggccagtaatttattcgcccaactggctgaaaacatagccagcagcctgcacgttgcttcatgttatgtctgtgggggaatgaacatgggagaccaatggccatgggaagcaagggaactaatgccccaagataatttcacactaaccgcctcttccctcgaacctgcaccatcaagtcagagcatctggttcttaaaaacctccattattggaaaattctgtattgctcgctggggaaaggcctttacagacccagtaggagagttaacttgcctaggacaacaatattacaacgagacactaggaaagactttatggaggggcaaaagcaataattctgaatcaccacacccaagcccattctctcgtttcccatctttaaaccattcttggtaccaacttgaagctccaaatacctggcaggcaccctctggcctctactggatctgtgggccacaagcatatcgacaactgccagctaaatggtcaggggcctgtgtactggggacaattaggccgtccttcttcctaatgcccctaaaacagggagaagccttaggataccccatctatgatgaaactaaaaggaaaagcaaaagaggcataactataggagattggaaggacaatgaatggcctcctgaaagaataattcaatattatggcccagccacctgggcagaagatggaatgtggggataccgcaccccagtttacatgcttaaccgcattataagattgcaggcagtactagaaatcattaccaatgaaactgcaggggccttgaatctgcttgcccagcaagccacaaaaatgagaaatgtcatttatcaaaatagactggccttagactacctcctagcccaggaagagggagtatgcggaaagttcaaccttactaactgctgcctggaacttgatgacgaaggaaaggtcatcaaagaaataactgctaaaatccaaaagttagctcacatcccagttcagacttggaaaggatagtctccagattcccttttcagaggttggttctcatcccttggaggatttaaaaccttagtacaaatagtcctagccatattgggagtttgccttatactcccttgtctcttacccctcattgtcaaaaatatccaaacagccatagaggctcttgtggacagacggactaccacacgactaatggccctaactaagtattaacccctgccaagaaaagagctacttcctcttgaagtaaatgaagatagtgatgctttctcttaaactttacttataaaaagcatcaaaggggggaatgaagcaggaaatataaaaggaaaaacaagtaaagggaaaacaagtcctttcctgaccagtctgactcactccaaagtcctgctggagctatgataattatctgcaa

SEQ ID NO: 129676 - DNA, 3198 bp, Homo sapiens
  Payload ID: 5361
  Gene Symbol: ERVFRD-1
  Gene Name: endogenous retrovirus group FRD, member 1
  Uniprot ID: P60508
  ENST ID: ENST00000472091
  CDS Start-End: 377-1993
gaacagggcacttggatctctcaaatggtgcagtgactcggataccttccctagtgccattacagtactggagactgccagctagatccatcacacccaagtgaagctgtggaaaagcccttaaactccagagccagaaccagcaacctcagctccggaatacacttgcaaggcactggaagatctaaaattcctctttaaacaaaaagataagtaatgccccaccaacatcctttcacctcaaagtaaggtgatcccaatactagaaattttactggcaattgctctgattgttatcactattttaaccctaacttgtacaccaccaggagttccattggcagctcgttttgtgaccagtttctcttaggtcaccatgggcctgctcctgctggttctcattctcacgccttcactagcagcctaccgccatcctgatttcccgttattggaaaaagctcagcaactgctccaaagtacaggatccccttactccaccaattgctggttatgtactagctcttccactgaaacaccagggacagcttatccagcctcgcccagagaatggacaagcatagaggcggaattacatatttcctatcgatgggaccctaatctgaaaggactgatgaggcctgcaaatagtcttctttcaacagtaaagcaagatttccctgatatccgccagaaacctcccattttcggacccatctttactaatatcaacctaatgggaatagcccctatttgtgttatggccaaaaggaaaaatggaacaaatgtaggcactcttccaagtacagtctgtaatgttactttcactgtagattctaaccaacagacttaccaaacatacacccacaaccaattccgccatcaaccaagattccccaaacctccaaatattacttttcctcagggaactttgctagataaatccagccggttttgccagggacgcccaagctcatgcagtactcgaaacttctggttccggcctgctgattataaccaatgtctgcaaatttccaacctcagctctacagcggaatgggttctattggaccaaactcgaaattctcttttttgggaaaataaaaccaagggagctaaccagagccaaacaccctgcgtccaagtcttagcaggcatgactatagccaccagctacctgggcatatcagcagtctcagaattttttggaacctccctcacccccttatttcatttccatatctctacatgccttaaaactcaaggagccttttatatttgtggccagtcgattcaccaatgcctccccagtaactggactggaacttgtaccataggctatgtaaccccagacatcttcatagcccctggcaatctctctcttccaataccaatctatgggaattccccgttgcccagggtgaggagggcaatccatttcattccccttctcgcgggactcggcattctagctggtacgggaaccggaattgctggaatcacaaaagcttccctcacctatagccagctctcaaaggaaatagccaacaacattgacaccatggctaaagccttaacgaccatgcaagaacaaatcgactctttagcagccgtagtccttcaaaatcgtcgaggactagacatgttaacggcagcacagggaggaatttgtttggccttagatgaaaaatgttgcttttgggtaaatcaatcaggaaaagtacaagacaacatcagacaactcctaaatcaagcctccagtttacgggaacgagccactcagggttggttaaattgggaaggaacttggaaatggttctcttgggttcttccccttacaggcccacttgttagtctcctacttttgctcctttttggtccatgtctcctaaatctaataacccaatttgtctcctctcgccttcaggccataaagctccagacgaatctcagtgcaggacgccatcctcgcaatattcaagagtcacccttctaaggaggacccctagactgctcgctagtggaacacgacagaggcgaaatcctgccccgtctcccgtggacctggctggatatggtttttgccaatccacagagccatcctgccctgacagctagcaagaggccaagacccacagaacaaccactacagcccctctgtcagcaggaagcagttaaagaagactgaccttcgtccattttcccagataattgggtcttggactcttgagggggggaaatgttggagcaggtagctagtcagacatgagcagggcaggggagggccccctcaccaggaatgtcaggcaaccatcaggtgatggtgaggcagttgttaagctgtgtctctaacataataatgagtggcagctggcgccagggaacgatggcctcccaatagataggaaacacctgaagctggtgatcagccacttcctgataagatctcaggagttgggtgcgcaggctcaagcatgcaccctaagaggcaaaatagtggcatttaactcatatatgaccttcctttaggaaggcttgactggtaagggaaaaactcctccagtgaacacgtgcacaacttcagtaaaaacactgcacatgcgtcccctcccaagtgctggcaggccactgtgcatgcagacagcccgccccaaagaaaaatcagaggaggagaaatggaaaccccggaacaatgccaatgtataaaaccccaagtcaagggcctaccaaggcaattggatctctcaagtcacccgcttggctctcttcaagtgcactttgcttccttttgttcttgctctaaaacttttactcctgctataaaacttgccttggactatcatgctaccttacgcctccccggccaaattccctcctctcctccggggggcaaggatggagtctgctgcagacccattggatttgctgctggtaacagttccaccatttaggttccagcaccaagcaaactaacacccgactcagtgtaaacagccaaacaagcttaaccaattagaaaccaccatctaacctctaactaggtcctttcaactttaaccaagtattttctttgtcttgcttctgtgggaaccttataaaattttcccccttgtacctctgtagtagagacccagttgcttgcagtttggccctgcctgttcatgaatcacccttgctcaaataaactctctaaaatgctaa

SEQ ID NO: 129677 - DNA, 3184 bp, Homo sapiens
  Payload ID: 5361
  Gene Symbol: ERVFRD-1
  Gene Name: endogenous retrovirus group FRD, member 1
  Uniprot ID: P60508
  ENST ID: ENST00000542862
  CDS Start-End: 365-1981
tatttgaaagggccccttcaccattctattatctacccctacagccattacagtactggagactgccagctagatccatcacacccaagtgaagctgtggaaaagcccttaaactccagagccagaaccagcaacctcagctccggaatacacttgcaaggcactggaagatctaaaattcctctttaaacaaaaagataagtaatgccccaccaacatcctttcacctcaaagtaaggtgatcccaatactagaaattttactggcaattgctctgattgttatcactattttaaccctaacttgtacaccaccaggagttccattggcagctcgttttgtgaccagtttctcttaggtcaccatgggcctgctcctgctggttctcattctcacgccttcactagcagcctaccgccatcctgatttcccgttattggaaaaagctcagcaactgctccaaagtacaggatccccttactccaccaattgctggttatgtactagctcttccactgaaacaccagggacagcttatccagcctcgcccagagaatggacaagcatagaggcggaattacatatttcctatcgatgggaccctaatctgaaaggactgatgaggcctgcaaatagtcttctttcaacagtaaagcaagatttccctgatatccgccagaaacctcccattttcggacccatctttactaatatcaacctaatgggaatagcccctatttgtgttatggccaaaaggaaaaatggaacaaatgtaggcactcttccaagtacagtctgtaatgttactttcactgtagattctaaccaacagacttaccaaacatacacccacaaccaattccgccatcaaccaagattccccaaacctccaaatattacttttcctcagggaactttgctagataaatccagccggttttgccagggacgcccaagctcatgcagtactcgaaacttctggttccggcctgctgattataaccaatgtctgcaaatttccaacctcagctctacagcggaatgggttctattggaccaaactcgaaattctcttttttgggaaaataaaaccaagggagctaaccagagccaaacaccctgcgtccaagtcttagcaggcatgactatagccaccagctacctgggcatatcagcagtctcagaattttttggaacctccctcacccccttatttcatttccatatctctacatgccttaaaactcaaggagccttttatatttgtggccagtcgattcaccaatgcctccccagtaactggactggaacttgtaccataggctatgtaaccccagacatcttcatagcccctggcaatctctctcttccaataccaatctatgggaattccccgttgcccagggtgaggagggcaatccatttcattccccttctcgcgggactcggcattctagctggtacgggaaccggaattgctggaatcacaaaagcttccctcacctatagccagctctcaaaggaaatagccaacaacattgacaccatggctaaagccttaacgaccatgcaagaacaaatcgactctttagcagccgtagtccttcaaaatcgtcgaggactagacatgttaacggcagcacagggaggaatttgtttggccttagatgaaaaatgttgcttttgggtaaatcaatcaggaaaagtacaagacaacatcagacaactcctaaatcaagcctccagtttacgggaacgagccactcagggttggttaaattgggaaggaacttggaaatggttctcttgggttcttccccttacaggcccacttgttagtctcctacttttgctcctttttggtccatgtctcctaaatctaataacccaatttgtctcctctcgccttcaggccataaagctccagacgaatctcagtgcaggacgccatcctcgcaatattcaagagtcacccttctaaggaggacccctagactgctcgctagtggaacacgacagaggcgaaatcctgccccgtctcccgtggacctggctggatatggtttttgccaatccacagagccatcctgccctgacagctagcaagaggccaagacccacagaacaaccactacagcccctctgtcagcaggaagcagttaaagaagactgaccttcgtccattttcccagataattgggtcttggactcttgagggggggaaatgttggagcaggtagctagtcagacatgagcagggcaggggagggccccctcaccaggaatgtcaggcaaccatcaggtgatggtgaggcagttgttaagctgtgtctctaacataataatgagtggcagctggcgccagggaacgatggcctcccaatagataggaaacacctgaagctggtgatcagccacttcctgataagatctcaggagttgggtgcgcaggctcaagcatgcaccctaagaggcaaaatagtggcatttaactcatatatgaccttcctttaggaaggcttgactggtaagggaaaaactcctccagtgaacacgtgcacaacttcagtaaaaacactgcacatgcgtcccctcccaagtgctggcaggccactgtgcatgcagacagcccgccccaaagaaaaatcagaggaggagaaatggaaaccccggaacaatgccaatgtataaaaccccaagtcaagggcctaccaaggcaattggatctctcaagtcacccgcttggctctcttcaagtgcactttgcttccttttgttcttgctctaaaacttttactcctgctataaaacttgccttggactatcatgctaccttacgcctccccggccaaattccctcctctcctccggggggcaaggatggagtctgctgcagacccattggatttgctgctggtaacagttccaccatttaggttccagcaccaagcaaactaacacccgactcagtgtaaacagccaaacaagcttaaccaattagaaaccaccatctaacctctaactaggtcctttcaactttaaccaagtattttctttgtcttgcttctgtgggaaccttataaaattttcccccttgtacctctgtagtagagacccagttgcttgcagtttggccctgcctgttcatgaatcacccttgctcaaataaactctctaaaatgct

SEQ ID NO: 129678 - DNA, 922 bp, Homo sapiens
  Payload ID: 5362
  Gene Symbol: ERVK3-1
  Gene Name: endogenous retrovirus group K3, member 1
  ENST ID: ENST00000427361
  CDS Start-End: 279-503
ggcagtgtgtaagacgctcacgggcgcgcggactatcgggcggctaggctctctgaggaggctgccacagtgaagcaaccgtgacaagtggtgcccgaccagggacctgaacgaggaaggtctgccagagcagagaaagtgaaactgatcagacgaactacgaacccctggacgggagagtctgccggcggagaatataaggtgtgtgtgaccatggaacgggagaccggagggatccatggtattcaaccgtgggcctgttacctccagtacgagccatgagccagcggaatctgaatgcaaagacagaacaagggccgaccggagtcacaatgacatccaaccccataacatggggacagatcaagaaaacgacacaagaagctgagaaactactggagcgccagggtcaggcaaaaacccctgactccatgttcttggccatgctagctgtagtgtcctgtgcgtctataggatcgggtgaaccaccaaccggcaattgaaagctgcacagcctgaaattacctttattcaattaatgcaaaaacaaaaggggagatgttggaggccgaaggaatgagggtcgtgaccaactcagtataccactggaggctctgtgagcaaacagcaaactgttctcatgaaagcaggatgttggcgaactgacaaactctgtctgccgccagaaggaatgctgggggcagtcatgtcccaggtcccgtgctccttgaggttatccacaggaacatccagaacctgttgaacaaagaaaggaatcatgtgggcctgtgttaaatcaaatagctgaccgacagttatcccttcctccctattcactctacctaataaatatgaagggctgtaaaagctcaggtccctgttccctaatatcaaggagccccctgaccccttctttcaaaca

SEQ ID NO: 129679 - DNA, 1469 bp, Homo sapiens
  Payload ID: 5362
  Gene Symbol: ERVK3-1
  Gene Name: endogenous retrovirus group K3, member 1
  ENST ID: ENST00000413518
  CDS Start-End: 260-589
gaggtcctgggcggccgctggccaccaggcggaagtgcgtaccggaagtgccggcggcagtgtgtaagacgctcacgggcgcgcggactatcgggcggctaggctctctgaggaggctgccacagtgaagcaaccgtgacaagtggtgcccgaccagggacctgaacgaggaaggtctgccagagcagagaaagtgaaactgatcagacgaactacgaacccctggacgggagagtctgccggcggagaatataaggagatggacaaaccgtgtgggtgccctccaggtgtgtgtgaccatggaacgggagaccggagggatccatggtattcaaccgtgggcctgttacctccagtacgagccatgagccagcggaatctgaatgcaaagacagaacaagggccgaccggagtcacaatgacatccaaccccataacatggggacagatcaagaaaacgacacaagaagctgagaaactactggagcgccagggtcaggcaaaaacccctgactccatgttcttggccatgctagctgtagtgtcctgtgcgtctataggatcgggtgaaccaccaaccggcaattgaaagctgcacagcctgaaattacctttattcaattaatgcaaaaacaaaaggggagatgttggaggccgaaggaatgagggtcgtgaccaactcagtataccactggaggctctgtgagcaaacagcaaactgttctcatgaaagcaggatgttggcgaactgacaaactctgtctgccgccagaaggaatgctgggggcagtcatgtcccaggtcccgtgctccttgaggttatccacaggaacatccagaacctgttgaacaaagaaaggaatcatgtgggcctgtgttaaatcaaatagctgaccgacagttatcccttcctccctattcactctacctaataaatatgaagggctgtaaaagctcaggtccctgttccctaatatcaaggagccccctgaccccttctttcaaacagatccttttgtctgtctcatttctgcattcgtcgtccttcgttcggtccagaagcaaccgcgacagtcctgcatgtgttgatgccacctgtatgtgcaggtgtgacctcaggtgtgtgagtatccctcataccccttatcatcactgcctattcgctcttcctccagcctctggcaaccactaatccacgttatatgtctagatttgcctcttctggacacttcatataaatggagtcatacaatatgtggtttcttgtgtctggctttttaccactgaacgttttcagagttcatccatgttgtagcatgtatcagtttttcattcctctttatggctgaataatactgcattgtatggatataccacagtttgtttactcattagttcatagacattggggttgtttccaactctctgatattataaatgctactgctgtgaaaattcatgtacaggtg

SEQ ID NO: 129680 - DNA, 564 bp, Homo sapiens
  Payload ID: 5362
  Gene Symbol: ERVK3-1
  Gene Name: endogenous retrovirus group K3, member 1
  ENST ID: ENST00000608070
  CDS Start-End: 326-564
agtgtgtaagacgctcacgggcgcgcggactatcgggcggctaggctctctgaggaggctgccacagtgaagcaaccgtgacaagtggtgcccgaccagggacctgaacgaggaaggtctgccagagcagagaaagtgaaactgatcagacgaactacgaacccctggacgggagagtctgccggcggagaatataagaccccagcagaacgacactggcaactgctagaggaaaagaggcaagtttatccaaaagtgttatggaaatccccagaagaaggacaatggaaaggtccggtggatttgctgacgtggggacgagggtatgcttgtgtttttacaggagatggacaaaccgtgtgggtgccctccaggtgtgtgtgaccatggaacgggagaccggagggatccatggtattcaaccgtgggcctgttacctccagtacgagccatgagccagcggaatctgaatgcaaagacagaacaagggccgaccggagtcacaatgacatccaaccccataacatggggacagatcaagaaaacgacacaagaagctgagaa

SEQ ID NO: 129681 - DNA, 501 bp, Homo sapiens
  Payload ID: 5362
  Gene Symbol: ERVK3-1
  Gene Name: endogenous retrovirus group K3, member 1
  ENST ID: ENST00000608004
  CDS Start-End: 245-501
aagcaaccgtgacaagtggtgcccgaccagggacctgaacgaggaaggtctgccagagcagagaaagtgaaactgatcagacgaactacgaacccctggacgggagagtctgccggcggagaatataagcccgtgtcctctgtctcttgcttcggcgcctggatggcttgccgcccacacaagagcaccttaaaaccagaactgcttaacctatttctgagactccaaaaagctgttcgctctcatgctgccccttttcatatttctcatatccgatctcacacacaacttcctggggccactatctctagaccccagcagaacgacactggcaactgctagaggaaaagaggagatggacaaaccgtgtgggtgccctccaggtgtgtgtgaccatggaacgggagaccggagggatccatggtattcaaccgtgggcctgttacctccagtacgagccatgagccagcggaatctgaatgcaaagacagaacaagggcc

SEQ ID NO: 129682 - DNA, 536 bp, Homo sapiens
  Payload ID: 5362
  Gene Symbol: ERVK3-1
  Gene Name: endogenous retrovirus group K3, member 1
  ENST ID: ENST00000609864
  CDS Start-End: 243-536
agtgtgtaagacgctcacgggcgcgcggactatcgggcggctaggctctctgaggaggctgccacagtgaagcaaccgtgacaagtggtgcccgaccagggacctgaacgaggaaggtctgccagagcagagaaagtgaaactgatcagacgaactacgaacccctggacgggagagtctgccggcggagaatataagaccccagcagaacgacactggcaactgctagaggaaaagaggagatggacaaaccgtgtgggtgccctccaggtgtgtgtgaccatggaacgggagaccggagggatccatggtattcaaccgtgggcctgttacctccagtacgagccatgagccagcggaatctgaatgcaaagacagaacaagggccgaccggagtcacaatgacatccaaccccataacatggggacagatcaagaaaacgacacaagaagctgagaaactactggagcgccagggtcaggcaaaaacccctgactccatgttcttggccatgctagctgtagtgtcctgtgcg

SEQ ID NO: 129683 - DNA, 669 bp, Homo sapiens
  Payload ID: 5362
  Gene Symbol: ERVK3-1
  Gene Name: endogenous retrovirus group K3, member 1
  ENST ID: ENST00000610038
  CDS Start-End: 321-669
gcagtgtgtaagacgctcacgggcgcgcggactatcgggcggctaggctctctgaggaggctgccacagtgaagcaaccgtgacaagtggtgcccgaccagggacctgaacgaggaaggtctgccagagcagagaaagtgaaactgatcagacgaactacgaacccctggacgggagagtctgccggcggagaatataagcagaacgacactggcaactgctagaggaaaagaggcaagtttatccaaaagtgttatggaaatccccagaagaaggacaatggaaaggtccggtggatttgctgacgtggggacgagggtatgcttgtgtttttacaggagatggacaaaccgtgtgggtgccctccaggtgtgtgtgaccatggaacgggagaccggagggatccatggtattcaaccgtgggcctgttacctccagtacgagccatgagccagcggaatctgaatgcaaagacagaacaagggccgaccggagtcacaatgacatccaaccccataacatggggacagatcaagaaaacgacacaagaagctgagaaactactggagcgccagggtcaggcaaaaacccctgactccatgttcttggccatgctagctgtagtgtcctgtgcgtctataggatcgggtgaaccaccaaccggcaatt

SEQ ID NO: 129684 - DNA, 2744 bp, Homo sapiens
  Payload ID: 5363
  Gene Symbol: ERVMER34-1
  Gene Name: endogenous retrovirus group MER34, member 1
  Uniprot ID: Q9H9K5
  ENST ID: ENST00000440542
  CDS Start-End: 741-2432
tcttggtcttctggcctggcggcgatcgtcggccagtttatccctcggagttgcactggcagacacgccgctactttgtagcgggtttcgggcgggccacgcgtgcggcgacaggaacccaaccccggccgaccttgggctccaggaattcgttgtctacgtctgcggaggtgcggcagcctcagttttaagcgcaggaaggcaatagaggctgtgctctgaacctttccctcacgatgatcttctgcctgttgaccatcctggtgtctttcccatgtggccctgtatggttggcatggttcctgtctttaggacttgtgatcaagtatatctgaaagtttttagaagaaaagatgtgttgtaacctccctggaaaaagaagagaccttatgaagtactgctaaccacctacatagtcatcaaaataaaattcctgaatttgtacaagccacaggaagctagattgagatcattatatgacaactggaaggccaaggctatgggttacctcaaattgaggaattttggcacctactcacaggctccatgagcagatgaagtagacagctttactcagtatctcagaccaagaacttcatctccatctccaactagctgaaacatcttccctcctcaacctggaaaattctctgacttagaaatttaaacaaaaccctcccctttcattgaatctccattgtctggagtttgcttgttttaatctagcctgttcctccactatgggctccctttcaaactatgccctgcttcaactaacccttactgcttttttgacaattctagtacaacctcagcacctgcttgctccagttttccggacactatctatcttgactaatcagtctaattgctggttatgtgaacatctagataatgcagaacaacccgaactagtttttgttcctgccagtgcaagcacctggtggacctattctggacaatggatgtatgaaagggtgtggtatccacaagcagaagtacagaatcactctacttcctcctatcgtaaagtgacttggcactgggaagcctccatggaagctcaaggtctatcctttgctcaagtaaggttattggagggaaatttttctctttgcgtagaaaataaaaatggcagtggacccttcctaggtaatatacctaaacaatactgtaatcaaatactatggtttgattctacagatggcaccttcatgccctctatagatgttacaaatgaatccaggaacgatgatgatgatacaagtgtttgcctaggcactagacaatgttcctggtttgcaggttgcacaaaccggacctggaacagctcagctgttcccttgattggtctgcccaatacccaagactacaaatgggtagatcgaaattctggattgacctggtcaggtaatgacacctgtctctatagctgccaaaaccaaaccaaaggccttctgtaccagctatttcgcaacctattttgctcttatggcctgacagaggcacatgggaaatggagatgtgcagatgccagcataactaatgacaaaggtcatgatggacaccggacccccacctggtggctcacaggttccaatctgaccttgtctgtgaacaactctggcctcttttttttgtgcggcaatggggtgtacaaagggtttccacctaaatggtctgggcgatgtggacttgggtatcttgtaccttccctcaccagatacctcaccttaaatgctagccaaattacaaacctgagatccttcattcataaagtaacaccgcatagatgcacccaaggagacacagacaatccacctctgtattgcaaccccaaggacaattcaacaataagggccctttttccaagtttgggaacttatgatttagaaaaggcaattctaaacatttccaaagcaatggaacaggaattcagtgccactaagcagaccttggaagcacaccaatcaaaagttagcagtttagcctctgcatcccgaaaggatcatgtcttggatataccgaccacccaacgacaaacggcttgtggaactgttggcaaacagtgttgcctctatataaattattcggaagaaataaagtctaatatacagcgtctccacgaagcatccgagaacctgaagaatgtaccgttacttgattggcaaggcatatttgcaaaagtgggagactggttcagatcatggggctatgtgcttttaattgttcttttctgcttattcatctttgttttaatctatgttcgtgtctttcgcaaatctcgcagatcccttaactcccaacctctgaacctagccttatctccacagcaatcagcacagctccttgtcagtgaaacttcatgtcaagtttcaaatagggcaatgaagggactaacaacccatcaatatgacacaagtctactttgagaatatctgaacaaacagcagctgcagacaaaaagccttagctaaactttgatgagtaaagcaggtcttaccgagaattcagctgccaaaaccctcctctgagtgttcctcttataagggcacttagcactaggacctcccaaggtattgtaaataagccttatcagaactttttgtagtttcattctgaagccttaagacacacaccataaagctgatctgtaaacccttaccccttgctgttcagagagctactctttgtagtgttcttgcatgcatatataataaatgttttttctattgatctgttaa

SEQ ID NO: 129685 - DNA, 3830 bp, Homo sapiens
  Payload ID: 5363
  Gene Symbol: ERVMER34-1
  Gene Name: endogenous retrovirus group MER34, member 1
  Uniprot ID: Q9H9K5
  ENST ID: ENST00000443173
  CDS Start-End: 862-2553
agagtcttccctgcgccgaaagcgcaggtatgttcctagtcttgagcgggagaaaatcacccagctcggagcacctggccagtgggaccggtgggttcctggtgcctgaatccggctgtccgctctgcggtgccccgccccgccccaacccaggatcttcccagccccgctccgccccaacccaggatcttcccagccctcgtgtgtccccgctcacttcagttcccgccgcgagccttcttcttggtcttctggcctggcggcgatcgtcggccagtttatccctcggagttgcactggcagacacgccgctactttgtagcgggtttcgggcgggccacgcgtgcggcgacaggaacccaaccccggccgaccttgggctccaggaattcgttgtctacgtctgcggaggtgcggcagcctcagttttaagcgcaggtgatcaagtatatctgaaagtttttagaagaaaagatgtgttgtaacctccctggaaaaagaagagaccttatgaagtactgctaaccacctacatagtcatcaaaataaaattcctgaatttgtacaagccacaggaagctagattgagatcattatatgacaactggaaggccaaggctatgggttacctcaaattgaggaattttggcacctactcacaggctccatgagcagatgaagtagacagctttactcagtatctcagaccaagaacttcatctccatctccaactagctgaaacatcttccctcctcaacctggaaaattctctgacttagaaatttaaacaaaaccctcccctttcattgaatctccattgtctggagtttgcttgttttaatctagcctgttcctccactatgggctccctttcaaactatgccctgcttcaactaacccttactgcttttttgacaattctagtacaacctcagcacctgcttgctccagttttccggacactatctatcttgactaatcagtctaattgctggttatgtgaacatctagataatgcagaacaacccgaactagtttttgttcctgccagtgcaagcacctggtggacctattctggacaatggatgtatgaaagggtgtggtatccacaagcagaagtacagaatcactctacttcctcctatcgtaaagtgacttggcactgggaagcctccatggaagctcaaggtctatcctttgctcaagtaaggttattggagggaaatttttctctttgcgtagaaaataaaaatggcagtggacccttcctaggtaatatacctaaacaatactgtaatcaaatactatggtttgattctacagatggcaccttcatgccctctatagatgttacaaatgaatccaggaacgatgatgatgatacaagtgtttgcctaggcactagacaatgttcctggtttgcaggttgcacaaaccggacctggaacagctcagctgttcccttgattggtctgcccaatacccaagactacaaatgggtagatcgaaattctggattgacctggtcaggtaatgacacctgtctctatagctgccaaaaccaaaccaaaggccttctgtaccagctatttcgcaacctattttgctcttatggcctgacagaggcacatgggaaatggagatgtgcagatgccagcataactaatgacaaaggtcatgatggacaccggacccccacctggtggctcacaggttccaatctgaccttgtctgtgaacaactctggcctcttttttttgtgcggcaatggggtgtacaaagggtttccacctaaatggtctgggcgatgtggacttgggtatcttgtaccttccctcaccagatacctcaccttaaatgctagccaaattacaaacctgagatccttcattcataaagtaacaccgcatagatgcacccaaggagacacagacaatccacctctgtattgcaaccccaaggacaattcaacaataagggccctttttccaagtttgggaacttatgatttagaaaaggcaattctaaacatttccaaagcaatggaacaggaattcagtgccactaagcagaccttggaagcacaccaatcaaaagttagcagtttagcctctgcatcccgaaaggatcatgtcttggatataccgaccacccaacgacaaacggcttgtggaactgttggcaaacagtgttgcctctatataaattattcggaagaaataaagtctaatatacagcgtctccacgaagcatccgagaacctgaagaatgtaccgttacttgattggcaaggcatatttgcaaaagtgggagactggttcagatcatggggctatgtgcttttaattgttcttttctgcttattcatctttgttttaatctatgttcgtgtctttcgcaaatctcgcagatcccttaactcccaacctctgaacctagccttatctccacagcaatcagcacagctccttgtcagtgaaacttcatgtcaagtttcaaatagggcaatgaagggactaacaacccatcaatatgacacaagtctactttgagaatatctgaacaaacagcagctgcagacaaaaagccttagctaaactttgatgagtaaagcaggtcttaccgagaattcagctgccaaaaccctcctctgagtgttcctcttataagggcacttagcactaggacctcccaaggtattgtaaataagccttatcagaactttttgtagtttcattctgaagccttaagacacacaccataaagctgatctgtaaacccttaccccttgctgttcagagagctactctttgtagtgttcttgcatgcatatataataaatgttttttctattgatctgttaatttgcaagcccccaaacactggaactaagttgggggcaggatagtttctcccaacagcactttgtaggcttctggatagaccaaagagtgtgtttgaatagataagggaattttgttcccttgattttggttgaaggtagaagaatccaatgtacacatacacaaaactatgtccttaaatttgtctcaaagaataaatattgggtagtcatcagaattgactgaaaacttactttagggagaaagccacaaataatttaggctggtatgatctgagctttcctgatttcccatgggcattttagtggtctaatggaatattagtctgatatgcattttagccatcttatgaaatgggccgcaggtggaagtaggatgcagggagtgttgaggtggcatctattatatcaaatgcttcactctgcccagtcctctggtgagttccttacatgcatctttctagttaatcctctcggtgttcatattttacagattaatcaactcaaagggtagatagcttgctaaagattatactattactgaaaaatagcaagatgcagaacagcatacctagtatgttactcttttttttttttttttgaggcagagtctggccctttcacccaggctggagtgcagtggctcaatctcggctcactgcaacctctgcccccttgggttcatgccattctcctgcctccctcctgagtagctgggactacaggcgcctgccaccacgcctgactaattttttgtgtttttagtagagacggggtttcaccgtgttagccaggatggtctcagtctcctgacctcatgacccgcccacctcaacctcccaaagtcctaggattataggtgtgagccactgcacccagcctcgtatgttactttttattttaaaaaaggggaaatgatatgtatatgtgtatgtatttgcaaataaaacaggaaaagccattcac

SEQ ID NO: 129686 - DNA, 2202 bp, Homo sapiens
  Payload ID: 5364
  Gene Symbol: ERVV-1
  Gene Name: endogenous retrovirus group V, member 1
  Uniprot ID: B6SEH8
  ENST ID: ENST00000602168
  CDS Start-End: 171-1604
tgcggtggcatcggttcttctccttattttgacccacactggcatgccacctgaagtcccgataacagcctgatttctcactaaacactccatcgaaccatttcattatttgtctctcctattttcagcactttccttttgctttcacaaagcttaagggagaatcagctatgacagagaaattccttttcctttatctttccctccttcccatgcccctactctcacaggcacagtggaatgaaaattcccttgtcagtttttccaaaataattgcttcgggaaaccatctaagcaactgttggatctgccacaacttcatcaccaggtcctcatcttaccaatatattttggtaagaaatttttctttaaacctaacatttggttcaggaatccctgaaggccaacataaatctgttccgctccaggtttcgcttgctaactcagcgcaccaagtcccctgcctggatctcactccacctttcaatcaaagctctaaaacttctttctatttctacaactgctcttctctaaaccaaacctgttgtccatgccctgaaggacactgtgacaggaagaacacctctgaggagggattccccagtcccaccatccatcccatgagcttctccccagcaggctgccaccctaacttgactcactggtgtccagctaaacaaatgaacgattatcgagacaagtcaccccaaaaccgctgtgcagcttgggaaggaaaagagctaatcacatggagggttctatatttgcttcccaaggcacacactgtccccacatggccaaaatctactgttcccctgggagggcctctatcccctgcatgcaatcaaactattccagcagggtggaaatcgcagttacacaagtggttcgacagccacatcccccggtgggcctgtacccctcctggctatgtatttttatgtgggccacaaaaaaataaactgccctttgatggaagtcctaagataacttattcaaccccccctgtggcaaacctctacacttgcattaataacatccaacatacgggagaatgtgctgtgggacttttgggaccacgggggataggtgtgaccatttataacaccacccaacccagacagaaaagagctctgggtctaatactggcagggatgggtgcggccataggaatgatcgccccatggggagggttcacttatcatgatgtcaccctcagaaatctctccagacaaatagacaacatagctaagagtaccagagatagcatctctaaactcaaggcctccatagattctctagcaaatgtagtcatgaacaacagattggccttagattacctcttagcagagcagggtggagtctgtgcagtgatcagtaaatcctgttgcatttatgtcaataacagtggggcgatagaggaggatataaaaaagatctatgatgaggttacgtggctccataactttggaaaaggtgattcagcagggtccatttgggaggctgtgaagtctgccctcccctccctcacatggtttgtccctttactgggaccagctgcacttaatagcctgctttctcctctttggcccttgtctctataattcactaattaaatatgtctcttccaggatatggcaatttcacacagagcccctaaaaatggaaagagatcatccaatcttccttggaggtcccagcacctacaagtacatatctcccttggatgccagtgggcaaagattctgcaactacggaggggctccttccctgacagagagcaagagagggagaccctgatgacttcttcgtcccacgtcagcaggaagtagttacagaagacccacgacgtccttatgcccaaagcttttcagggtctccaactcttgagggggaatactgttagggtaggcaggtagccagacaagagcaggcaaggaagcccctgggaaaggaatctttagaaatgcagcccgctgatggcctccttggaaacgctgcacgctgagtcagcaaaaggaggagcgtggctacactggctacacctggccttgtggctgcattcctctgttccagaagggaacttatcaaggcccagccagaggttaccaaggtaggagctattccccactaagaagcatgtatacttctctaataattcaccctaatataccattttgttcattaaaataataaaaaaaa

SEQ ID NO: 129687 - DNA, 2431 bp, Homo sapiens
  Payload ID: 5365
  Gene Symbol: ERVV-2
  Gene Name: endogenous retrovirus group V, member 2
  Uniprot ID: B6SEH9
  ENST ID: ENST00000601417
  CDS Start-End: 607-2214
acagactccttcttttcaggagcccactcggttctgtcgttcagggtgtcgcttctttctgagctcctgtctctttaaatgaagggcatttaccctttaactctttctgcgcatctcttgactgaatccaagaagaccaagaaccagaggacttccacacccctctgggtaacatctggtgttttcacctggttacctggttacctcgcctggttatccagctatcaacatttctggcatctccagttggatacatcagtctcaagtgaaactgtgggaaggtcccgaagaaccacagaagaacaacagaattcagcacctgagcattcttgtgagccactggagaacttaaaattccacttcaagtgaaaagataagtaaagccttctctctgttcacccaaaactaaagtcaatctcagtacggggaatcttggttgcggtggcattggttcttctccttattttgacccaactggcatgccacctgaagtcccgataacagcctgatttctcactaaacactccatcgaaccacttcattatttgtctctcctattttcagcactttccttttgctttcacaaagcttaagggagaatcagctatgacagagaaattccttttcctttatctttccctccttcccatgcccctactctcacaggcacagtggaatgaaaattcccttgtcagtttttccaaaataattgcttcgggaaaccatctaagcaactgttggatctgccacaacttcatcaccaggtcctcatcttaccaatatattttggtaagaaatttttctttaaacctaacatttggttcaggaatccctgaaggccaacataaatctgttccgctccaggtttcgcttgctaactcagcgcaccaagtcccctgcctggatctcactccacctttcaatcaaagctctaaaacttctttctatttctacaactgctcttctctaaaccaaacctgttgtccatgccctgaaggacactgtgacaggaagaacacctctgaggagggattccccagtcccaccatccatcccatgagcttctccccagcaggctgccaccctaacttgactcactggtgtccagctaaacaaatgaacgattatcgagacaagtcaccccaaaaccgctgtgcagcttgggaaggaaaagagctaatcacatggagggttctatattcgcttcccaaggcacacactgtccccacatggccaaaatctactgttcccctgggagggcctctatcccctgcatgcaatcaaactattccagcagggtggaaatcgcagttacacaagtggttcgacagccacatcccccggtgggcctgtacccctcctggctatgtatttttatgtgggccacaaaaaaataaactgccctttgatggaagtcctaagataacctattcaaccccccctgtggcaaacctctacacttgcattaataacatccaacatacgggagaatgtgctgtgggacttttgggaccacgggggataggtgtgaccatttataacaccacccaacccagacagaaaagagctctgggtctaatactggcagggatgggtgcggccataggaatgatcgccccatggggagggttcacttatcatgatgtcaccctcagaaatctctccagacaaatagacaacatagctaagagtaccagagatagcatctctaaactcaaggcctccatagattctctagcaaatgtagtcatggacaacagattggccttagattacctcttagcagagcagggtggagtctgtgcagtgatcaataaatcctgttgcgtttatgtcaataacagtggggcgatagaggaggatataaaaaagatctatgatgaggctacgtggctccatgactttggaaaaggaggtgcttcagcaagggccatctgggaggctgtgaagtctgccctcccctccctcaactggtttgtccctttactgggaccagcaacagttatactcttacttttcctctttggcccttgtttctttaatttactgattaagtgtgtctcttctaggataaagcaatttcacatgaagtccccccaaatggaaagatatcagctatctgtcattggaggccccagcacctataagcacatctcccccttggatgccagtgggcaaagattccgggaaactatggaggaattttctctctgagacagagcaagagagggagaccctgatgacttcttcgccccatgtcagcaggaagtagttacagaagacccacgacgtccttacaaccagagcttttcagggtctccatctcttgaggagggaaatattagggtaggcaggtaggcaggcatgagcaggcaagagagcccttgggaaaggaatctttagaaacgcagcccactgatagcttccttgg

SEQ ID NO: 129688 - DNA, 2925 bp, Homo sapiens
  Payload ID: 5366
  Gene Symbol: ERVW-1
  Gene Name: endogenous retrovirus group W, member 1
  Uniprot ID: Q9UQF0
  ENST ID: ENST00000493463
  CDS Start-End: 925-2541
ccctgccttatcgccaagctccttcaggagaacaaagaacaggccattaccctggagaagactggcaactgattttacccacaagcccaaacctcagggatttcagtatctactagtctgggtagatactttcacgggttgggcagaggccttcccctgtaggacagaaaaggcccaagaggtaataaaggcactagttcatgaaataattcccagattcggacttccccgaggcttacagagtgacaatagccctgctttccaggccacagtaacccagggagtatcccaggcgttaggtatacgatatcacttacactgcgcctgaaggccacagtcctcagggaaggtcgagaaaatgaatgaaacactcaaaggacatctaaaaaagcaaacccaggaaacccacctcacatggcctgctctgttgcctatagccttaaaaagaatctgcaactttccccaaaaagcaggacttagcccatacgaaatgctgtatggaaggcccttcataaccaatgaccttgtgcttgacccaagacagccaacttagttgcagacatcacctccttagccaaatatcaacaagttcttaaaacattacaaggaacctatccctgagaagagggaaaagaactattccacccttgtgacatggtattagtcaagtcccttccctctaattccccatccctagatacatcctgggaaggaccctacccagtcattttatctaccccaactgcggttaaagtggctggagtggagtcttggatacatcacacttgagtcaaatcctggatactgccaaaggaacctgaaaatccaggagacaacgctagctattcctgtgaacctctagaggatttgcgcctgctcttcaaacaacaaccaggaggaaagtaactaaaatcataaatccccatggccctcccttatcatatttttctctttactgttcttttaccctctttcactctcactgcaccccctccatgccgctgtatgaccagtagctccccttaccaagagtttctatggagaatgcagcgtcccggaaatattgatgccccatcgtataggagtctttctaagggaacccccaccttcactgcccacacccatatgccccgcaactgctatcactctgccactctttgcatgcatgcaaatactcattattggacaggaaaaatgattaatcctagttgtcctggaggacttggagtcactgtctgttggacttacttcacccaaactggtatgtctgatgggggtggagttcaagatcaggcaagagaaaaacatgtaaaagaagtaatctcccaactcacccgggtacatggcacctctagcccctacaaaggactagatctctcaaaactacatgaaaccctccgtacccatactcgcctggtaagcctatttaataccaccctcactgggctccatgaggtctcggcccaaaaccctactaactgttggatatgcctccccctgaacttcaggccatatgtttcaatccctgtacctgaacaatggaacaacttcagcacagaaataaacaccacttccgttttagtaggacctcttgtttccaatctggaaataacccatacctcaaacctcacctgtgtaaaatttagcaatactacatacacaaccaactcccaatgcatcaggtgggtaactcctcccacacaaatagtctgcctaccctcaggaatattttttgtctgtggtacctcagcctatcgttgtttgaatggctcttcagaatctatgtgcttcctctcattcttagtgccccctatgaccatctacactgaacaagatttatacagttatgtcatatctaagccccgcaacaaaagagtacccattcttccttttgttataggagcaggagtgctaggtgcactaggtactggcattggcggtatcacaacctctactcagttctactacaaactatctcaagaactaaatggggacatggaacgggtcgccgactccctggtcaccttgcaagatcaacttaactccctagcagcagtagtccttcaaaatcgaagagctttagacttgctaaccgctgaaagagggggaacctgtttatttttaggggaagaatgctgttattatgttaatcaatccggaatcgtcactgagaaagttaaagaaattcgagatcgaatacaacgtagagcagaggagcttcgaaacactggaccctggggcctcctcagccaatggatgccctggattctccccttcttaggacctctagcagctataatattgctactcctctttggaccctgtatctttaacctccttgttaactttgtctcttccagaatcgaagctgtaaaactacaaatggagcccaagatgcagtccaagactaagatctaccgcagacccctggaccggcctgctagcccacgatctgatgttaatgacatcaaaggcacccctcctgaggaaatctcagctgcacaacctctactacgccccaattcagcaggaagcagttagagcggtcgtcggccaacctccccaacagcacttaggttttcctgttgagatgggggactgagagacaggactagctggatttcctaggctgactaagaatccctaagcctagctgggaaggtgaccacatccacctttaaacacggggcttgcaacttagctcacacctgaccaatcagagagctcactaaaatgctaattaggcaaagacaggaggtaaagaaatagccaatcatctattgcctgagagcacagcaggagggacaatgatcgggatataaacccaagtcttcgagccggcaacggcaaccccctttgggtcccctccctttgtatgggagctctgttttcatgctatttcactctattaaatcttgcaactgc

SEQ ID NO: 129689 - DNA, 2763 bp, Homo sapiens
  Payload ID: 5366
  Gene Symbol: ERVW-1
  Gene Name: endogenous retrovirus group W, member 1
  Uniprot ID: Q9UQF0
  ENST ID: ENST00000603053
  CDS Start-End: 762-2378
atgggagctgttttcatgctatttcactctattaaatcttgcaactgcactcttctggtccatgtttcttacggctcgagctgagcttttgctcaccgtccaccactgctgtttgccaccaccgcagacctgccgctgactcccatccctctggatcctgcagggtgtccgctgtgctcctgatccagcgaggcgcccattgccgctcccaattgggctaaaggcttgccattgttcctgcacggctaagtgcctgggtttgttctaattgagctgaacactagtcactgggttccatggttctcttctgtgacccacggcttctaatagaactataacacttaccacatggcccaagattccattccttggaatccgtgaggccaagaactccaggtcagagaatacgaggcttgccaccatcttggaagcggcctgctaccatcttggaagtggttcaccaccatcttgggagctctgtgagcaaggaccccccggtaacattttggcaaccacgaacggacatccaaagtgatacatcctgggaaggaccctacccagtcattttatctaccccaactgcggttaaagtggctggagtggagtcttggatacatcacacttgagtcaaatcctggatactgccaaaggaacctgaaaatccaggagacaacgctagctattcctgtgaacctctagaggatttgcgcctgctcttcaaacaacaaccaggaggaaagtaactaaaatcataaatccccatggccctcccttatcatatttttctctttactgttcttttaccctctttcactctcactgcaccccctccatgccgctgtatgaccagtagctccccttaccaagagtttctatggagaatgcagcgtcccggaaatattgatgccccatcgtataggagtctttctaagggaacccccaccttcactgcccacacccatatgccccgcaactgctatcactctgccactctttgcatgcatgcaaatactcattattggacaggaaaaatgattaatcctagttgtcctggaggacttggagtcactgtctgttggacttacttcacccaaactggtatgtctgatgggggtggagttcaagatcaggcaagagaaaaacatgtaaaagaagtaatctcccaactcacccgggtacatggcacctctagcccctacaaaggactagatctctcaaaactacatgaaaccctccgtacccatactcgcctggtaagcctatttaataccaccctcactgggctccatgaggtctcggcccaaaaccctactaactgttggatatgcctccccctgaacttcaggccatatgtttcaatccctgtacctgaacaatggaacaacttcagcacagaaataaacaccacttccgttttagtaggacctcttgtttccaatctggaaataacccatacctcaaacctcacctgtgtaaaatttagcaatactacatacacaaccaactcccaatgcatcaggtgggtaactcctcccacacaaatagtctgcctaccctcaggaatattttttgtctgtggtacctcagcctatcgttgtttgaatggctcttcagaatctatgtgcttcctctcattcttagtgccccctatgaccatctacactgaacaagatttatacagttatgtcatatctaagccccgcaacaaaagagtacccattcttccttttgttataggagcaggagtgctaggtgcactaggtactggcattggcggtatcacaacctctactcagttctactacaaactatctcaagaactaaatggggacatggaacgggtcgccgactccctggtcaccttgcaagatcaacttaactccctagcagcagtagtccttcaaaatcgaagagctttagacttgctaaccgctgaaagagggggaacctgtttatttttaggggaagaatgctgttattatgttaatcaatccggaatcgtcactgagaaagttaaagaaattcgagatcgaatacaacgtagagcagaggagcttcgaaacactggaccctggggcctcctcagccaatggatgccctggattctccccttcttaggacctctagcagctataatattgctactcctctttggaccctgtatctttaacctccttgttaactttgtctcttccagaatcgaagctgtaaaactacaaatggagcccaagatgcagtccaagactaagatctaccgcagacccctggaccggcctgctagcccacgatctgatgttaatgacatcaaaggcacccctcctgaggaaatctcagctgcacaacctctactacgccccaattcagcaggaagcagttagagcggtcgtcggccaacctccccaacagcacttaggttttcctgttgagatgggggactgagagacaggactagctggatttcctaggctgactaagaatccctaagcctagctgggaaggtgaccacatccacctttaaacacggggcttgcaacttagctcacacctgaccaatcagagagctcactaaaatgctaattaggcaaagacaggaggtaaagaaatagccaatcatctattgcctgagagcacagcaggagggacaatgatcgggatataaacccaagtcttcgagccggcaacggcaaccccctttgggtcccctccctttgtatgggagctctgttttcatgctatttcactctattaaatcttgcaactgca

SEQ ID NO: 129690 - DNA, 3059 bp, Homo sapiens
  Payload ID: 5367
  Gene Symbol: ENG
  Gene Name: endoglin
  Uniprot ID: P17813
  ENST ID: ENST00000344849
  CDS Start-End: 282-2159
cctggggccaggactgctgctgtcactgccatccattggagcccagcaccccctccccgcccatccttcggacagcaactccagcccagccccgcgtccctgtgtccacttctcctgacccctcggccgccaccccagaaggctggagcagggacgccgtcgctccggccgcctgctcccctcgggtccccgtgcgagcccacgccggccccggtgcccgcccgcagccctgccactggacacaggataaggcccagcgcacaggcccccacgtggacagcatggaccgcggcacgctccctctggctgttgccctgctgctggccagctgcagcctcagccccacaagtcttgcagaaacagtccattgtgaccttcagcctgtgggccccgagaggggcgaggtgacatataccactagccaggtctcgaagggctgcgtggctcaggcccccaatgccatccttgaagtccatgtcctcttcctggagttcccaacgggcccgtcacagctggagctgactctccaggcatccaagcaaaatggcacctggccccgagaggtgcttctggtcctcagtgtaaacagcagtgtcttcctgcatctccaggccctgggaatcccactgcacttggcctacaattccagcctggtcaccttccaagagcccccgggggtcaacaccacagagctgccatccttccccaagacccagatccttgagtgggcagctgagaggggccccatcacctctgctgctgagctgaatgacccccagagcatcctcctccgactgggccaagcccaggggtcactgtccttctgcatgctggaagccagccaggacatgggccgcacgctcgagtggcggccgcgtactccagccttggtccggggctgccacttggaaggcgtggccggccacaaggaggcgcacatcctgagggtcctgccgggccactcggccgggccccggacggtgacggtgaaggtggaactgagctgcgcacccggggatctcgatgccgtcctcatcctgcagggtcccccctacgtgtcctggctcatcgacgccaaccacaacatgcagatctggaccactggagaatactccttcaagatctttccagagaaaaacattcgtggcttcaagctcccagacacacctcaaggcctcctgggggaggcccggatgctcaatgccagcattgtggcatccttcgtggagctaccgctggccagcattgtctcacttcatgcctccagctgcggtggtaggctgcagacctcacccgcaccgatccagaccactcctcccaaggacacttgtagcccggagctgctcatgtccttgatccagacaaagtgtgccgacgacgccatgaccctggtactaaagaaagagcttgttgcgcatttgaagtgcaccatcacgggcctgaccttctgggaccccagctgtgaggcagaggacaggggtgacaagtttgtcttgcgcagtgcttactccagctgtggcatgcaggtgtcagcaagtatgatcagcaatgaggcggtggtcaatatcctgtcgagctcatcaccacagcggaaaaaggtgcactgcctcaacatggacagcctctctttccagctgggcctctacctcagcccacacttcctccaggcctccaacaccatcgagccggggcagcagagctttgtgcaggtcagagtgtccccatccgtctccgagttcctgctccagttagacagctgccacctggacttggggcctgagggaggcaccgtggaactcatccagggccgggcggccaagggcaactgtgtgagcctgctgtccccaagccccgagggtgacccgcgcttcagcttcctcctccacttctacacagtacccatacccaaaaccggcaccctcagctgcacggtagccctgcgtcccaagaccgggtctcaagaccaggaagtccataggactgtcttcatgcgcttgaacatcatcagccctgacctgtctggttgcacaagcaaaggcctcgtcctgcccgccgtgctgggcatcacctttggtgccttcctcatcggggccctgctcactgctgcactctggtacatctactcgcacacgcgtgagtaccccaggcccccacagtgagcatgccgggcccctccatccacccgggggagcccagtgaagcctctgagggattgaggggccctggccaggaccctgacctccgcccctgcccccgctcccgctcccaggttcccccagcaagcgggagcccgtggtggcggtggctgccccggcctcctcggagagcagcagcaccaaccacagcatcgggagcacccagagcaccccctgctccaccagcagcatggcatagccccggccccccgcgctcgcccagcaggagagactgagcagccgccagctgggagcactggtgtgaactcaccctgggagccagtcctccactcgacccagaatggagcctgctctccgcgcctacccttcccgcctccctctcagaggcctgctgccagtgcagccactggcttggaacaccttggggtccctccaccccacagaaccttcaacccagtgggtctgggatatggctgcccaggagacagaccacttgccacgctgttgtaaaaacccaagtccctgtcatttgaacctggatccagcactggtgaactgagctgggcaggaagggagaacttgaaacagattcaggccagcccagccaggccaacagcacctccccgctgggaagagaagagggcccagcccagagccacctggatctatccctgcggcctccacacctgaacttgcctaactaactggcaggggagacaggagcctagcggagcccagcctgggagcccagagggtggcaagaacagtgggcgttgggagcctagctcctgccacatggagccccctctgccggtcgggcagccagcagagggggagtagccaagctgcttgtcctgggcctgcccctgtgtattcaccaccaataaatcagaccatgaaacc

SEQ ID NO: 129691 - DNA, 3048 bp, Homo sapiens
  Payload ID: 5367
  Gene Symbol: ENG
  Gene Name: endoglin
  Uniprot ID: P17813
  ENST ID: ENST00000373203
  CDS Start-End: 402-2378
ggcaggcggcctggcccagccccttctctaaggaagcgcatttcctgcctccctgggccggccgggctggatgagccaggagctccctgctgccggtcataccacagccttcatctgcgccctggggccaggactgctgctgtcactgccatccattggagcccagcaccccctccccgcccatccttcggacagcaactccagcccagccccgcgtccctgtgtccacttctcctgacccctcggccgccaccccagaaggctggagcagggacgccgtcgctccggccgcctgctcccctcgggtccccgtgcgagcccacgccggccccggtgcccgcccgcagccctgccactggacacaggataaggcccagcgcacaggcccccacgtggacagcatggaccgcggcacgctccctctggctgttgccctgctgctggccagctgcagcctcagccccacaagtcttgcagaaacagtccattgtgaccttcagcctgtgggccccgagaggggcgaggtgacatataccactagccaggtctcgaagggctgcgtggctcaggcccccaatgccatccttgaagtccatgtcctcttcctggagttcccaacgggcccgtcacagctggagctgactctccaggcatccaagcaaaatggcacctggccccgagaggtgcttctggtcctcagtgtaaacagcagtgtcttcctgcatctccaggccctgggaatcccactgcacttggcctacaattccagcctggtcaccttccaagagcccccgggggtcaacaccacagagctgccatccttccccaagacccagatccttgagtgggcagctgagaggggccccatcacctctgctgctgagctgaatgacccccagagcatcctcctccgactgggccaagcccaggggtcactgtccttctgcatgctggaagccagccaggacatgggccgcacgctcgagtggcggccgcgtactccagccttggtccggggctgccacttggaaggcgtggccggccacaaggaggcgcacatcctgagggtcctgccgggccactcggccgggccccggacggtgacggtgaaggtggaactgagctgcgcacccggggatctcgatgccgtcctcatcctgcagggtcccccctacgtgtcctggctcatcgacgccaaccacaacatgcagatctggaccactggagaatactccttcaagatctttccagagaaaaacattcgtggcttcaagctcccagacacacctcaaggcctcctgggggaggcccggatgctcaatgccagcattgtggcatccttcgtggagctaccgctggccagcattgtctcacttcatgcctccagctgcggtggtaggctgcagacctcacccgcaccgatccagaccactcctcccaaggacacttgtagcccggagctgctcatgtccttgatccagacaaagtgtgccgacgacgccatgaccctggtactaaagaaagagcttgttgcgcatttgaagtgcaccatcacgggcctgaccttctgggaccccagctgtgaggcagaggacaggggtgacaagtttgtcttgcgcagtgcttactccagctgtggcatgcaggtgtcagcaagtatgatcagcaatgaggcggtggtcaatatcctgtcgagctcatcaccacagcggaaaaaggtgcactgcctcaacatggacagcctctctttccagctgggcctctacctcagcccacacttcctccaggcctccaacaccatcgagccggggcagcagagctttgtgcaggtcagagtgtccccatccgtctccgagttcctgctccagttagacagctgccacctggacttggggcctgagggaggcaccgtggaactcatccagggccgggcggccaagggcaactgtgtgagcctgctgtccccaagccccgagggtgacccgcgcttcagcttcctcctccacttctacacagtacccatacccaaaaccggcaccctcagctgcacggtagccctgcgtcccaagaccgggtctcaagaccaggaagtccataggactgtcttcatgcgcttgaacatcatcagccctgacctgtctggttgcacaagcaaaggcctcgtcctgcccgccgtgctgggcatcacctttggtgccttcctcatcggggccctgctcactgctgcactctggtacatctactcgcacacgcgttcccccagcaagcgggagcccgtggtggcggtggctgccccggcctcctcggagagcagcagcaccaaccacagcatcgggagcacccagagcaccccctgctccaccagcagcatggcatagccccggccccccgcgctcgcccagcaggagagactgagcagccgccagctgggagcactggtgtgaactcaccctgggagccagtcctccactcgacccagaatggagcctgctctccgcgcctacccttcccgcctccctctcagaggcctgctgccagtgcagccactggcttggaacaccttggggtccctccaccccacagaaccttcaacccagtgggtctgggatatggctgcccaggagacagaccacttgccacgctgttgtaaaaacccaagtccctgtcatttgaacctggatccagcactggtgaactgagctgggcaggaagggagaacttgaaacagattcaggccagcccagccaggccaacagcacctccccgctgggaagagaagagggcccagcccagagccacctggatctatccctgcggcctccacacctgaacttgcctaactaactggcaggggagacaggagcctagcggagcccagcctgggagcccagagggtggcaagaacagtgggcgttgggagcctagctcctgccacatggagccccctctgccggtcgggcagccagcagagggggagtagccaagctgcttgtcctgggcctgcccctgtgtattcaccaccaataaatcagaccatgaaaccagtga

SEQ ID NO: 129692 - DNA, 2804 bp, Homo sapiens
  Payload ID: 5367
  Gene Symbol: ENG
  Gene Name: endoglin
  ENST ID: ENST00000480266
  CDS Start-End: 705-2135
aaggctgctgtgaggatcaaatgagttcactcgtgtaaagctgcctaggctcccagtaagcatgatgggagcatctgcagtgattattggtggtctgcaaatggggaaactgaggctcagagaggttaggcttctgctcaaggtgaccagcattttaagaggcagagctgggatttgatccaggccatctggctccagagctgtttttcttgatcatcctccaaggtcttgcagaaacagtccattgtgaccttcagcctgtgggccccgagaggggcgaggtgacatataccactagccaggtctcgaagggctgcgtggctcaggcccccaatgccatccttgaagtccatgtcctcttcctggagttcccaacgggcccgtcacagctggagctgactctccaggcatccaagcaaaatggcacctggccccgagaggtgcttctggtcctcagtgtaaacagcagtgtcttcctgcatctccaggccctgggaatcccactgcacttggcctacaattccagcctggtcaccttccaagagcccccgggggtcaacaccacagagctgccatccttccccaagacccagatccttgagtgggcagctgagaggggccccatcacctctgctgctgagctgaatgacccccagagcatcctcctccgactgggccaagcccaggggtcactgtccttctgcatgctggaagccagccaggacatgggccgcacgctcgagtggcggccgcgtactccagccttggtccggggctgccacttggaaggcgtggccggccacaaggaggcgcacatcctgagggtcctgccgggccactcggccgggccccggacggtgacggtgaaggtggaactgagctgcgcacccggggatctcgatgccgtcctcatcctgcagggtcccccctacgtgtcctggctcatcgacgccaaccacaacatgcagatctggaccactggagaatactccttcaagatctttccagagaaaaacattcgtggcttcaagctcccagacacacctcaaggcctcctgggggaggcccggatgctcaatgccagcattgtggcatccttcgtggagctaccgctggccagcattgtctcacttcatgcctccagctgcggtggtaggctgcagacctcacccgcaccgatccagaccactcctcccaaggacacttgtagcccggagctgctcatgtccttgatccagacaaagtgtgccgacgacgccatgaccctggtactaaagaaagagcttgttgcgcatttgaagtgcaccatcacgggcctgaccttctgggaccccagctgtgaggcagaggacaggggtgacaagtttgtcttgcgcagtgcttactccagctgtggcatgcaggtgtcagcaagtatgatcagcaatgaggcggtggtcaatatcctgtcgagctcatcaccacagcggaaaaaggtgcactgcctcaacatggacagcctctctttccagctgggcctctacctcagcccacacttcctccaggcctccaacaccatcgagccggggcagcagagctttgtgcaggtcagagtgtccccatccgtctccgagttcctgctccagttagacagctgccacctggacttggggcctgagggaggcaccgtggaactcatccagggccgggcggccaagggcaactgtgtgagcctgctgtccccaagccccgagggtgacccgcgcttcagcttcctcctccacttctacacagtacccatacccaaaaccggcaccctcagctgcacggtagccctgcgtcccaagaccgggtctcaagaccaggaagtccataggactgtcttcatgcgcttgaacatcatcagccctgacctgtctggttgcacaagcaaaggcctcgtcctgcccgccgtgctgggcatcacctttggtgccttcctcatcggggccctgctcactgctgcactctggtacatctactcgcacacgcgttcccccagcaagcgggagcccgtggtggcggtggctgccccggcctcctcggagagcagcagcaccaaccacagcatcgggagcacccagagcaccccctgctccaccagcagcatggcatagccccggccccccgcgctcgcccagcaggagagactgagcagccgccagctgggagcactggtgtgaactcaccctgggagccagtcctccactcgacccagaatggagcctgctctccgcgcctacccttcccgcctccctctcagaggcctgctgccagtgcagccactggcttggaacaccttggggtccctccaccccacagaaccttcaacccagtgggtctgggatatggctgcccaggagacagaccacttgccacgctgttgtaaaaacccaagtccctgtcatttgaacctggatccagcactggtgaactgagctgggcaggaagggagaacttgaaacagattcaggccagcccagccaggccaacagcacctccccgctgggaagagaagagggcccagcccagagccacctggatctatccctgcggcctccacacctgaacttgcctaactaactggcaggggagacaggagcctagcggagcccagcctgggagcccagagggtggcaagaacagtgggcgttgggagcctagctcctgccacatggagccccctctgccggtcgggcagccagcagagggggagtagccaagctgcttgtcctgggcctgcccctgtgtattcaccaccaataaatcagaccatgaaaccagtg

SEQ ID NO: 129693 - DNA, 4037 bp, Homo sapiens
  Payload ID: 5368
  Gene Symbol: EMCN
  Gene Name: endomucin
  Uniprot ID: Q9ULC0
  ENST ID: ENST00000296420
  CDS Start-End: 180-965
gggagtgtgtgtatttcctcccgttctttatcagagcccccaaaataagtaggaatgggcagtggctattcacattcactacaccttttccatttgctaataaggccctgccaggctgggagggaattgtccctgcctgcttctggagaaagaagatattgacaccatctacgggcaccatggaactgcttcaagtgaccattctttttcttctgcccagtatttgcagcagtaacagcacaggtgttttagaggcagctaataattcacttgttgttactacaacaaaaccatctataacaacaccaaacacagaatcattacagaaaaatgttgtcacaccaacaactggaacaactcctaaaggaacaatcaccaatgaattacttaaaatgtctctgatgtcaacagctacttttttaacaagtaaagatgaaggattgaaagccacaaccactgatgtcaggaagaatgactccatcatttcaaacgtaacagtaacaagtgttacacttccaaatgctgtttcaacattacaaagttccaaacccaagactgaaactcagagttcaattaaaacaacagaaataccaggtagtgttctacaaccagatgcatcaccttctaaaactggtacattaacctcaataccagttacaattccagaaaacacctcacagtctcaagtaataggcactgagggtggaaaaaatgcaagcacttcagcaaccagccggtcttattccagtattattttgccggtggttattgctttgattgtaataacactttcagtatttgttctggtgggtttgtaccgaatgtgctggaaggcagatccgggcacaccagaaaatggaaatgatcaacctcagtctgataaagagagcgtgaagcttcttaccgttaagacaatttctcatgagtctggtgagcactctgcacaaggaaaaaccaagaactgacagcttgaggaattctctccacacctaggcaataattacgcttaatcttcagcttctatgcaccaagcgtggaaaaggagaaagtcctgcagaatcaatcccgacttccatacctgctgctggactgtaccagacgtctgtcccagtaaagtgatgtccagctgacatgcaataatttgatggaatcaaaaagaaccccggggctctcctgttctctcacatttaaaaattccattactccatttacaggagcgttcctaggaaaaggaattttaggaggagaatttgtgagcagtgaatctgacagcccaggaggtgggctcgctgataggcatgactttccttaatgtttaaagttttccgggccaagaatttttatccatgaagactttcctacttttctcagtgttcttatattacctactgttagtatttattgtttaccactatgttaatgcagggaaaagttgcacgtgtattattaaatattaggtagaaatcataccatgctactttgtacatataagtattttattcctgctttcgtgttacttttaataaataactactgtactcaatactctaaaaatactataacatgactgtgaaaatggcaatgttattgtcttcctataattatgaatatttttggatggattattagaatacatgaactcactaatgaaaggcatttgtaataagtcagaaagggacatacgattcacatatcagactgttagggggagagtaatttatcagttctttggtctttctatttgtcattcatactatgtgatgaagatgtaagtgcaagggcatttataacactatactgcattcattaagataataggatcatgatttttcattaactcatttgattgatattatctccatgcattttttatttcttttagaaatgtaattatttgctctagcaatcattgctaacctctagtttgtagaaaatcaacactttataaatacataattatgatattatttttcattgtatcactgttctaaaaataccatatgattatagctgccactccatcaggagcaaattcttctgttaaaagctaactgatcaaccttgaccacttttttgacatgtgagatcaaagtgtcaagttggctgaggttttttggaaagctttagaactaataagctgctggtggcagctttgtaacgtatgattatctaagctgattttgatgctaaattatcttagtgatctaaggggcagtttagtgaagatggaatcttgtatttaaaatagccttttaaaatttgttttgtggtgatgtattttgacaacttccatctttaggagttatataatcaccttgattttagtttcctgatgtttggactatttataatcaaggacaccaagcaagcataagcatatctatatttctgactggtgtctctttgagaaggatgggaagtagaaaaaaaaaaaagaaagaaaggaaaggaagagaggagagaagaaggcagggatctccactatgtatgttttcactttagaactgttgagcccatgcttaattttaatctagaagtctttaaatggtgagacagtgactggagcatgccaatcagagagcatttgtcttcagaaaaaaaaaaaatctgagtttgagactagcctggccaacatgttgaaaccccatatctactaaaaatacaaaaattagcctggtgtggtggcgcacgcctgtagtcccagctactctggagcctgaggaacgtgaatcgcttgaacccagaagacagaggttgcagtgagctgagatggcactattgcactccagcctgggtgacacagcaagactctgtctcaaaaaaaaaaaaaaaaaaaaggaaaaaaaagaaagaaagaaagtcccagcacacctagataatttaccgagctcttcagcaaaaaccatgttacatacagcatattccaaagaaatgaactcttctgcaatttaaattataagtaatatgttattttggatcctagagaaaccattttctctacatttcatgagcatggttagaaaagagtttacaagaattaggaagagggaacaattttaatggtcagaaaagaataaaatttattctagttcaagaagtgcacacaaagaatatgcattaatctaacaactatgagattaaatctttcaaaaaggtcaaaggaggattgagaagtttacagagatgtccacggcattttatatcaatctcaaaggtaaggtctgcatttttataaaccaacttaaacttctgttgagataggatattttgttttcaagccaaaattaccattaatcaaatatgttttaattatctgatttagatgatctactttttatgcctggcttactgtaagttttttattctgatacacagttcaaacatcattgcaacaaagaagtgcctgtatttagatcaaaggcaagactttctatgtgtttgttttgcataataatatgaatataatttaagtctatcaatagtcaaaacataaacaaaagctaattaactggcactgttgtcacctgagactaagtggatgttgttggctgacatacaggctcagccagcagagaaagaattctgaattccccttgctgaactgaactattctgttacatatggttgacaaatctgtgtgttatttcttttctacctaccatatttaaatttatgagtatcaaccgaggacatagtcaaaccttcgatgatgaacattcctgattttttgcctgattattctctgttgagctctacttgtggtcattcaagattttatgatgttgaaaggaaaagtgaatatgacctttaaaaattgtattttgggtgatgatagtctcaccactataaaactgtcaattattgcctaatgttaaagatatccatcattgtgattaattaaacctataatgagtattcttaatggagaattcttaatggatggattatcccctgatcttttctttaaaatttctctgcacacacaggacttctcattttccaataaatgggtgtactctgccccaatttctagggaa

SEQ ID NO: 129694 - DNA, 1575 bp, Homo sapiens
  Payload ID: 5368
  Gene Symbol: EMCN
  Gene Name: endomucin
  Uniprot ID: Q9ULC0
  ENST ID: ENST00000305864
  CDS Start-End: 90-626
catttgctaataaggccctgccaggctgggagggaattgtccctgcctgcttctggagaaagaagatattgacaccatctacgggcaccatggaactgcttcaagtgaccattctttttcttctgcccagtatttgcagcagtaacagcacaggtgttttagaggcagctaataattcacttgttgttactacaacaaaaccatctataacaacaccaaacacagaatcattacagaaaaatgttgtcacaccaacaactggaacaactcctaaaggaacaatcaccaatgaattacttaaaatgtctctgatgtcaacagctacttttttaacaagtaaagatgaaggattgaaagccacaaccactgatgtcaggaagaatgactccatcatttcaaacgtaacagtaacaagtgttacacttccaaatgctgtttcaacattacaaagttccaaacccaagactgaaactcagagttcaattaaaacaacagaaataccaggcacaccagaaaatggaaatgatcaacctcagtctgataaagagagcgtgaagcttcttaccgttaagacaatttctcatgagtctggtgagcactctgcacaaggaaaaaccaagaactgacagcttgaggaattctctccacacctaggcaataattacgcttaatcttcagcttctatgcaccaagcgtggaaaaggagaaagtcctgcagaatcaatcccgacttccatacctgctgctggactgtaccagacgtctgtcccagtaaagtgatgtccagctgacatgcaataatttgatggaatcaaaaagaaccccggggctctcctgttctctcacatttaaaaattccattactccatttacaggagcgttcctaggaaaaggaattttaggaggagaatttgtgagcagtgaatctgacagcccaggaggtgggctcgctgataggcatgactttccttaatgtttaaagttttccgggccaagaatttttatccatgaagactttcctacttttctcagtgttcttatattacctactgttagtatttattgtttaccactatgttaatgcagggaaaagttgcacgtgtattattaaatattaggtagaaatcataccatgctactttgtacatataagtattttattcctgctttcgtgttacttttaataaataactactgtactcaatactctaaaaatactataacatgactgtgaaaatggcaatgttattgtcttcctataattatgaatatttttggatggattattagaatacatgaactcactaatgaaaggcatttgtaataagtcagaaagggacatacgattcacatatcagactgttagggggagagtaatttatcagttctttggtctttctatttgtcattcatactatgtgatgaagatgtaagtgcaagggcatttataacactatactgcattcattaagataataggatcatgatttttcattaactcatttgattgatattatctccatgcattttttatttcttttagaaatgtaattatttgctctagcaatcattgct

SEQ ID NO: 129695 - DNA, 1377 bp, Homo sapiens
  Payload ID: 5368
  Gene Symbol: EMCN
  Gene Name: endomucin
  Uniprot ID: Q9ULC0
  ENST ID: ENST00000511970
  CDS Start-End: 88-834
tttgctaataaggccctgccaggctgggagggaattgtccctgcctgcttctggagaaagaagatattgacaccatctacgggcaccatggaactgcttcaagtgaccattctttttcttctgcccagtatttgcagcagtaacagcacaggtgttttagaggcagctaataattcacttgttgttactacaacaaaaccatctataacaacaccaaacacagaatcattacagaaaaatgttgtcacaccaacaactggaacaactcctaaaggaacaatcaccaatgaattacttaaaatgtctctgatgtcaacagctacttttttaacaagtaaagatgaaggattgaaagccacaaccactgatgtcaggaagaatgactccatcatttcaaacgtaacagtaacaagtgttacacttccaaatgctgtttcaacattacaaagttccaaacccaagagtagtgttctacaaccagatgcatcaccttctaaaactggtacattaacctcaataccagttacaattccagaaaacacctcacagtctcaagtaataggcactgagggtggaaaaaatgcaagcacttcagcaaccagccggtcttattccagtattattttgccggtggttattgctttgattgtaataacactttcagtatttgttctggtgggtttgtaccgaatgtgctggaaggcagatccgggcacaccagaaaatggaaatgatcaacctcagtctgataaagagagcgtgaagcttcttaccgttaagacaatttctcatgagtctggtgagcactctgcacaaggaaaaaccaagaactgacagcttgaggaattctctccacacctaggcaataattacgcttaatcttcagcttctatgcaccaagcgtggaaaaggagaaagtcctgcagaatcaatcccgacttccatacctgctgctggactgtaccagacgtctgtcccagtaaagtgatgtccagctgacatgcaataatttgatggaatcaaaaagaaccccggggctctcctgttctctcacatttaaaaattccattactccatttacaggagcgttcctaggaaaaggaattttaggaggagaatttgtgagcagtgaatctgacagcccaggaggtgggctcgctgataggcatgactttccttaatgtttaaagttttccgggccaagaatttttatccatgaagactttcctacttttctcagtgttcttatattacctactgttagtatttattgtttaccactatgttaatgcagggaaaagttgcacgtgtattattaaatattaggtagaaatcataccatgctactttgtacatataagtattttattcctgctt

SEQ ID NO: 129696 - DNA, 850 bp, Homo sapiens
  Payload ID: 5368
  Gene Symbol: EMCN
  Gene Name: endomucin
  ENST ID: ENST00000506300
  CDS Start-End: 1-231
ctgatgtcaacagctacttttttaacaagtaaagatgaaggattgaaagccacaaccactgatgtcaggaagaatgactccatcatttcaaacgtaacagtaacaagtgttacacttccaaatgctgtttcaacattacaaagttccaaacccaagactgaaactcagagttcaattaaaacaacagaaataccaggtgagcactctgcacaaggaaaaaccaagaactgacagcttgaggaattctctccacacctaggcaataattacgcttaatcttcagcttctatgcaccaagcgtggaaaaggagaaagtcctgcagaatcaatcccgacttccatacctgctgctggactgtaccagacgtctgtcccagtaaagtgatgtccagctgacatgcaataatttgatggaatcaaaaagaaccccggggctctcctgttctctcacatttaaaaattccattactccatttacaggagcgttcctaggaaaaggaattttaggaggagaatttgtgagcagtgaatctgacagcccaggaggtgggctcgctgataggcatgactttccttaatgtttaaagttttccgggccaagaatttttatccatgaagactttcctacttttctcagtgttcttatattacctactgttagtatttattgtttaccactatgttaatgcagggaaaagttgcacgtgtattattaaatattaggtagaaatcataccatgctactttgtacatataagtattttattcctgctttcgtgttacttttaataaataactactgtactcaatactctaaaaatactataacatgactgtgaaaatggcaatg

SEQ ID NO: 129697 - DNA, 583 bp, Homo sapiens
  Payload ID: 5368
  Gene Symbol: EMCN
  Gene Name: endomucin
  ENST ID: ENST00000502569
  CDS Start-End: 89-583
atttgctaataaggccctgccaggctgggagggaattgtccctgcctgcttctggagaaagaagatattgacaccatctacgggcaccatggaactgcttcaagtgaccattctttttcttctgcccagtatttgcagcagtaacagcacaggtgttttagaggcagctaataattcacttgttgttactacaacaaaaccatctataacaacaccaaacacagaatcattacagaaaaatgttgtcacaccaacaactggaacaactcctaaaggaacaatcaccaatgaattacttaaaatgtctctgatgtcaacagctacttttttaacaagtaaagatgaaggattgaaagccacaaccactgatgtcaggaagaatgactccatcatttcaaacgtaacagtaacaagtgttacacttccaaatgctgtttcaacattacaaagttccaaacccaagactgaaactcagagttcaattaaaacaacagaaataccaggtattattttgccggtggttattgctttgattgtaataacactttcagtatttgttctggtgggtttgtaccgaatgtgc

SEQ ID NO: 129698 - DNA, 4687 bp, Homo sapiens
  Payload ID: 5369
  Gene Symbol: ENDOD1
  Gene Name: endonuclease domain containing 1
  Uniprot ID: O94919
  ENST ID: ENST00000278505
  CDS Start-End: 119-1621
aggttgcgacttcccttccctaccctgctcggctgcgtagtgcgctccccgcccagcctgcagagctcgcgccgcggcagcccagccgctcggccccgccgcgctcgcagaggccgccatgggcaccgcgcgctggctcgcgctgggcagcctcttcgccctggctgggctgctggaaggccggctcgtgggcgaggaggaagccggctttggcgaatgtgacaagttcttctacgccgggaccccgcctgcggggctggcggccgattcccacgtgaagatctgtcagcgcgcggagggtgctgagcgcttcgccaccctctacagcacccgggaccgcatccccgtgtactccgcgttccgcgccccgcgccctgcgcccggcggcgccgagcagcgatggctggtggagccgcagatcgatgaccccaacagcaaccttgaggaggcgattaatgaggcagaggccatcacctctgtgaacagcctgggaagcaagcaagccttgaatacagattaccttgattctgattaccaaagaggacagctttacccattctcccttagcagtgatgtccaggtggccacatttactctcacaaattcagccccaatgactcagtccttccaggaacggtggtatgtgaatctccacagcctaatggaccgggctttgaccccacagtgtggcagtggggaagacctatatatcctcacaggcacagtgccctcagactacagagttaaagacaaagtggcagtccctgagtttgtttggctggcagcctgttgtgctgtccctggaggaggctgggccatgggctttgtcaagcacacccgggacagtgacatcatagaagatgtgatggtaaaagatcttcagaaactgcttccatttaaccctcagctgtttcagaacaactgtggtgaaactgagcaagacacagagaaaatgaaaaaaatcctggaagtggttaaccaaatccaggatgaagaacgaatggtacaatctcaaaagagttctagtcccctttctagcaccaggagcaagaggtctactctgttgcctccagaggcatctgagggaagtagtagctttttgggaaaactcatgggcttcattgctaccccattcatcaagctttttcaattaatttattaccttgtggtagcaatcctgaagaacattgtctatttcctgtggtgtgttaccaagcaggtgattaatggcatagaaagttgcctttaccgcctgggctcagccaccatctcatacttcatggccattggggaagagttggtgagcattccctggaaggtgctcaaggtcgtggccaaagtcatcagggctctcctccggatcctttgttgtctgctgaaggccatttgccgagttctgagcatccctgtccgtgtccttgtggatgtggccactttccctgtgtacaccatgggcgctattccaattgtttgcaaggacattgcactgggccttggtggcactgtctcactgctctttgacactgcttttggtaccctgggtggcctatttcaggtggtttttagtgtctgcaagcggattggctacaaggttacttttgacaattctggggagttataaactcaaaaaactaatagtatccagtcacagtgaatttgaaagctggaatagtttgtctttacaatgggtttctgttcactgtcagttatcattatattttggcctttggtggggatgtctgcttgtttttgcaaaagaagatggcagaatttagacttgacagaggagaaatgctcagggtgagattaggtgtagtaatctgctgtttacctccagttatatgtgcaaactcccaagccactaataacttcagttatgcactctaacacagacgaccacctgaaatgcactggtatttatttctgataattaaaaattacaggggagggaagaactagaaaaagaacaactttagaccaaaggtgtctgagaaaaggagaaagggagcttgttcttcccattgctctttgtgatttaaggcaaaacagattaaaaaaaaaatctgcagccaatttcttggcatttgcttctctttctcctcaactcgactgaccttggtggaatgcagataatgcctctttgttgaaataactttgtgggaatgtacaattttctatatctcttagctttccgtggttctcaaggatatgtacagttttcattttcctccaaagttgaattttgctacatttttcttttaggtaatgataagcattttttaaaaaatcatttttaggtaatggtaagcattttatgccaaatgtggcataacagagtttgaattgaagggcaaagttttcttttcttttttttttgggccccttgaatggtataatacagtcctctccggtggaaagaagagaagagaaggtggacagccctgctcttagtaggtgctgcagatccaaggacatcttttgtccagcttggattaacttgacgtgtatccctgcctgacaaggttgaactgaaagatctatatgttaagctaacatgaaaattcatattctgcaacatagtagatttttctaatgcatgaaataagtacccagcacagtaaaaatactctgacttatgtccctaaatggttgttttgatacaactatatagaaaagagccacaaaataaagataaaagttattgtggccatctctgaaaaaaatatataaaatatttaagaataattatatcttaggaaattatttttacagtgtgtttgaggctacaaacataactcccccattaatacaaattaaatgtgagagctcattctcaaaatttttttgatcaagcacttgtcattttaaatcttgcactaaaaaatggtaacaagagggaccaaactttgcttcccacaattgggatggaatcacctggatttttctgaatgttttaaagaattgctgagaggtagaaacagccaagtatgaaatactgatcttggggctaccgcccaggatcaatcagaaagttatatgcaaaaattcggggtcccaacaaggagagaacaatatgtcaaccatttgcatggggtcgatggatgagaaacatgagcgtagcaagagttacattttgcagaaaaatagcggaggcacacccagagtagaacagcagccagcaagctgccatcctgatcaatttgtgatgcaaggttagggagtatgagcaccgcatgggtccatgctagggagatgtgcaccaggcttagctaagaaacttaaagcagtattttaccaactcttgtcttagggagcataaagtttggatgtccctttatttcagcagtgtgaaggtaaatggaagggtgagggtttgacttggtactgattggtcaagaatcctgctggataaagaaaaggaattttagaagtgaccagagggacagtccagccaaactattatttgataaggaacccaaggccctgggaggcaacaggctagcccttagtttcatggctagctgagagcagattaggagccaacgttgtttgcacatgtcccatcacacctgagatgtcagacatgggaagttcgtgctattattcagttgcctctctggaccatggcaagatttcctcattcatcaaacagactccaggccctgacaaagcagttggatttggcatgtgtgatgaaaacaattagccatccatgtacaacattatgcttactgcatcccatggaaacttaattccctcctagcacatatttgcatactgaaaggtccgaaaagggcatccacggcagcttgagccccttagcaccatgtaaggagcacagcatccaaacggcttcttgagaaccattggggaatgtctttctttttcacatccaattgtttagtgtctatttattcttgggtggccagttttgaaacctaaaaagggacaataaagcaaaaagtatcagtaaggataggtggctgagacccactgccctgagctactagtgtggctgtgcctgtgggtctctagaaccatctgcattggacgtgaagccacagcaggtggctggactgctggcctgttcctaatgagctacgctgggctttgaggtagaggttggggtttatgaaccccaactctggcttaaagatcttgctgtggctctgttatgttctgaggccttgggattagcctcttcctcattatggagctgattttctagtctgtggatcagctatgcctttggacacttctcttttccattgtgccttttgaatgttgtcttctcactcagcatcagcacttcgatctaaatgcagactaggtagttgggaggaggaaccaaagtgaaccatccttcatttattcagtcattcgttcatctgtcaaacacgtatttggacatcaaggttgcagagatgaacaatgcatggatttcatctttgaggagttcaaaacctagtggagagaacacatggtacaatcgtaacacatgaaggacaagtaagtgctgcagtaaaggtactaataacatgttccttggaacagaggaagaaaaaccacgaaaccatggaaattagggaagcctttacagagggtgtgacaaaactcaatttgacattttcaagctatgtacaatgatgtgcaccttgcagatgctcaataaagtaattactgacaa

SEQ ID NO: 129699 - DNA, 1172 bp, Homo sapiens
  Payload ID: 5370
  Gene Symbol: ENDOG
  Gene Name: endonuclease G
  Uniprot ID: Q14249
  ENST ID: ENST00000372642
  CDS Start-End: 212-1105
aaatgcgcaaagaaaggacgccggggacacccggttgggctctgctgctcccttctgggttccgaggcccaagcccttggcagtgtttgtgagtggaagggaggtcacgctatcgtccgcggccccagcagccctgtgccctcgttggatcccgcgacgcggctcctttaagagcctcgcgggtcgcccgccgctaggtcgctccccggccatgcgggcgctgcgggccggcctgaccctggcgtcgggcgcggggctgggtgcggtcgtcgagggctggcggcggcggcgggaggacgcgcgggcggcgccgggactgctgggccggctgcccgtgctgcccgtggcggcggcagccgagttgccccctgtgcccgggggaccccgcggcccgggcgagctggccaagtacgggctgccggggctggcgcagctcaagagccgcgagtcgtacgtgctgtgctacgacccgcgcacccgcggcgcgctctgggtggtggagcagctgcgacccgagcgtctccgcggcgacggcgaccggcgcgagtgcgacttccgcgaggacgactcggtgcacgcgtaccaccgtgccaccaacgccgactaccgcggcagtggcttcgaccgcggtcacctggccgccgccgccaaccaccgctggagccagaaggccatggacgacacgttctacctgagcaacgtcgcgccccaggtgccccacctcaaccagaatgcctggaacaacctggagaaatatagccgcagcttgacccgcagctaccaaaacgtctatgtctgcacagggccactcttcctgcccaggacagaggctgatgggaaatcctacgtaaagtaccaggtcatcggcaagaaccacgtggcagtgcccacacacttcttcaaggtgctgatcctggaggcagcaggtgggcaaattgagctccgcacctacgtgatgcccaacgcacctgtggatgaggccatcccactggagcgcttcctggtgcccatcgagagcattgagcgggcttcggggctgctctttgtgccaaacatcctggcgcgggcaggcagcctcaaggccatcacggcgggcagtaagtgagggtggagcccagtgagactgtgggtgtgtgcaggccggggagtattaaaggtggtgatttttggag

SEQ ID NO: 129700 - DNA, 1226 bp, Homo sapiens
  Payload ID: 5371
  Gene Symbol: ENDOV
  Gene Name: endonuclease V
  Uniprot ID: Q8N8Q3
  ENST ID: ENST00000323854
  CDS Start-End: 12-806
gggacgaagccatggccctggaggcggcgggagggccgccggaggaaacgctgtcactgtggaaacgggagcaagctcggctgaaggcccacgtcgtagaccgggacaccgaggcgtggcagcgagaccccgccttctcgggtctgcagagggtcgggggcgttgacgtgtccttcgtgaaaggggacagtgtccgcgcttgtgcttccctggtggtgctcagcttccctgagctcgaggtccttcttgtggatggaaacggggtactccaccaccgaggctttggggtggcctgccaccttggcgtccttacagacctgccgtgtgttggggtggccaagaaacttctgcaggtggatgggctggagaacaacgccctgcacaaggagaagatccgactcctgcagactcgaggagactcattccctctgctgggagactctgggactgtcctgggaatggccctgaggagccacgaccgcagcaccaggcccctctacatctccgtgggccacaggatgagcctggaggccgctgtgcgcctgacttgctgctgctgcaggttccggatcccagagcccgtgcgccaggctgacatctgctcccgagagcacatccgcaagtcgctgggactccccgggccacccacaccgaggagcccgaaggcgcagaggccagtggcatgccccaaaggagactccggagagtcctcaggtgagggccagcccccacaggaccacagcccaggccccaggacagccccaaggccaggctcccaggagcaggcgggcaaggactggcagtagggtggaactgggcaccatgaagacaagaaggccaccggccaccccgttctggcctcaggacactgaccacccctgggggtggtctagggacttaggggaacctcatctcagccgcaggtggagcacccagtccccaaagacaggctgaccgcaccaccccagggggacgccgcagcacagcccagcaccaggtggggcagaggtgaccacggcccctctttgctccgtcatcggctggtcagctgtggtcacggtgcctcagaggacagatctctatgggggcaagtgccagatcctgagagcgcatgagacgctttcccggagccgacgaaggggactcggagctgcagcctgcacgacccctgcagcctgtgctttgcccacccctttcaatagatggaacttgcttgctctttttta

SEQ ID NO: 129701 - DNA, 864 bp, Homo sapiens
  Payload ID: 5371
  Gene Symbol: ENDOV
  Gene Name: endonuclease V
  ENST ID: ENST00000523999
  CDS Start-End: 18-335
gtgcccgggacgaagccatggccctggaggcggcgggagggccgccggaggaaacgctgtcactgtggaaacgggagcaagctcggctgaaggcccacgtcgtagaccgggacaccgaggcgtggcagcgagaccccgccttctcgggtctgcagagggtcgggggcgttgacgtgtccttcgtgaaaggggacagtgtccgcgcttgtgcttccctggtggtgctcagcttccctgagctcgagttctgccttcaggtagcaaaacagaacggatcttccctgccttctgcttgtcagcccttctgctgctggaaacagctgcctgctccttgaccacactgtcccaagaggctgcgatgacgtccagcttcttcactggttcagctgttgctgctctggaatattctctctcgcgcacatgcgctctttgtgtgcgtgtgtaccgtacatcccagcgactgtgacagctcagaagacatcagcaggcctgtcctgagaatgacattctcctccacagccacagtgtcattatcatactgattacacatcatagtcatcccataatgtcacctgaatgataacattatgggagagattcagatgtaagcagccacgcccctcctgtgggaactcaggccacacttgaattccacatgtcactgtgcaaagtgacttttactctgtggggatgtcagtgatccagcctgctggcttctctgtgaacccaaattctgttatcagaatggaccctccccactttgggtcatgggcagatttgatcagtttccccattgagtcattgatgaagatgttgtgagaatgatccccaaccctctgtgctaatacagagcactccgtctgc

SEQ ID NO: 129702 - DNA, 908 bp, Homo sapiens
  Payload ID: 5371
  Gene Symbol: ENDOV
  Gene Name: endonuclease V
  ENST ID: ENST00000517295
  CDS Start-End: 175-885
gcccacgtcgtagaccgggacaccgaggcgtggcagcgagaccccgccttctcgggtctgcagagggtcgggggcgttgacgtgtccttcgtgaaaggggacagtgtccgcgcttgtgcttccctggtggtgctcagcttccctgagctcgaggtggtgtatgaggagagccgcatggtcagcctcacagccccctacgtgtcgggcttcctggccttccgagaggtgcccttcttgctggagctggtgcagcagctgcgggagaaggagccgggcctcatgccccaggtccttcttgtggatggaaacggggtactccaccaccgaggctttggggtggcctgccaccttggcgtccttacagacctgccgtgtgttggggtggccaagaaacttctgcaggtggatgggctggagaacaacgccctgcacaaggagaagatccgactcctgcagactcgaggagactcattccctctgctgggagactctgggactgtcctgggaatgcccacaggacagccctcgccttccttgtcacaggccctgaggagccacgaccgcagcaccaggcccctctacatctccgtgggccacaggatgagcctggaggccgctgtgcgcctgacttgctgctgctgcaggttccggatcccagagcccgtgcgccaggctgacatctgctcccgagagcacatccgcaagtcgctgggactccccgggccacccacaccgaggagcccgaaggcgcagaggccagtggcatgccccaaaggagactccggagagtcctcaggtggagcacccagtccccaaagacaggctgaccgcaccaccccagggggacgccgcagcacagcccagcaccaggtggggcagaggtgaccacggcccctctttgctccgtc

SEQ ID NO: 129703 - DNA, 617 bp, Homo sapiens
  Payload ID: 5371
  Gene Symbol: ENDOV
  Gene Name: endonuclease V
  ENST ID: ENST00000519117
  CDS Start-End: 18-311
gtgcccgggacgaagccatggccctggaggcggcgggagggccgccggaggaaacgctgtcactgtggaaacgggagcaagctcggctgaaggcccacgtcgtagaccgggacaccgaggcgtggcagcgagaccccgccttctcgggtctgcagagggtcgggggcgttgacgtgtccttcgtgaaaggggacagtgtccgcgcttgtgcttccctggtggtgctcagcttccctgagctcgagggatggccctgtcctgagggccgaggggcagctcagctgactgtgactctccctgtggctccataggtccttcttgtggatggaaacggggtactccaccaccgaggctttggggtggcctgccaccttggcgtccttacagacctgccgtgtgttggggtggccaagaaacttctgcaggtggatgggctggagaacaacgccctgcacaaggagaagatccgactcctgcagactcgaggagactcattccctctgctgggagactctgggactgtcctgggaatggccctgaggagccacgaccgcagcaccaggcccctctacatctccgtgggccacaggatgagcctggaggccgctgtgcgcctg

SEQ ID NO: 129704 - DNA, 2815 bp, Homo sapiens
  Payload ID: 5371
  Gene Symbol: ENDOV
  Gene Name: endonuclease V
  Uniprot ID: Q8N8Q3
  ENST ID: ENST00000518137
  CDS Start-End: 29-877
gtgcggaaggggtgcccgggacgaagccatggccctggaggcggcgggagggccgccggaggaaacgctgtcactgtggaaacgggagcaagctcggctgaaggcccacgtcgtagaccgggacaccgaggcgtggcagcgagaccccgccttctcgggtctgcagagggtcgggggcgttgacgtgtccttcgtgaaaggggacagtgtccgcgcttgtgcttccctggtggtgctcagcttccctgagctcgaggtggtgtatgaggagagccgcatggtcagcctcacagccccctacgtgtcgggcttcctggccttccgagaggtgcccttcttgctggagctggtgcagcagctgcgggagaaggagccgggcctcatgccccaggtccttcttgtggatggaaacggggtactccaccaccgaggctttggggtggcctgccaccttggcgtccttacagacctgccgtgtgttggggtggccaagaaacttctgcaggtggatgggctggagaacaacgccctgcacaaggagaagatccgactcctgcagactcgaggagactcattccctctgctgggagactctgggactgtcctgggaatggccctgaggagccacgaccgcagcaccaggcccctctacatctccgtgggccacaggatgagcctggaggccgctgtgcgcctgacttgctgctgctgcaggttccggatcccagagcccgtgcgccaggctgacatctgctcccgagagcacatccgcaagtcgctgggactccccgggccacccacaccgaggagcccgaaggcgcagaggccagtggcatgccccaaaggagactccggagagtcctcagcactttgttgaacgtggtggtgagagcacacgtcctcgtctcattcctgatcgaacgcggtggtgagagcacacgtcctcgtctcgttcctgatcgaacgcggtggtgagagcacacatcctcgtctcgttcctgatcgaacgcggtggtgagagcacacgtcctcgtctcgttcctgatcgaacgtggtggtgagagcacacgtccttgtcttgttcctgatcttaagggaacgtttgcagtctttcaccactagatgtgatgtgagctgttagattttcaaggatgctcttcatccagctgaagacggtcccttctagtcctaatttgttaagtgtttttatccttaaagggtactggattttgtcaaatgcttttctggcctctattgaaaagatcctgtgttcttctgtgaatatgaggtgttacattgattgattttcatatgttgagccagtttccatttgtggaatacatctaactcggtcatggtgtataatccatttactctgctgctgaatgtgatttgcttgtattttggtgcggatttttacatctgtatttataagggatattggtctggtgttttcttatgatgtcttcctttggttttgatatcaggataatattagcctcatagattgggttaggaaatgttctctcctccgttttttttggaagagagagattggtgttaattcttgctagaacctttggtagaatttgccagtaagcctatctggtcttgggtctttgggaggattttgattcgattcaatctatgtatttgttatagatcgttcggattgtccatccttgagtcagttgctagcttgtgtgtttcttggagtttttccgtttcgtccatgttatctcatctgttggcataccgtcgttcacgggattttattgatgtgtgtgaggtctctgagaacgtccctgccttcactcctgcttttagtcactggcatcttcttttaacttgggccatctggccgtgcatggttttgggagagtcctccttgactctgcagatgctgagcagtgatctggctgggaaaggggaccaggagtgcagggcacctgctgaggactcacctaagcccaagagtcagagagtcggagctccaaccacatctgcctgcatgcctttcccaggctctccccaggcggacagccagcaccccctccccaaagaccgggcagttcctgaccagcaccccaccaagtcctcagtaaggcctgtctttgggggagcagggtttcaggaggacagtgggggtggtgtagaactcatggctggcggttccgggcctctcaggaagctttgccactgggcttggggttaagtgggtgtggggctccgaaccctaaatgggtgagagttgaaatgaaagcggcacctgtagtccgtttggggtgcaggtgtgtgccaggggtcttcagccccggctgatggccacatgaaccacatgaggagaggcagggcgtgtcagcagcaaacctaagtgtgtgctcatttctgtgggcccttactctgtgacactgcagctctccagagagacgctttgaaaacaaaacaggaaagaacacacggccccgcgtctgttgcctgagtcactgtattccttaaaaggtgaaggaccctggtccttggcttttcgtgcacatgagaaaatgttggccaaggttagcgattatgcttctgtaatctgtaaccagaagtgctcttatgcccaaaccttgatgtgattctgctgtaatgtaacttcggagccagctggatggatgtgactgtgcaggtcctgagccccggcccccgtaaccaagcagtgggccgagacactgagccgggcagtcaaacaggagctctctaaggctgctcccgggctgggacctgggtctaggattctcagtaagacctttgaataaaactaacttgaattctt

SEQ ID NO: 129705 - DNA, 702 bp, Homo sapiens
  Payload ID: 5371
  Gene Symbol: ENDOV
  Gene Name: endonuclease V
  ENST ID: ENST00000522577
  CDS Start-End: 29-445
gtgcggaaggggtgcccgggacgaagccatggccctggaggcggcgggagggccgccggaggaaacgctgtcactgtggaaacgggagcaagctcggctgaaggcccacgtcgtagaccgggacaccgaggcgtggcagcgagaccccgccttctcgggtctgcagagggtcgggggcgttgacgtgtccttcgtgaaaggggacagtgtccgcgcttgtgcttccctggtggtgctcagcttccctgagctcgaggctttggggtggcctgccaccttggcgtccttacagacctgccgtgtgttggggtggccaagaaacttctgcaggtggatgggctggagaacaacgccctgcacaaggagaagatccgactcctgcagactcgaggagactcattccctctgctgggagactctgggactgtcctgggaatggccctgaggagccacgaccgcagcaccaggcccctctacatctccgtgggccacaggatgagcctggaggccgctgtgcgcctgacttgctgctgctgcaggttccggatcccagagcccgtgcgccaggctgacatctgctcccgagagcacatccgcaagtcgctgggactccccgggccacccacaccgaggagcccgaaggcgcagaggccagtggcatgccccaaaggagactccggagagtcctcaggtgagggccag

SEQ ID NO: 129706 - DNA, 545 bp, Homo sapiens
  Payload ID: 5371
  Gene Symbol: ENDOV
  Gene Name: endonuclease V
  ENST ID: ENST00000523228
  CDS Start-End: 395-545
agtttgtctggcctgcgcttgcgcgggtctccgccgcctgggctcctagggactgtggcctcggcgggagcaagctcggctgaaggcccacgtcgtagaccgggacaccgaggcgtggcagcgagaccccgccttctcgggtctgcagagggtcgggggcgttgacgtgtccttcgtgaaaggggacagtgtccgcgcttgtgcttccctggtggtgctcagcttccctgagctcgagttctgccttcaggtagcaaaacagaacggatcttccctgccttctgcttgtcagcccttctgctgctggaaacagctgcctgctccttgaccacactgtcccaagaggctgcgatgacgtccagcttcttcactggtggtgtatgaggagagccgcatggtcagcctcacagccccctacgtgtcgggcttcctggccttccgagaggtgcccttcttgctggagctggtgcagcagctgcgggagaaggagccgggcctcatgccccaggtccttcttgtggatggaaacggggtactccaccacc

SEQ ID NO: 129707 - DNA, 508 bp, Homo sapiens
  Payload ID: 5371
  Gene Symbol: ENDOV
  Gene Name: endonuclease V
  ENST ID: ENST00000520484
  CDS Start-End: 31-402
acgtgcggaaggggtgcccgggacgaagccatggccctggaggcggcgggagggccgccggaggaaacgctgtcactgtggaaacggctttggggtggcctgccaccttggcgtccttacagacctgccgtgtgttggggtggccaagaaacttctgcaggtggatgggctggagaacaacgccctgcacaaggagaagatccgactcctgcagactcgaggagactcattccctctgctgggagactctgggactgtcctgggaatggccctgaggagccacgaccgcagcaccaggcccctctacatctccgtgggccacaggatgagcctggaggccgctgtgcgcctgacttgctgctgctgcaggttccggatcccagagcccgtgcgccaggctgacatctgctcccgagagcacatccgcaagtcgctgggactccccgggccacccacaccgaggagcccgaaggcgcagaggccagtggcatgccccaaaggagactcc

SEQ ID NO: 129708 - DNA, 607 bp, Homo sapiens
  Payload ID: 5371
  Gene Symbol: ENDOV
  Gene Name: endonuclease V
  ENST ID: ENST00000521634
  CDS Start-End: 1-395
gctttggggtggcctgccaccttggcgtccttacagacctgccgtgtgttggggtggccaagaaacttctgcaggtggatgggctggagaacaacgccctgcacaaggagaagatccgactcctgcagactcgaggagactcattccctctgctgggagactctgggactgtcctgggaatggctgacatctgctcccgagagcacatccgcaagtcgctgggactccccgggccacccacaccgaggagcccgaaggcgcagaggccagtggcatgccccaaaggagactccggagagtcctcaggtggagcacccagtccccaaagacaggctgaccgcaccaccccagggggacgccgcagcacagcccagcaccaggtggggcagaggtgaccacggcccctctttgctccgtcatcggctggtcagctgtggtcacggtgcctcagaggacagatctctatgggggcaagtgccagatcctgagagcgcatgagacgctttcccggagccgacgaaggggactcggagctgcagcctgcacgacccctgcagcctgtgctttgcccacccctttcaatagatggaacttgcttgctcttttt

SEQ ID NO: 129709 - DNA, 727 bp, Homo sapiens
  Payload ID: 5371
  Gene Symbol: ENDOV
  Gene Name: endonuclease V
  ENST ID: ENST00000519331
  CDS Start-End: 1-513
cacgaccgcagcaccaggcccctctacatctccgtgggccacaggatgagcctggaggccgctgtgcgcctgacttgctgctgctgcaggttccggatcccagagcccgtgcgccaggttcacctcctgctctgttccagaaggtcctgggagagcacagacggggttagtgttggtctgctctctccctggctccgcgccgggccgtcttggtggccccatggtcacaggcgctgcggcgctcctggttgccaggtccaggctctcctgccaggccaggctgggccgctccaggggaaggctgacatctgctcccgagagcacatccgcaagtcgctgggactccccgggccacccacaccgaggagcccgaaggcgcagaggccagtggcatgccccaaaggagactccggagagtcctcaggtggagcacccagtccccaaagacaggctgaccgcaccaccccagggggacgccgcagcacagcccagcaccaggtggggcagaggtgaccacggcccctctttgctccgtcatcggctggtcagctgtggtcacggtgcctcagaggacagatctctatgggggcaagtgccagatcctgagagcgcatgagacgctttcccggagccgacgaaggggactcggagctgcagcctgcacgacccctgcagcctgtgctttgcccacccctttcaatagatggaacttgcttgctctttttta

SEQ ID NO: 129710 - DNA, 2680 bp, Homo sapiens
  Payload ID: 5371
  Gene Symbol: ENDOV
  Gene Name: endonuclease V
  Uniprot ID: Q8N8Q3
  ENST ID: ENST00000520367
  CDS Start-End: 29-742
gtgcggaaggggtgcccgggacgaagccatggccctggaggcggcgggagggccgccggaggaaacgctgtcactgtggaaacgggagcaagctcggctgaaggcccacgtcgtagaccgggacaccgaggcgtggcagcgagaccccgccttctcgggtctgcagagggtcgggggcgttgacgtgtccttcgtgaaaggggacagtgtccgcgcttgtgcttccctggtggtgctcagcttccctgagctcgaggtccttcttgtggatggaaacggggtactccaccaccgaggctttggggtggcctgccaccttggcgtccttacagacctgccgtgtgttggggtggccaagaaacttctgcaggtggatgggctggagaacaacgccctgcacaaggagaagatccgactcctgcagactcgaggagactcattccctctgctgggagactctgggactgtcctgggaatggccctgaggagccacgaccgcagcaccaggcccctctacatctccgtgggccacaggatgagcctggaggccgctgtgcgcctgacttgctgctgctgcaggttccggatcccagagcccgtgcgccaggctgacatctgctcccgagagcacatccgcaagtcgctgggactccccgggccacccacaccgaggagcccgaaggcgcagaggccagtggcatgccccaaaggagactccggagagtcctcagcactttgttgaacgtggtggtgagagcacacgtcctcgtctcattcctgatcgaacgcggtggtgagagcacacgtcctcgtctcgttcctgatcgaacgcggtggtgagagcacacatcctcgtctcgttcctgatcgaacgcggtggtgagagcacacgtcctcgtctcgttcctgatcgaacgtggtggtgagagcacacgtccttgtcttgttcctgatcttaagggaacgtttgcagtctttcaccactagatgtgatgtgagctgttagattttcaaggatgctcttcatccagctgaagacggtcccttctagtcctaatttgttaagtgtttttatccttaaagggtactggattttgtcaaatgcttttctggcctctattgaaaagatcctgtgttcttctgtgaatatgaggtgttacattgattgattttcatatgttgagccagtttccatttgtggaatacatctaactcggtcatggtgtataatccatttactctgctgctgaatgtgatttgcttgtattttggtgcggatttttacatctgtatttataagggatattggtctggtgttttcttatgatgtcttcctttggttttgatatcaggataatattagcctcatagattgggttaggaaatgttctctcctccgttttttttggaagagagagattggtgttaattcttgctagaacctttggtagaatttgccagtaagcctatctggtcttgggtctttgggaggattttgattcgattcaatctatgtatttgttatagatcgttcggattgtccatccttgagtcagttgctagcttgtgtgtttcttggagtttttccgtttcgtccatgttatctcatctgttggcataccgtcgttcacgggattttattgatgtgtgtgaggtctctgagaacgtccctgccttcactcctgcttttagtcactggcatcttcttttaacttgggccatctggccgtgcatggttttgggagagtcctccttgactctgcagatgctgagcagtgatctggctgggaaaggggaccaggagtgcagggcacctgctgaggactcacctaagcccaagagtcagagagtcggagctccaaccacatctgcctgcatgcctttcccaggctctccccaggcggacagccagcaccccctccccaaagaccgggcagttcctgaccagcaccccaccaagtcctcagtaaggcctgtctttgggggagcagggtttcaggaggacagtgggggtggtgtagaactcatggctggcggttccgggcctctcaggaagctttgccactgggcttggggttaagtgggtgtggggctccgaaccctaaatgggtgagagttgaaatgaaagcggcacctgtagtccgtttggggtgcaggtgtgtgccaggggtcttcagccccggctgatggccacatgaaccacatgaggagaggcagggcgtgtcagcagcaaacctaagtgtgtgctcatttctgtgggcccttactctgtgacactgcagctctccagagagacgctttgaaaacaaaacaggaaagaacacacggccccgcgtctgttgcctgagtcactgtattccttaaaaggtgaaggaccctggtccttggcttttcgtgcacatgagaaaatgttggccaaggttagcgattatgcttctgtaatctgtaaccagaagtgctcttatgcccaaaccttgatgtgattctgctgtaatgtaacttcggagccagctggatggatgtgactgtgcaggtcctgagccccggcccccgtaaccaagcagtgggccgagacactgagccgggcagtcaaacaggagctctctaaggctgctcccgggctgggacctgggtctaggattctcagtaagacctttgaataaaactaacttgaattctt

SEQ ID NO: 129711 - DNA, 1475 bp, Homo sapiens
  Payload ID: 5371
  Gene Symbol: ENDOV
  Gene Name: endonuclease V
  ENST ID: ENST00000522751
  CDS Start-End: 727-1074
cgagctcatagtcttcaggctgtggaatcggagctgccaccgcccgagactccaaagcaaagcccagtttccggcgcggaagcggagggatctcaggaattgtagtccgcggggtgggcgcggttctcgcttccggccagtttgtctggcctgcgcttgcgcgggtctccgccgcctgggctcctagggactgtggcctcggcggtatgtcccttgctttcccttgaagcgggagaagacccggcagaggcgctctgtccgctgcagccgcgcgggtggaggaggcagagtctgaggtgtgaccccgaccaagtttgacgcttctgtcctcctagggagcaagctcggctgaaggcccacgtcgtagaccgggacaccgaggcgtggcagcgagaccccgccttctcgggtctgcagagggtcgggggcgttgacgtgtccttcgtgaaaggggacagtgtccgcgcttgtgcttccctggtggtgctcagcttccctgagctcgaggtccttcttgtggatggaaacggggtactccaccaccgaggctttggggtggcctgccaccttggcgtccttacagacctgccgtgtgttggggtggccaagaaacttctgcaggtggatgggctggagaacaacgccctgcacaaggagaagatccgactcctgcagactcgaggagactcattccctctgctgggagactctgggactgtcctgggaatggccctgaggagccacgaccgcagcaccaggcccctctacatctccgtgggccacaggatgagcctggaggccgctgtgcgcctgacttgctgctgctgcaggttccggatcccagagcccgtgcgccaggctgacatctgctcccgagagcacatccgcaagtcgctgggactccccgggccacccacaccgaggagcccgaaggcgcagaggccagtggcatgccccaaaggagactccggagagtcctcaggtgagggccagcccccacaggaccacagcccaggccccaggacagccccaaggccaggctcccaggagcaggcgggcaaggactggcagtagggtggaactgggcaccatgaagacaagaaggccaccggccaccccgttctggcctcaggacactgaccacccctgggggtggtctagggacttaggggaacctcatctcagccgcaggtggagcacccagtccccaaagacaggctgaccgcaccaccccagggggacgccgcagcacagcccagcaccaggtggggcagaggtgaccacggcccctctttgctccgtcatcggctggtcagctgtggtcacggtgcctcagaggacagatctctatgggggcaagtgccagatcctgagagcgcatgagacgctttcccggagccgacgaaggggactcggagctgcagcctgcacgacccctgcagcctgtgctttgcccacccctttcaatagatgga

SEQ ID NO: 129712 - DNA, 2418 bp, Homo sapiens
  Payload ID: 5371
  Gene Symbol: ENDOV
  Gene Name: endonuclease V
  Uniprot ID: Q8N8Q3
  ENST ID: ENST00000518907
  CDS Start-End: 333-530
gtctggcctgcgcttgcgcgggtctccgccgcctgggctcctagggactgtggcctcggcggtatgtcccttgctttcccttgaagcgggagaagacccggcagaggcgctctgtccgctgcagccgcgcgggtggaggaggcagagtctgaggctttggggtggcctgccaccttggcgtccttacagacctgccgtgtgttggggtggccaagaaacttctgcaggtggatgggctggagaacaacgccctgcacaaggagaagatccgactcctgcagactcgaggagactcattccctctgctgggagactctgggactgtcctgggaatggccctgaggagccacgaccgcagcaccaggcccctctacatctccgtgggccacaggatgagcctggaggccgctgtgcgcctgacttgctgctgctgcaggttccggatcccagagcccgtgcgccagcactttgttgaacgtggtggtgagagcacacgtcctcgtctcattcctgatcgaacgcggtggtgagagcacacgtcctcgtctcgttcctgatcgaacgcggtggtgagagcacacatcctcgtctcgttcctgatcgaacgcggtggtgagagcacacgtcctcgtctcgttcctgatcgaacgtggtggtgagagcacacgtccttgtcttgttcctgatcttaagggaacgtttgcagtctttcaccactagatgtgatgtgagctgttagattttcaaggatgctcttcatccagctgaagacggtcccttctagtcctaatttgttaagtgtttttatccttaaagggtactggattttgtcaaatgcttttctggcctctattgaaaagatcctgtgttcttctgtgaatatgaggtgttacattgattgattttcatatgttgagccagtttccatttgtggaatacatctaactcggtcatggtgtataatccatttactctgctgctgaatgtgatttgcttgtattttggtgcggatttttacatctgtatttataagggatattggtctggtgttttcttatgatgtcttcctttggttttgatatcaggataatattagcctcatagattgggttaggaaatgttctctcctccgttttttttggaagagagagattggtgttaattcttgctagaacctttggtagaatttgccagtaagcctatctggtcttgggtctttgggaggattttgattcgattcaatctatgtatttgttatagatcgttcggattgtccatccttgagtcagttgctagcttgtgtgtttcttggagtttttccgtttcgtccatgttatctcatctgttggcataccgtcgttcacgggattttattgatgtgtgtgaggtctctgagaacgtccctgccttcactcctgcttttagtcactggcatcttcttttaacttgggccatctggccgtgcatggttttgggagagtcctccttgactctgcagatgctgagcagtgatctggctgggaaaggggaccaggagtgcagggcacctgctgaggactcacctaagcccaagagtcagagagtcggagctccaaccacatctgcctgcatgcctttcccaggctctccccaggcggacagccagcaccccctccccaaagaccgggcagttcctgaccagcaccccaccaagtcctcagtaaggcctgtctttgggggagcagggtttcaggaggacagtgggggtggtgtagaactcatggctggcggttccgggcctctcaggaagctttgccactgggcttggggttaagtgggtgtggggctccgaaccctaaatgggtgagagttgaaatgaaagcggcacctgtagtccgtttggggtgcaggtgtgtgccaggggtcttcagccccggctgatggccacatgaaccacatgaggagaggcagggcgtgtcagcagcaaacctaagtgtgtgctcatttctgtgggcccttactctgtgacactgcagctctccagagagacgctttgaaaacaaaacaggaaagaacacacggccccgcgtctgttgcctgagtcactgtattccttaaaaggtgaaggaccctggtccttggcttttcgtgcacatgagaaaatgttggccaaggttagcgattatgcttctgtaatctgtaaccagaagtgctcttatgcccaaaccttgatgtgattctgctgtaatgtaacttcggagccagctggatggatgtgactgtgcaggtcctgagccccggcccccgtaaccaagcagtgggccgagacactgagccgggcagtcaaacaggagctctctaaggctgctcccgggctgggacctgggtctaggattctcagtaagacctttgaataaaactaacttgaattcttcaaaa

SEQ ID NO: 129713 - DNA, 2500 bp, Homo sapiens
  Payload ID: 5371
  Gene Symbol: ENDOV
  Gene Name: endonuclease V
  Uniprot ID: Q8N8Q3
  ENST ID: ENST00000520284
  CDS Start-End: 419-616
cagtttgtctggcctgcgcttgcgcgggtctccgccgcctgggctcctagggactgtggcctcggcgggagcaagctcggctgaaggcccacgtcgtagaccgggacaccgaggcgtggcagcgagaccccgccttctcgggtctgcagagggtcgggggcgttgacgtgtccttcgtgaaaggggacagtgtccgcgcttgtgcttccctggtggtgctcagcttccctgagctcgaggctttggggtggcctgccaccttggcgtccttacagacctgccgtgtgttggggtggccaagaaacttctgcaggtggatgggctggagaacaacgccctgcacaaggagaagatccgactcctgcagactcgaggagactcattccctctgctgggagactctgggactgtcctgggaatggccctgaggagccacgaccgcagcaccaggcccctctacatctccgtgggccacaggatgagcctggaggccgctgtgcgcctgacttgctgctgctgcaggttccggatcccagagcccgtgcgccagcactttgttgaacgtggtggtgagagcacacgtcctcgtctcattcctgatcgaacgcggtggtgagagcacacgtcctcgtctcgttcctgatcgaacgcggtggtgagagcacacatcctcgtctcgttcctgatcgaacgcggtggtgagagcacacgtcctcgtctcgttcctgatcgaacgtggtggtgagagcacacgtccttgtcttgttcctgatcttaagggaacgtttgcagtctttcaccactagatgtgatgtgagctgttagattttcaaggatgctcttcatccagctgaagacggtcccttctagtcctaatttgttaagtgtttttatccttaaagggtactggattttgtcaaatgcttttctggcctctattgaaaagatcctgtgttcttctgtgaatatgaggtgttacattgattgattttcatatgttgagccagtttccatttgtggaatacatctaactcggtcatggtgtataatccatttactctgctgctgaatgtgatttgcttgtattttggtgcggatttttacatctgtatttataagggatattggtctggtgttttcttatgatgtcttcctttggttttgatatcaggataatattagcctcatagattgggttaggaaatgttctctcctccgttttttttggaagagagagattggtgttaattcttgctagaacctttggtagaatttgccagtaagcctatctggtcttgggtctttgggaggattttgattcgattcaatctatgtatttgttatagatcgttcggattgtccatccttgagtcagttgctagcttgtgtgtttcttggagtttttccgtttcgtccatgttatctcatctgttggcataccgtcgttcacgggattttattgatgtgtgtgaggtctctgagaacgtccctgccttcactcctgcttttagtcactggcatcttcttttaacttgggccatctggccgtgcatggttttgggagagtcctccttgactctgcagatgctgagcagtgatctggctgggaaaggggaccaggagtgcagggcacctgctgaggactcacctaagcccaagagtcagagagtcggagctccaaccacatctgcctgcatgcctttcccaggctctccccaggcggacagccagcaccccctccccaaagaccgggcagttcctgaccagcaccccaccaagtcctcagtaaggcctgtctttgggggagcagggtttcaggaggacagtgggggtggtgtagaactcatggctggcggttccgggcctctcaggaagctttgccactgggcttggggttaagtgggtgtggggctccgaaccctaaatgggtgagagttgaaatgaaagcggcacctgtagtccgtttggggtgcaggtgtgtgccaggggtcttcagccccggctgatggccacatgaaccacatgaggagaggcagggcgtgtcagcagcaaacctaagtgtgtgctcatttctgtgggcccttactctgtgacactgcagctctccagagagacgctttgaaaacaaaacaggaaagaacacacggccccgcgtctgttgcctgagtcactgtattccttaaaaggtgaaggaccctggtccttggcttttcgtgcacatgagaaaatgttggccaaggttagcgattatgcttctgtaatctgtaaccagaagtgctcttatgcccaaaccttgatgtgattctgctgtaatgtaacttcggagccagctggatggatgtgactgtgcaggtcctgagccccggcccccgtaaccaagcagtgggccgagacactgagccgggcagtcaaacaggagctctctaaggctgctcccgggctgggacctgggtctaggattctcagtaagacctttgaataaaactaacttgaattcttc

SEQ ID NO: 129714 - DNA, 547 bp, Homo sapiens
  Payload ID: 5371
  Gene Symbol: ENDOV
  Gene Name: endonuclease V
  ENST ID: ENST00000521565
  CDS Start-End: 255-547
gtctggcctgcgcttgcgcgggtctccgccgcctgggctcctagggactgtggcctcggcgggagcaagctcggctgaaggcccacgtcgtagaccgggacaccgaggcgtggcagcgagaccccgccttctcgggtctgcagagggtcgggggcgttgacgtgtccttcgtgaaaggggacagtgtccgcgcttgtgcttccctggtggtgctcagcttccctgagctcgaggtggtgtatgaggagagccgcatggtcagcctcacagccccctacgtgtcgggcttcctggccttccgagaggtgcccttcttgctggagctggtgcagcagctgcgggagaaggagccgggcctcatgccccaggtccttcttgtggatggaaacggggtactccaccaccgaggctttggggtggcctgccaccttggcgtccttacagacctgccgtgtgttggggtggccaagaaacttctgcaggtggatgggctggagaacaacgccctgcacaaggagaagatccgactcctgcagactcgaggaga

SEQ ID NO: 129715 - DNA, 607 bp, Homo sapiens
  Payload ID: 5371
  Gene Symbol: ENDOV
  Gene Name: endonuclease V
  ENST ID: ENST00000523828
  CDS Start-End: 583-607
agtttgtctggcctgcgcttgcgcgggtctccgccgcctgggctcctagggactgtggcctcggcgggagcaagctcggctgaaggcccacgtcgtagaccgggacaccgaggcgtggcagcgagaccccgccttctcgggtctgcagagggtcgggggcgttgacgtgtccttcgtgaaaggggacagtgtccgcgcttgtgcttccctggtggtgctcagcttccctgagctcgagaaaccatgttgctttgcccaccatggatagcatgaggaagacgctggactcttccttcaagagatacgtgtgtgaatggacagtgggctcatgattcacataagagtcaacagctccggaagcctcttggcgtcactcgcattgctcctctgctgactcccgaaggctttggggtggcctgccaccttggcgtccttacagacctgccgtgtgttggggtggccaagaaacttctgcaggtggatgggctggagaacaacgccctgcacaaggagaagatccgactcctgcagactcgaggagactcattccctctgctgggagactctgggactgtcctgggaatggccctgaggagccacgaccgca

SEQ ID NO: 129716 - DNA, 2549 bp, Homo sapiens
  Payload ID: 5371
  Gene Symbol: ENDOV
  Gene Name: endonuclease V
  Uniprot ID: Q8N8Q3
  ENST ID: ENST00000518901
  CDS Start-End: 344-610
cgcctgggctcctagggactgtggcctcggcggtatgtcccttgctttcccttgaagcgggagaagacccggcagaggcgctctgtccgctgcagccgcgcgggtggaggaggcagagtctgaggtccttcttgtggatggaaacggggtactccaccaccgaggctttggggtggcctgccaccttggcgtccttacagacctgccgtgtgttggggtggccaagaaacttctgcaggtggatgggctggagaacaacgccctgcacaaggagaagatccgactcctgcagactcgaggagactcattccctctgctgggagactctgggactgtcctgggaatggccctgaggagccacgaccgcagcaccaggcccctctacatctccgtgggccacaggatgagcctggaggccgctgtgcgcctgacttgctgctgctgcaggttccggatcccagagcccgtgcgccaggctgacatctgctcccgagagcacatccgcaagtcgctgggactccccgggccacccacaccgaggagcccgaaggcgcagaggccagtggcatgccccaaaggagactccggagagtcctcagcactttgttgaacgtggtggtgagagcacacgtcctcgtctcattcctgatcgaacgcggtggtgagagcacacgtcctcgtctcgttcctgatcgaacgcggtggtgagagcacacatcctcgtctcgttcctgatcgaacgcggtggtgagagcacacgtcctcgtctcgttcctgatcgaacgtggtggtgagagcacacgtccttgtcttgttcctgatcttaagggaacgtttgcagtctttcaccactagatgtgatgtgagctgttagattttcaaggatgctcttcatccagctgaagacggtcccttctagtcctaatttgttaagtgtttttatccttaaagggtactggattttgtcaaatgcttttctggcctctattgaaaagatcctgtgttcttctgtgaatatgaggtgttacattgattgattttcatatgttgagccagtttccatttgtggaatacatctaactcggtcatggtgtataatccatttactctgctgctgaatgtgatttgcttgtattttggtgcggatttttacatctgtatttataagggatattggtctggtgttttcttatgatgtcttcctttggttttgatatcaggataatattagcctcatagattgggttaggaaatgttctctcctccgttttttttggaagagagagattggtgttaattcttgctagaacctttggtagaatttgccagtaagcctatctggtcttgggtctttgggaggattttgattcgattcaatctatgtatttgttatagatcgttcggattgtccatccttgagtcagttgctagcttgtgtgtttcttggagtttttccgtttcgtccatgttatctcatctgttggcataccgtcgttcacgggattttattgatgtgtgtgaggtctctgagaacgtccctgccttcactcctgcttttagtcactggcatcttcttttaacttgggccatctggccgtgcatggttttgggagagtcctccttgactctgcagatgctgagcagtgatctggctgggaaaggggaccaggagtgcagggcacctgctgaggactcacctaagcccaagagtcagagagtcggagctccaaccacatctgcctgcatgcctttcccaggctctccccaggcggacagccagcaccccctccccaaagaccgggcagttcctgaccagcaccccaccaagtcctcagtaaggcctgtctttgggggagcagggtttcaggaggacagtgggggtggtgtagaactcatggctggcggttccgggcctctcaggaagctttgccactgggcttggggttaagtgggtgtggggctccgaaccctaaatgggtgagagttgaaatgaaagcggcacctgtagtccgtttggggtgcaggtgtgtgccaggggtcttcagccccggctgatggccacatgaaccacatgaggagaggcagggcgtgtcagcagcaaacctaagtgtgtgctcatttctgtgggcccttactctgtgacactgcagctctccagagagacgctttgaaaacaaaacaggaaagaacacacggccccgcgtctgttgcctgagtcactgtattccttaaaaggtgaaggaccctggtccttggcttttcgtgcacatgagaaaatgttggccaaggttagcgattatgcttctgtaatctgtaaccagaagtgctcttatgcccaaaccttgatgtgattctgctgtaatgtaacttcggagccagctggatggatgtgactgtgcaggtcctgagccccggcccccgtaaccaagcagtgggccgagacactgagccgggcagtcaaacaggagctctctaaggctgctcccgggctgggacctgggtctaggattctcagtaagacctttgaataaaactaacttgaattcttc

SEQ ID NO: 129717 - DNA, 625 bp, Homo sapiens
  Payload ID: 5371
  Gene Symbol: ENDOV
  Gene Name: endonuclease V
  ENST ID: ENST00000518644
  CDS Start-End: 244-561
gcttgcgcgggtctccgccgcctgggctcctagggactgtggcctcggcgggagcaagctcggctgaaggcccacgtcgtagaccgggacaccgaggcgtggcagcgagaccccgccttctcgggtctgcagagggtcgggggcgttgacgtgtccttcgtgaaaggggacagtgtccgcgcttgtgcttccctggtggtgctcagcttccctgagctcgaggtggtgtatgaggagagccgcatggtcagcctcacagccccctacgtgtcgggcttcctggccttccgagaggtgcccttcttgctggagctggtgcagcagctgcgggagaaggagccgggcctcatgccccaggtccttcttgtggatggaaacggggtactccaccaccgaggctttggggtggcctgccaccttggcgtccttacagacctgccgtgtgttggggtggccaagaaacttctgcaggtggatgggctggagaacaacgccctgcacaaggagaagctctcaggtgcctgcatggagaagttgcttaataaaaatctgttgagttgatggggaccttagacccactcaatgagccagtccaccgccgccagaaataccagcctgttgagct

SEQ ID NO: 129718 - DNA, 468 bp, Homo sapiens
  Payload ID: 5371
  Gene Symbol: ENDOV
  Gene Name: endonuclease V
  ENST ID: ENST00000520136
  CDS Start-End: 459-468
cagtttgtctggcctgcgcttgcgcgggtctccgccgcctgggctcctagggactgtggcctcggcgggagcaagctcggctgaaggcccacgtcgtagaccgggacaccgaggcgtggcagcgagaccccgccttctcgggtctgcagagggtcgggggcgttgacgtgtccttcgtgaaaggggacagtgtccgcgcttgtgcttccctggtggtgctcagcttccctgagctcgaggtccttcttgtggatggaaacggggtactccaccaccgaggctttggggtggcctgccaccttggcgtccttacagacctgccgtgtgttggggtggccaagaaacttctgcaggtggatgggctggagaacaacgccctgcacaaggagaagatccgactcctgcagactcgaggagactcattccctctgctgggagactctgggactgtcctgggaatggccctga

SEQ ID NO: 129719 - DNA, 334 bp, Homo sapiens
  Payload ID: 5371
  Gene Symbol: ENDOV
  Gene Name: endonuclease V
  ENST ID: ENST00000572886
  CDS Start-End: 1-329
gtgttggggtggccaagaaacttctgcaggtggatgggctggagaacaacgccctgcacaaggagaaggtaccacagcctccaggcccccctcccgccaagacctgcctggagctgccacccacactcttcctacctcaccttcccctgcatcttcctcctctgggaccccatgttggcactgggagtgagacactcacaatggagggagctgttgacacccccagctgtttcactggatggcagattctgagagcagagactgtgtctctcattcctcctagctctcaggtgcctgcatggagaagttgcttaataaaaatctgttgagttga

SEQ ID NO: 129720 - DNA, 855 bp, Homo sapiens
  Payload ID: 5371
  Gene Symbol: ENDOV
  Gene Name: endonuclease V
  ENST ID: ENST00000522200
  CDS Start-End: 391-855
agtttgtctggcctgcgcttgcgcgggtctccgccgcctgggctcctagggactgtggcctcggcggtatgtcccttgctttcccttgaagcgggagaagacccggcagaggcgctctgtccgctgcagccgcgcgggtggaggaggcagagtctgaggtgtgaccccgaccaagtttgacgcttctgtcctcctagggagcaagctcggctgaaggcccacgtcgtagaccgggacaccgaggcgtggcagcgagaccccgccttctcgggtctgcagagggtcgggggcgttgacgtgtccttcgtgaaaggggacagtgtccgcgcttgtgcttccctggtggtgctcagcttccctgagctcgaggtggtgtatgaggagagccgcatggtcagcctcacagccccctacgtgtcgggcttcctggccttccgagaggtgcccttcttgctggagctggtgcagcagctgcgggagaaggagccgggcctcatgccccaggtccttcttgtggatggaaacggggtactccaccaccgaggctttggggtggcctgccaccttggcgtccttacagacctgccgtgtgttggggtggccaagaaacttctgcaggtggatgggctggagaacaacgccctgcacaaggagaagatccgactcctgcagactcgaggagactcattccctctgctgggagactctgggactgtcctgggaatggccctgaggagccacgaccgcagcaccaggcccctctacatctccgtgggccacaggatgagcctggaggccgctgtgcgcctgacttgctgctgctgcaggttccggatcccagagcccgtgcgccag

SEQ ID NO: 129721 - DNA, 2548 bp, Homo sapiens
  Payload ID: 5371
  Gene Symbol: ENDOV
  Gene Name: endonuclease V
  Uniprot ID: Q8N8Q3
  ENST ID: ENST00000517795
  CDS Start-End: 339-605
cagtttgtctggcctgcgcttgcgcgggtctccgccgcctgggctcctagggactgtggcctcggcggtatgtcccttgctttcccttgaagcgggagaagacccggcagaggcgctctgtccgctgcagccgcgcgggtggaggaggcagagtctgaggctttggggtggcctgccaccttggcgtccttacagacctgccgtgtgttggggtggccaagaaacttctgcaggtggatgggctggagaacaacgccctgcacaaggagaagatccgactcctgcagactcgaggagactcattccctctgctgggagactctgggactgtcctgggaatggccctgaggagccacgaccgcagcaccaggcccctctacatctccgtgggccacaggatgagcctggaggccgctgtgcgcctgacttgctgctgctgcaggttccggatcccagagcccgtgcgccaggctgacatctgctcccgagagcacatccgcaagtcgctgggactccccgggccacccacaccgaggagcccgaaggcgcagaggccagtggcatgccccaaaggagactccggagagtcctcagcactttgttgaacgtggtggtgagagcacacgtcctcgtctcattcctgatcgaacgcggtggtgagagcacacgtcctcgtctcgttcctgatcgaacgcggtggtgagagcacacatcctcgtctcgttcctgatcgaacgcggtggtgagagcacacgtcctcgtctcgttcctgatcgaacgtggtggtgagagcacacgtccttgtcttgttcctgatcttaagggaacgtttgcagtctttcaccactagatgtgatgtgagctgttagattttcaaggatgctcttcatccagctgaagacggtcccttctagtcctaatttgttaagtgtttttatccttaaagggtactggattttgtcaaatgcttttctggcctctattgaaaagatcctgtgttcttctgtgaatatgaggtgttacattgattgattttcatatgttgagccagtttccatttgtggaatacatctaactcggtcatggtgtataatccatttactctgctgctgaatgtgatttgcttgtattttggtgcggatttttacatctgtatttataagggatattggtctggtgttttcttatgatgtcttcctttggttttgatatcaggataatattagcctcatagattgggttaggaaatgttctctcctccgttttttttggaagagagagattggtgttaattcttgctagaacctttggtagaatttgccagtaagcctatctggtcttgggtctttgggaggattttgattcgattcaatctatgtatttgttatagatcgttcggattgtccatccttgagtcagttgctagcttgtgtgtttcttggagtttttccgtttcgtccatgttatctcatctgttggcataccgtcgttcacgggattttattgatgtgtgtgaggtctctgagaacgtccctgccttcactcctgcttttagtcactggcatcttcttttaacttgggccatctggccgtgcatggttttgggagagtcctccttgactctgcagatgctgagcagtgatctggctgggaaaggggaccaggagtgcagggcacctgctgaggactcacctaagcccaagagtcagagagtcggagctccaaccacatctgcctgcatgcctttcccaggctctccccaggcggacagccagcaccccctccccaaagaccgggcagttcctgaccagcaccccaccaagtcctcagtaaggcctgtctttgggggagcagggtttcaggaggacagtgggggtggtgtagaactcatggctggcggttccgggcctctcaggaagctttgccactgggcttggggttaagtgggtgtggggctccgaaccctaaatgggtgagagttgaaatgaaagcggcacctgtagtccgtttggggtgcaggtgtgtgccaggggtcttcagccccggctgatggccacatgaaccacatgaggagaggcagggcgtgtcagcagcaaacctaagtgtgtgctcatttctgtgggcccttactctgtgacactgcagctctccagagagacgctttgaaaacaaaacaggaaagaacacacggccccgcgtctgttgcctgagtcactgtattccttaaaaggtgaaggaccctggtccttggcttttcgtgcacatgagaaaatgttggccaaggttagcgattatgcttctgtaatctgtaaccagaagtgctcttatgcccaaaccttgatgtgattctgctgtaatgtaacttcggagccagctggatggatgtgactgtgcaggtcctgagccccggcccccgtaaccaagcagtgggccgagacactgagccgggcagtcaaacaggagctctctaaggctgctcccgggctgggacctgggtctaggattctcagtaagacctttgaataaaactaacttgaattcttcaaaa

SEQ ID NO: 129722 - DNA, 2332 bp, Homo sapiens
  Payload ID: 5372
  Gene Symbol: ENDOU
  Gene Name: endonuclease, polyU-specific
  Uniprot ID: P21128
  ENST ID: ENST00000229003
  CDS Start-End: 155-1264
cttcctgaaaggatctggagacaccagctccacaagtcctggtgtctttaaaaggatcagcttgaggaataaggctcgtctgagagctgtgacattcatctgactctagtgaaagtccaacagccactccctttttggcctccaactgggcaccatgagggcctgcatctccctggtattggccgtgctgtgtggcctggcctgggctgaggaccacaaagagtcagagccattgccacagctggaggaagagacagaagaggccctcgccagcaacttgtactcggcacccacctcctgccagggccgctgctacgaagcctttgacaagcaccaccaatgtcactgcaatgcccgctgccaagagtttgggaactgctgcaaggattttgagagcctgtgtagtgaccacgaggtctcccacagcagtgatgccataacaaaagaggagattcagagcatctctgagaagatctacagggcagacaccaacaaagcccagaaggaagacatcgttctcaatagccaaaactgcatctccccgtcagagaccagaaaccaagtggatcgctgcccaaagccactcttcacttatgtcaatgagaagctgttctccaagcccacctatgcagccttcatcaacctcctcaacaactaccagcgggcaacaggccatggggagcacttcagtgcccaggagctggccgagcaggacgccttcctcagagagatcatgaagacagcagtcatgaaggagctctacagcttcctccatcaccagaatcgctatggctcagagcaagagtttgtcgatgacttgaagaacatgtggtttgggctctattcaagaggcaatgaagagggggactcgagtggctttgaacatgtcttctcaggtgaggtaaaaaaaggcaaggttactggcttccataactggatccgcttctacctggaggagaaggagggtctggttgactattacagtcacatctacgatgggccttgggattcttaccccgatgtgctggcaatgcagttcaactgggacggctactataaggaagtgggctctgctttcatcggcagcagccctgagtttgagtttgcactctactccctgtgcttcatcgccaggccaggcaaagtgtgccagttaagcctgggaggatatcccttagctgtccggacatatacctgggacaagtccacctatgggaatggcaagaagtacatcgccacagcctacatagtgtcttccacctaatagaacttcgagccagaaaggggcatgagggctcttgcgagactgaagtgctatcttctctggactagagagaagagggagaggactggaagggatcaccaaatctcaaagcaatgagaagcattcctaaatcccaaagtgcccacatgggaaagagataaaatgtacaaattagaaaaatgtggataaacagtcaaacctttatcctctagaattttggcaatgttgactaagaaacagagtccaagcagagaaggtaggaaccctccatagctctctgccctgatgtgtgggggaactaggaagaagtcctttgacctcaccaggcctcatgcttccctttaatgtaaagggaaggggtttgcccactttcctctttttggggttggtgagagggcaaaccctgatatttttactgtgaaggtgttttcagttgttcttaggaagaacagctgatagaaattcaagattactataatggctgttattatacacagctctgtaaactaccactcagccctgtgttggggtcctcaaagaagtaaggccacagtaatcaagcaagggcctttggttttttccagagttagatcctctcagaacagagtctgggagaactccaatgctgaatggagaagggtaataggttggtgcagtgaatgggctgggggtggggtggccttctccaggcctgagtgtttttgtgtccagctcagtatctgcaacaagaagtttcccacttgtggatgtttagtgcagccacagacttgtattttgatccccaatttttttttgaaagagttctcctcataggaggatgattcagcatcagaagaagaaggaacccatagcttggtgtcattaacataattattttaagccttatccagcagccataatttgaataactctacgagaccagagagactgtagttccctattttaacctcaattatgcatttgtcccccaaccccactgagaactaaatgctgtaccacagagccgggtgtgaactatggtttagaaggttcaagtttccaattaaagtcattgaagaaaacttgaaa

SEQ ID NO: 129723 - DNA, 2413 bp, Homo sapiens
  Payload ID: 5372
  Gene Symbol: ENDOU
  Gene Name: endonuclease, polyU-specific
  Uniprot ID: P21128
  ENST ID: ENST00000422538
  CDS Start-End: 124-1356
acaagtcctggtgtctttaaaaggatcagcttgaggaataaggctcgtctgagagctgtgacattcatctgactctagtgaaagtccaacagccactccctttttggcctccaactgggcaccatgagggcctgcatctccctggtattggccgtgctgtgtggcctggcctgggctggaaaaatagaatcctgtgcatctcgatgtaatgagaaatttaaccgggacgctgcctgccagtgtgaccgccggtgtctctggcatgggaactgctgtgaagactatgaacatctgtgtactgaggaccacaaagagtcagagccattgccacagctggaggaagagacagaagaggccctcgccagcaacttgtactcggcacccacctcctgccagggccgctgctacgaagcctttgacaagcaccaccaatgtcactgcaatgcccgctgccaagagtttgggaactgctgcaaggattttgagagcctgtgtagtgaccacgaggtctcccacagcagtgatgccataacaaaagaggagattcagagcatctctgagaagatctacagggcagacaccaacaaagcccagaaggaagacatcgttctcaatagccaaaactgcatctccccgtcagagaccagaaaccaagtggatcgctgcccaaagccactcttcacttatgtcaatgagaagctgttctccaagcccacctatgcagccttcatcaacctcctcaacaactaccagcgggcaacaggccatggggagcacttcagtgcccaggagctggccgagcaggacgccttcctcagagagatcatgaagacagcagtcatgaaggagctctacagcttcctccatcaccagaatcgctatggctcagagcaagagtttgtcgatgacttgaagaacatgtggtttgggctctattcaagaggcaatgaagagggggactcgagtggctttgaacatgtcttctcaggtgaggtaaaaaaaggcaaggttactggcttccataactggatccgcttctacctggaggagaaggagggtctggttgactattacagtcacatctacgatgggccttgggattcttaccccgatgtgctggcaatgcagttcaactgggacggctactataaggaagtgggctctgctttcatcggcagcagccctgagtttgagtttgcactctactccctgtgcttcatcgccaggccaggcaaagtgtgccagttaagcctgggaggatatcccttagctgtccggacatatacctgggacaagtccacctatgggaatggcaagaagtacatcgccacagcctacatagtgtcttccacctaatagaacttcgagccagaaaggggcatgagggctcttgcgagactgaagtgctatcttctctggactagagagaagagggagaggactggaagggatcaccaaatctcaaagcaatgagaagcattcctaaatcccaaagtgcccacatgggaaagagataaaatgtacaaattagaaaaatgtggataaacagtcaaacctttatcctctagaattttggcaatgttgactaagaaacagagtccaagcagagaaggtaggaaccctccatagctctctgccctgatgtgtgggggaactaggaagaagtcctttgacctcaccaggcctcatgcttccctttaatgtaaagggaaggggtttgcccactttcctctttttggggttggtgagagggcaaaccctgatatttttactgtgaaggtgttttcagttgttcttaggaagaacagctgatagaaattcaagattactataatggctgttattatacacagctctgtaaactaccactcagccctgtgttggggtcctcaaagaagtaaggccacagtaatcaagcaagggcctttggttttttccagagttagatcctctcagaacagagtctgggagaactccaatgctgaatggagaagggtaataggttggtgcagtgaatgggctgggggtggggtggccttctccaggcctgagtgtttttgtgtccagctcagtatctgcaacaagaagtttcccacttgtggatgtttagtgcagccacagacttgtattttgatccccaatttttttttgaaagagttctcctcataggaggatgattcagcatcagaagaagaaggaacccatagcttggtgtcattaacataattattttaagccttatccagcagccataatttgaataactctacgagaccagagagactgtagttccctattttaacctcaattatgcatttgtcccccaaccccactgagaactaaatgctgtaccacagagccgggtgtgaactatggtttagaaggttcaagtttccaattaaagtcattgaag

SEQ ID NO: 129724 - DNA, 1513 bp, Homo sapiens
  Payload ID: 5372
  Gene Symbol: ENDOU
  Gene Name: endonuclease, polyU-specific
  Uniprot ID: P21128
  ENST ID: ENST00000545824
  CDS Start-End: 122-1165
aagtcctggtgtctttaaaaggatcagcttgaggaataaggctcgtctgagagctgtgacattcatctgactctagtgaaagtccaacagccactccctttttggcctccaactgggcaccatgagggcctgcatctccctggtattggccgtgctgtgtggcctggcctgggctgacttgtactcggcacccacctcctgccagggccgctgctacgaagcctttgacaagcaccaccaatgtcactgcaatgcccgctgccaagagtttgggaactgctgcaaggattttgagagcctgtgtagtgaccacgaggtctcccacagcagtgatgccataacaaaagaggagattcagagcatctctgagaagatctacagggcagacaccaacaaagcccagaaggaagacatcgttctcaatagccaaaactgcatctccccgtcagagaccagaaaccaagtggatcgctgcccaaagccactcttcacttatgtcaatgagaagctgttctccaagcccacctatgcagccttcatcaacctcctcaacaactaccagcgggcaacaggccatggggagcacttcagtgcccaggagctggccgagcaggacgccttcctcagagagatcatgaagacagcagtcatgaaggagctctacagcttcctccatcaccagaatcgctatggctcagagcaagagtttgtcgatgacttgaagaacatgtggtttgggctctattcaagaggcaatgaagagggggactcgagtggctttgaacatgtcttctcaggtgaggtaaaaaaaggcaaggttactggcttccataactggatccgcttctacctggaggagaaggagggtctggttgactattacagtcacatctacgatgggccttgggattcttaccccgatgtgctggcaatgcagttcaactgggacggctactataaggaagtgggctctgctttcatcggcagcagccctgagtttgagtttgcactctactccctgtgcttcatcgccaggccaggcaaagtgtgccagttaagcctgggaggatatcccttagctgtccggacatatacctgggacaagtccacctatgggaatggcaagaagtacatcgccacagcctacatagtgtcttccacctaatagaacttcgagccagaaaggggcatgagggctcttgcgagactgaagtgctatcttctctggactagagagaagagggagaggactggaagggatcaccaaatctcaaagcaatgagaagcattcctaaatcccaaagtgcccacatgggaaagagataaaatgtacaaattagaaaaatgtggataaacagtcaaacctttatcctctagaattttggcaatgttgactaagaaacagagtccaagcagagaaggtaggaaccctccatagctctctgccctgatgtgtgggggaactaggaagaagtcctttgacctcaccaggcctcatgcttccctttaatgt

SEQ ID NO: 129725 - DNA, 4765 bp, Homo sapiens
  Payload ID: 5373
  Gene Symbol: EEPD1
  Gene Name: endonuclease/exonuclease/phosphatase family domain containing 1
  Uniprot ID: Q7L9B9
  ENST ID: ENST00000242108
  CDS Start-End: 719-2428
ccctcccccacgtgccctcgggagtcccggggaggagttgccgcgcggaggaggcgtggccgcggtgcctgcggaggcgcgagcggcgcggcgcggcgcggccgggactttggctttgacaccgactgcgagcgggagccgtgcggctggtgctgggtctggactggctctggcggatccccgcccgagttgggcgcaggactttttgccggggtaaacgcaactgcggcggcgccgccgcaagccccggtgcagcctcggcggcgggtttcgccgccgctgccgccgcctccgagcagccctgcggcttctattcactctgggagagcgatgctaagtttctcccatagaaagagccgggacacgcagaccgaagcggcgtagtcggcttccagggcctgaccagtgacccacacccgcgcggacgcctaggctggaggcagggggcccgtgctgtcccgggctgggctcaggcttccgagccgcaggtggaagaggaaccggcgccccgcagagcggccgagaggcggccaagtgaaaggtaattttggacacgccaggcatggaagattcggtgtttgtctatagtaacctcttcagtccctgaatcctgcaccttccgtttttctgtgcttgtacggcctactgggcttcctccctagccagagagctcttctgcagtggtgcggccttcccgggagcctgatcctggcggaccatggggagcaccctgggctgccaccgctccatccccagggacccctcggacctgtcccatagccgcaagttcagcgcagcctgtaacttcagcaacattctagtgaatcaggagcggctcaacatcaacactgccacggaggaggagctgatgaccctgcctggggtgacgcgtgccgtggcacgcagcatcgtggagtaccgagagtatatcggtggcttcaagaaggtggaggacctggcattggtcagtggtgtaggcgccaccaagctggagcaggtcaagtttgagatctgtgtgagcagcaagggcagctcagcgcagcactctcccagttccctgcggcgggacctgctagcggagcagcagcctcaccacctggccacagctgtgcccctcaccccacgtgttaacatcaacacagccaccccggcccagctcatgagcgtgcgaggcctctcggagaaaatggccctcagcatcgtggacttccgccgtgagcatgggccctttcgcagcgttgaggacctagtgaggatggatggtatcaatgccgccttcctggacaggatccggcaccaggtgtttgctgagaggtccaggcccccatccacccacacgaacgggggactgaccttcaccgccaagcctcacccgagccccacttccctgagcctgcagagtgaggacctggacctgccgccaggggggcccacccagattatctccactcggccgtccgtggaggcctttggaggcacaagggatgggaggcctgtgctgaggctggccacctggaacttgcagggctgttccgtggagaaggccaacaaccccggggtgcgagaggtggtgtgcatgacactcctggaaaacagcatcaagcttctagctgtgcaagaactgcttgacagagaggccttggaaaagttctgcacggagctaaaccagccgaccctgcccaacatccgcaagtggaaggggccccggggatgctggaaggctgttgttgctgagaagccctcgagtcagctccagaagggagctgggtatgcaggattcctatgggacgcggctgccggcatggagctgagagacgcgggttcacaggagagctcgccaagcaacgggcacgggaagctggcgggccccagcccatacctcgggaggttcaaggtgggaagtcacgacctgacccttgttaaccttcacctggcagccctgaccctcctggggagcgagaatcccagcaagaatcacagtgatggccaccggttggcgagctttgcacagaccctacaggaaaccctgaaaggagaaaaggatgtcattatcttaggggattttggccaagggccagacagcaatgactatgatatcctgaggaaagaaaagttccaccacctgatccccgcgcacaccttcaccaacatcagcaccaagaaccctcaaggctcgaagtctctggacaacatctggatcagtaaaagcttaaagaaggttttcacaggtcactgggctgtggtgagagaaggcctcacgaacccttggattccggataactggtcttggggcggggtggcttctgaacactgcccagtgctagccgagttctacactgaaaaggactggagcaagaaggatgcccctcggaacggcagcggggtggccttggagcgaagtgaagccaacatcaagcacgagcgatgatgacaccaaatccatgtgtccaccctgggacccaggagggcacagccaaggaatgagccctgtggggtgacgcttcagggcagagctgccttttaatttttattctcagagcatcagcacttgaggccttgccccacgccttctctgtggaccattcaggacctccagtgggggtggcgtgccaggcgcgtaccccaccaggtgggcaaagcagaaacctgcggggagcggagacgccttttatctctggatgccacagacctgagcagcattgggctggctgtccgctgctgactggatggcagcacaaagacaatatgagcagagggaggagaagaaggggtgctcaggctgcgggccacagtccagcagcgccagaagcactcatttctgaccaccaggctatgacgttcctgctgcgcattacagaaagcttttaactgtgatcaggcactctgctcagatacattgagtggcgatttttagttttgttttgaaaaaataaacagattaacctgcctcgctgcagtgagagcatgggacaagtccgccacagccctcccccgcccccttcccccgccccccaacgcgcagtgtgtatttgcaccacggcaggtgcctctgtgtggagctagggtcaagccctgagcagcttcacttcccctgcgccttttatgtccccaccttgaggccttgcagaggcgcctctcaaggccccatcagctcgccgggacctctgtgaagcctctctgtcatctccccttcccagcccctccttcatcccctgcctccttcaccagcctggcttttgcctggagcactatttgtttagttctctttgcaggacaagaattctctcagggtggtatcacctcctccctcctccccactcactccagtttttagcccggagcctcctgtggttgactatcaggaatgtgtgctgtgtcaggatacataggaagttgacctcggggtatcatggagagtgtccctcctagtggctggaggtagggacagttggttgtggggctggagagaggttgtggggaggaagcgaggatgcgtgcctgccactaggcatctgcatccccgagcccaagccaggagggatttcccttaggcaacaccatcccagggagatctgccacaatttgcgtttcacagctgaagacgctgaggcttagagagctcgacctcctcaaggtcacaccactgggtaaatagagggatgcagactcaggttttgctatgtgctcacatttcaactttatgcttaacatgaatggaaaaatatgaaagtaaatagtgaaaaggtaagttatgagcttagattacctagattattccagtatcccatggaagctgaggacttattccgctttccacaccgaacactaaatgtggaccagtatcaagaaccctcctgtccccacgcagtgtaaacccagtggcttctctgacctggagctgatgggccgtgaagggggcctatttttctccaaaggccatccttttggggccacctggctccaagaagcatcgctggtcttggggacgggaagggaaccctcttccaggagctctaagggtacttgggaatcaattgtgtccattctgaggtctctccagtgggagggcggcagctcctgtccctgggttcaggctgtgcttctggaagcatcgaaatgggatgtctgagccttgaggaaaagcagcagggttagcattaaagtcaagaggggcagctcaggatgctaccagggagcacatcgtttctggtgcctcatctaaaggtgaaacctcccctacattcaccagccggatgtcccaaatccctttagccagattgctttttgcaaccaaagctgtggacagaaaagcctccttaagtgagctgaggggacaggaaatccaatcagatgacctttgtgttcgtaatcgggcttgagccagaggctggggagctgagtcccagccaaacctcactggcccttttgcttttcacgcccagggctcagtggcccaggaagtgtgctgggcagcctgttcttactccagctcaacccattgggtgttggctgtttttggttttagttgttgttttgtattttgttgttttaattaataggctttatttgtaagagcagttttatgtttacagaaaaattaggcacaaagggattcccatatccctcctcttctttgcatatttccccctctaattagcatgttgcattagcatggcactttgttacaactgatgaacttgtattcattattagctacagtgttcatagtttatattaaagttcactctttgtgttgtgcatccta

SEQ ID NO: 129726 - DNA, 622 bp, Homo sapiens
  Payload ID: 5373
  Gene Symbol: EEPD1
  Gene Name: endonuclease/exonuclease/phosphatase family domain containing 1
  ENST ID: ENST00000444777
  CDS Start-End: 1-103
ggacaacatctggatcagtaaaagcttaaagaaggatgcccctcggaacggcagcggggtggccttggagcgaagtgaagccaacatcaagcacgagcgatgatgacaccaaatccatgtgtccaccctgggacccaggagggcacagccaaggaatgagccctgtggggtgacgcttcagggcagagctgccttttaatttttattctcagagcatcagcacttgaggccttgccccacgccttctctgtggaccattcaggacctccagtgggggtggcgtgccaggcgcgtaccccaccaggtgggcaaagcagaaacctgcggggagcggagacgccttttatctctggatgccacagacctgagcagcattgggctggctgtccgctgctgactggatggcagcacaaagacaatatgagcagagggaggagaagaaggggtgctcaggctgcgggccacagtccagcagcgccagaagcactcatttctgaccaccaggctatgacgttcctgctgcgcattacagaaagcttttaactgtgatcaggcactctgctcagatacattgagtggcgatttttagttttgttttgaaaaaataaacagattaacctgc

SEQ ID NO: 129727 - DNA, 2769 bp, Homo sapiens
  Payload ID: 5373
  Gene Symbol: EEPD1
  Gene Name: endonuclease/exonuclease/phosphatase family domain containing 1
  Uniprot ID: Q7L9B9
  ENST ID: ENST00000534978
  CDS Start-End: 541-2250
caccgactgcgagcgggagccgtgcggctggtgctgggtctggactggctctggcggatccccgcccgagttgggcgcaggactttttgccggggtaaacgcaactgcggcggcgccgccgcaagccccggtgcagcctcggcggcgggtttcgccgccgctgccgccgcctccgagcagccctgcggcttctattcactctgggagagcgatgctaagtttctcccatagaaagagccgggacacgcagaccgaagcggcgtagtcggcttccagggcctgaccagtgacccacacccgcgcggacgcctaggctggaggcagggggcccgtgctgtcccgggctgggctcaggcttccgagccgcaggtggaagaggaaccggcgccccgcagagcggccgagaggcggccaagtgaaaggtaattttggacacaccttccgtttttctgtgcttgtacggcctactgggcttcctccctagccagagagctcttctgcagtggtgcggccttcccgggagcctgatcctggcggaccatggggagcaccctgggctgccaccgctccatccccagggacccctcggacctgtcccatagccgcaagttcagcgcagcctgtaacttcagcaacattctagtgaatcaggagcggctcaacatcaacactgccacggaggaggagctgatgaccctgcctggggtgacgcgtgccgtggcacgcagcatcgtggagtaccgagagtatatcggtggcttcaagaaggtggaggacctggcattggtcagtggtgtaggcgccaccaagctggagcaggtcaagtttgagatctgtgtgagcagcaagggcagctcagcgcagcactctcccagttccctgcggcgggacctgctagcggagcagcagcctcaccacctggccacagctgtgcccctcaccccacgtgttaacatcaacacagccaccccggcccagctcatgagcgtgcgaggcctctcggagaaaatggccctcagcatcgtggacttccgccgtgagcatgggccctttcgcagcgttgaggacctagtgaggatggatggtatcaatgccgccttcctggacaggatccggcaccaggtgtttgctgagaggtccaggcccccatccacccacacgaacgggggactgaccttcaccgccaagcctcacccgagccccacttccctgagcctgcagagtgaggacctggacctgccgccaggggggcccacccagattatctccactcggccgtccgtggaggcctttggaggcacaagggatgggaggcctgtgctgaggctggccacctggaacttgcagggctgttccgtggagaaggccaacaaccccggggtgcgagaggtggtgtgcatgacactcctggaaaacagcatcaagcttctagctgtgcaagaactgcttgacagagaggccttggaaaagttctgcacggagctaaaccagccgaccctgcccaacatccgcaagtggaaggggccccggggatgctggaaggctgttgttgctgagaagccctcgagtcagctccagaagggagctgggtatgcaggattcctatgggacgcggctgccggcatggagctgagagacgcgggttcacaggagagctcgccaagcaacgggcacgggaagctggcgggccccagcccatacctcgggaggttcaaggtgggaagtcacgacctgacccttgttaaccttcacctggcagccctgaccctcctggggagcgagaatcccagcaagaatcacagtgatggccaccggttggcgagctttgcacagaccctacaggaaaccctgaaaggagaaaaggatgtcattatcttaggggattttggccaagggccagacagcaatgactatgatatcctgaggaaagaaaagttccaccacctgatccccgcgcacaccttcaccaacatcagcaccaagaaccctcaaggctcgaagtctctggacaacatctggatcagtaaaagcttaaagaaggttttcacaggtcactgggctgtggtgagagaaggcctcacgaacccttggattccggataactggtcttggggcggggtggcttctgaacactgcccagtgctagccgagttctacactgaaaaggactggagcaagaaggatgcccctcggaacggcagcggggtggccttggagcgaagtgaagccaacatcaagcacgagcgatgatgacaccaaatccatgtgtccaccctgggacccaggagggcacagccaaggaatgagccctgtggggtgacgcttcagggcagagctgccttttaatttttattctcagagcatcagcacttgaggccttgccccacgccttctctgtggaccattcaggacctccagtgggggtggcgtgccaggcgcgtaccccaccaggtgggcaaagcagaaacctgcggggagcggagacgccttttatctctggatgccacagacctgagcagcattgggctggctgtccgctgctgactggatggcagcacaaagacaatatgagcagagggaggagaagaaggggtgctcaggctgcgggccacagtccagcagcgccagaagcactcatttctgaccaccaggctatgacgttcctgctgcgcattacagaaagcttttaactgtgatcaggcactctgctcagatacattgagtggcgatttttagttttgttttgaaaaaataaacagattaacctgc

SEQ ID NO: 129728 - DNA, 5495 bp, Homo sapiens
  Payload ID: 5374
  Gene Symbol: ERAP1
  Gene Name: endoplasmic reticulum aminopeptidase 1
  Uniprot ID: Q9NZ08
  ENST ID: ENST00000296754
  CDS Start-End: 259-3105
accaattcccttcctgggagttgcggcttccctcgctcggccccactcccgtttaccctttccccagctcccgccttagccaggggcttccccgcctgccgctagggctcgggccgaagcgccgctcagcgccagcctgccgctccccgggctccactttcactttcggtcctgggggagctaggccggcggcagtggtggtggcggcggcgcaagggtgagggcggccccagaaccccaggtaggtagagcaagaagatggtgtttctgcccctcaaatggtcccttgcaaccatgtcatttctactttcctcactgttggctctcttaactgtgtccactccttcatggtgtcagagcactgaagcatctccaaaacgtagtgatgggacaccatttccttggaataaaatacgacttcctgagtacgtcatcccagttcattatgatctcttgatccatgcaaaccttaccacgctgaccttctggggaaccacgaaagtagaaatcacagccagtcagcccaccagcaccatcatcctgcatagtcaccacctgcagatatctagggccaccctcaggaagggagctggagagaggctatcggaagaacccctgcaggtcctggaacacccccgtcaggagcaaattgcactgctggctcccgagcccctccttgtcgggctcccgtacacagttgtcattcactatgctggcaatctttcggagactttccacggattttacaaaagcacctacagaaccaaggaaggggaactgaggatactagcatcaacacaatttgaacccactgcagctagaatggcctttccctgctttgatgaacctgccttcaaagcaagtttctcaatcaaaattagaagagagccaaggcacctagccatctccaatatgccattggtgaaatctgtgactgttgctgaaggactcatagaagaccattttgatgtcactgtgaagatgagcacctatctggtggccttcatcatttcagattttgagtctgtcagcaagataaccaagagtggagtcaaggtttctgtttatgctgtgccagacaagataaatcaagcagattatgcactggatgctgcggtgactcttctagaattttatgaggattatttcagcataccgtatcccctacccaaacaagatcttgctgctattcccgactttcagtctggtgctatggaaaactggggactgacaacatatagagaatctgctctgttgtttgatgcagaaaagtcttctgcatcaagtaagcttggcatcacaatgactgtggcccatgaactggctcaccagtggtttgggaacctggtcactatggaatggtggaatgatctttggctaaatgaaggatttgccaaatttatggagtttgtgtctgtcagtgtgacccatcctgaactgaaagttggagattatttctttggcaaatgttttgacgcaatggaggtagatgctttaaattcctcacaccctgtgtctacacctgtggaaaatcctgctcagatccgggagatgtttgatgatgtttcttatgataagggagcttgtattctgaatatgctaagggagtatcttagtgctgacgcatttaaaagtggtattgtacagtatctccagaagcatagctataaaaatacaaaaaacgaggacctgtgggatagtatggcaagtatttgccctacagatggtgtaaaagggatggatggcttttgctctagaagtcaacattcatcttcatcctcacattggcatcaggaaggggtggatgtgaaaaccatgatgaacacttggacactgcagaagggttttcccctaataaccatcacagtgagggggaggaatgtacacatgaagcaagagcactacatgaagggctctgacggcgccccggacactgggtacctgtggcatgttccattgacattcatcaccagcaaatccgacatggtccatcgatttttgctaaaaacaaaaacagatgtgctcatcctcccagaagaggtggaatggatcaaatttaatgtgggcatgaatggctattacattgtgcattacgaggatgatggatgggactctttgactggccttttaaaaggaacacacacagcagtcagcagtaatgatcgggcgagtctcattaacaatgcatttcagctcgtcagcattgggaagctgtccattgaaaaggccttggatttatccctgtacttgaaacatgaaactgaaattatgcccgtgtttcaaggtttgaatgagctgattcctatgtataagttaatggagaaaagagatatgaatgaagtggaaactcaattcaaggccttcctcatcaggctgctaagggacctcattgataagcagacatggacagacgagggctcagtctcagagcgaatgctgcggagtcaactactactcctcgcctgtgtgcacaactatcagccgtgcgtacagagggcagaaggctatttcagaaagtggaaggaatccaatggaaacttgagcctgcctgtcgacgtgaccttggcagtgtttgctgtgggggcccagagcacagaaggctgggattttctttatagtaaatatcagttttctttgtccagtactgagaaaagccaaattgaatttgccctctgcagaacccaaaataaggaaaagcttcaatggctactagatgaaagctttaagggagataaaataaaaactcaggagtttccacaaattcttacactcattggcaggaacccagtaggatacccactggcctggcaatttctgaggaaaaactggaacaaacttgtacaaaagtttgaacttggctcatcttccatagcccacatggtaatgggtacaacaaatcaattctccacaagaacacggcttgaagaggtaaaaggattcttcagctctttgaaagaaaatggttctcagctccgttgtgtccaacagacaattgaaaccattgaagaaaacatcggttggatggataagaattttgataaaatcagagtgtggctgcaaagtgaaaagcttgaacatgatcctgaagctgacgcaacaggatgaaaatccatcagaatctcagactacagcactaaatatgctttgatgctacatcaaacggaatggaagcatagctgacttcgctaaagttacttcatctccatctagcaaatgaggcactgttctcaaccaaaggagatggggatctggtttagggcaatccctttataatttgatgtgctgtggtctccttggtaatgtataatttggtattgcacaggtgattagtcaaggaagtctggaaaagctttggtcccacagccttgcctcacagcatgtaaataattaaaacaatattgatgctgaggttcttctactgctagtatgaaagtgacaaatttttactggtgtgaattgggaagaaaacaatgctattccatgacgtttgtaaaatgtttgtaaaagctcaaacatgacgattccataaaataaacttgaggttaaataatgggtagtaaattatagaatgtataagaaaaaatataaaggagaaaatcaattatcaggaaagctaaagaacttttcaaatctagtaatttgaatatagacacaatgcactttattgcactttcaattcttataaagcaacaataatattaaggtccttgactatgtgtacaatgttttcacatatatagtttcatttaatcatttcaaagttaatctctgccatctcgctaaatcatcagtctcggctcttctgaaatagaaggtgcctgatcttcctaataattctgcctattttcatttgctttaaacaggcgccctattttctttctagttgtggctgcgcaaaaacatttatctcccaaataagatgtgctgcttaccgaggtatcacggggtggggctccagcttgggtcgttgaagctggggtttgggaaaccacttcagagatggcagcagcaagtttagcatcttcaaatttcttttattgaaaaaaattttattagtaacatgttgtatataaaattatgagcacaatgccatcacttaactataactcttaaagatagcttaatgactgtttattctcttgaccaaatagactcataataacatataattttaaaagaaatttaaattctttcttctctattgtattattttatacaatttgctatttctatttccttctcatattgattattctaaatactatgcaataatataacttagagttccacggtttgtttacacatttcctgttgtacatttaggttattcaaagttttcagctcttttaaaattgctctgaataagttctagtgagtgagttatggtgctggctatattttgctaaactgccctctcaaatgttgctaggaattcatactgcgaaaagcaatgaataagcatgcctgttttcccatggccttgcttgccagaatttgacttttattatgataatcagtgtaaaatgatatactactattgcttgtatattgtggtatacggtgtcaggtttcagggttttttttcaacgttaaatattctagaaactttctgaaataatttctgtttaaaaatattgaatatttgcttcatttcaaatactcccttttgacaaaaaaacttaggtataactgttgatgaaaaaccagaaaaaagtccagaactctttggtgactccaactatggatagcttattttgaaaaaggagaattgcaaattttaccaaaagatggagaaaagcacattaaaaagataccaacattcagaaattcatttcagcatgttattattggaaattatttaaactaatttagataactataagatacttattgtccatttataccctgtaaagccgttttagaatgtaatattttaggtaatccaaaatgtactaaattaaattcatttttagttatgagaaatctttgcttatatgacaaatgaaaagaataacaagttgtcaaatgaaaagaatgacattgaaacatttgtattgtctcttcttaaactatcttattgacttattatttaagccttttaatactaagtatgaaacaacctatggtctggaaatttgtatcgcaaagctatatgtgcatatgttatttaattcatctaatgctacacaaaagcataaaataatgatttttcactctctttaaaaatactaaatcatttatgtccatttctcaattttttcattgatctatgctttgagtttgctttctcaacattattgtattttccacttattattactgtataacatatgctagtgtttagttggattaatcttacctaaaagtactgaaaaatgctttttagtactttttcatattttatacatttattttccgaatgtatcattgaataattttattgagttataaaagtatcttattgctatttaataaaaaattaacacataaaatga

SEQ ID NO: 129729 - DNA, 4805 bp, Homo sapiens
  Payload ID: 5374
  Gene Symbol: ERAP1
  Gene Name: endoplasmic reticulum aminopeptidase 1
  Uniprot ID: Q9NZ08
  ENST ID: ENST00000443439
  CDS Start-End: 68-2893
gcagtggtggtggcggcggcgcaagggtgagggcggccccagaaccccaggtaggtagagcaagaagatggtgtttctgcccctcaaatggtcccttgcaaccatgtcatttctactttcctcactgttggctctcttaactgtgtccactccttcatggtgtcagagcactgaagcatctccaaaacgtagtgatgggacaccatttccttggaataaaatacgacttcctgagtacgtcatcccagttcattatgatctcttgatccatgcaaaccttaccacgctgaccttctggggaaccacgaaagtagaaatcacagccagtcagcccaccagcaccatcatcctgcatagtcaccacctgcagatatctagggccaccctcaggaagggagctggagagaggctatcggaagaacccctgcaggtcctggaacacccccgtcaggagcaaattgcactgctggctcccgagcccctccttgtcgggctcccgtacacagttgtcattcactatgctggcaatctttcggagactttccacggattttacaaaagcacctacagaaccaaggaaggggaactgaggatactagcatcaacacaatttgaacccactgcagctagaatggcctttccctgctttgatgaacctgccttcaaagcaagtttctcaatcaaaattagaagagagccaaggcacctagccatctccaatatgccattggtgaaatctgtgactgttgctgaaggactcatagaagaccattttgatgtcactgtgaagatgagcacctatctggtggccttcatcatttcagattttgagtctgtcagcaagataaccaagagtggagtcaaggtttctgtttatgctgtgccagacaagataaatcaagcagattatgcactggatgctgcggtgactcttctagaattttatgaggattatttcagcataccgtatcccctacccaaacaagatcttgctgctattcccgactttcagtctggtgctatggaaaactggggactgacaacatatagagaatctgctctgttgtttgatgcagaaaagtcttctgcatcaagtaagcttggcatcacaatgactgtggcccatgaactggctcaccagtggtttgggaacctggtcactatggaatggtggaatgatctttggctaaatgaaggatttgccaaatttatggagtttgtgtctgtcagtgtgacccatcctgaactgaaagttggagattatttctttggcaaatgttttgacgcaatggaggtagatgctttaaattcctcacaccctgtgtctacacctgtggaaaatcctgctcagatccgggagatgtttgatgatgtttcttatgataagggagcttgtattctgaatatgctaagggagtatcttagtgctgacgcatttaaaagtggtattgtacagtatctccagaagcatagctataaaaatacaaaaaacgaggacctgtgggatagtatggcaagtatttgccctacagatggtgtaaaagggatggatggcttttgctctagaagtcaacattcatcttcatcctcacattggcatcaggaaggggtggatgtgaaaaccatgatgaacacttggacactgcagaagggttttcccctaataaccatcacagtgagggggaggaatgtacacatgaagcaagagcactacatgaagggctctgacggcgccccggacactgggtacctgtggcatgttccattgacattcatcaccagcaaatccgacatggtccatcgatttttgctaaaaacaaaaacagatgtgctcatcctcccagaagaggtggaatggatcaaatttaatgtgggcatgaatggctattacattgtgcattacgaggatgatggatgggactctttgactggccttttaaaaggaacacacacagcagtcagcagtaatgatcgggcgagtctcattaacaatgcatttcagctcgtcagcattgggaagctgtccattgaaaaggccttggatttatccctgtacttgaaacatgaaactgaaattatgcccgtgtttcaaggtttgaatgagctgattcctatgtataagttaatggagaaaagagatatgaatgaagtggaaactcaattcaaggccttcctcatcaggctgctaagggacctcattgataagcagacatggacagacgagggctcagtctcagagcgaatgctgcggagtcaactactactcctcgcctgtgtgcacaactatcagccgtgcgtacagagggcagaaggctatttcagaaagtggaaggaatccaatggaaacttgagcctgcctgtcgacgtgaccttggcagtgtttgctgtgggggcccagagcacagaaggctgggattttctttatagtaaatatcagttttctttgtccagtactgagaaaagccaaattgaatttgccctctgcagaacccaaaataaggaaaagcttcaatggctactagatgaaagctttaagggagataaaataaaaactcaggagtttccacaaattcttacactcattggcaggaacccagtaggatacccactggcctggcaatttctgaggaaaaactggaacaaacttgtacaaaagtttgaacttggctcatcttccatagcccacatggtaatgggtacaacaaatcaattctccacaagaacacggcttgaagaggtaaaaggattcttcagctctttgaaagaaaatggttctcagctccgttgtgtccaacagacaattgaaaccattgaagaaaacatcggttggatggataagaattttgataaaatcagagtgtggctgcaaagtgaaaagcttgaacgtatgtaaaaattcctcccttgccaggttcctgttatctctaatcaccaacattttgttgagtgtattttcaaactagagatggctgttttggctccaactggagatacttttttcccttcaactcattttttgactatccctgtgaaaagaatagctgttagtttttcatgaatgggctatcgctaccatgtgttttgttcatcacaggtgttgccctgcaacgtaaacccaagtgttgggttccctgccacagaagaataaagtaccttattcttctcattttatagtttatgcttaagcacccgtgtccaaaaccctgtaccccatgtttatcattcataaactgtttcatcagtctcctcgaaagactctgaatagtcgactactgaacaatgaacacctggatctgagactaagccggacgatgactgggttaaagctctcccggctcacccctccagacccgctgcccatccctcttccttgctccatgcccaggggctgacttgtaaaggccaagtcatcaagctttcttgccctttggatgttggtcagtggggagccggagagctggagctggggtcggaggaggtagtaggtggaggtgttcttccctgattcccttgcgggatgcctcgggctggcctcccctgagggtcttagctccgagaggggaccctcttttccacacagccttctccacctctggattttggtaactgctccctcctcatcccttcaggattagtggcctcagtgggagtctggcttttactagtcctggcggacttgtggtttctacataatgtgctcgcacttttgcaaaaaatctttttatagaaccctcctcagataattctgagtgagtgtcatctatttccctgactggtacagtatctcttctgaaaaagcagagtgcattcaagtctgtaggaaaacccttttcttagggaggtgattttttttctctctctgcttcttatttggcctactttacaatttctaactaactagttattggcatttactgacagtaaattattgcagtcaccaataaatgatagtacattgtgaaacaaaatatttgctcatattagcaaataggacattctttggctttgaagtctttctttcttttgtgaagacttcacacacggttgcttcagcacacagttgctgctcaggttttatgtatagatgataataatagaaagcacagtttactaacatggtaaaccaacggagttcaagtcaagtcagttaataccctaagaattagattttatttcttattctgaaaacttgctacacagggacttatctaacccatagtgtgctctgttgctgacttgattcaagttgcagcgtgttttgcgctgactctaaggtgcggaaatcctcacacctggcaaaggagaattcaaactgaactttttgaatataaggcaaaaacttcaagataagggaatatgattgatgattggtacgaaaaatgtcaaaatgtgttcccctaatacacgacaaaatagagtgacttctggacataaatctgccatttattaaaccattcactacaacaaataaataggtataaaagtggaattggaatttttatacttatttgttgtagtgaatggtttaataaaaatagaaatcactggtaatttccaccccaaactaaactatttcccttcttttaaaaaaatacacaaccaagattttaatgtaaaatattttgctttaattgtattttatgccttgattaatgaaacatggaaatattgattttcagttttggtcacctgaggaacctatctttgtttgcttttggaaaagcccattttctaaacagatacaatattgccacaacaatgtgcagaaacctttttgataataaaaaattgttctttgcctctaa

SEQ ID NO: 129730 - DNA, 583 bp, Homo sapiens
  Payload ID: 5374
  Gene Symbol: ERAP1
  Gene Name: endoplasmic reticulum aminopeptidase 1
  ENST ID: ENST00000507154
  CDS Start-End: 197-583
agctaggccggcggcagtggtggtggcggcggcgcaagggtgagggcggccccagaaccccagacagagtcttgctctgttgccaggctggagtgcagtggtgcaatctcagctcactgcaactctgcctcccaggttcaagcgattctcctgcctcagcctcccaagtaattaggactacaggtagagcaagaagatggtgtttctgcccctcaaatggtcccttgcaaccatgtcatttctactttcctcactgttggctctcttaactgtgtccactccttcatggtgtcagagcactgaagcatctccaaaacgtagtgatgggacaccatttccttggaataaaatacgacttcctgagtacgtcatcccagttcattatgatctcttgatccatgcaaaccttaccacgctgaccttctggggaaccacgaaagtagaaatcacagccagtcagcccaccagcaccatcatcctgcatagtcaccacctgcagatatctagggccaccctcaggaagggagctggagagaggctatcggaagaacccctgcaggtcctggaacacccccgtcaggag

SEQ ID NO: 129731 - DNA, 555 bp, Homo sapiens
  Payload ID: 5374
  Gene Symbol: ERAP1
  Gene Name: endoplasmic reticulum aminopeptidase 1
  ENST ID: ENST00000508227
  CDS Start-End: 529-555
agctaggccggcggcagtggtggtggcggcggcgcaagggtgagggcggccccagaaccccagagcactgaagcatctccaaaacgtagtgatgggacaccatttccttggaataaaatacgacttcctgagtacgtcatcccagttcattatgatctcttgatccatgcaaaccttaccacgctgaccttctggggaaccacgaaagtagaaatcacagccagtcagcccaccagcaccatcatcctgcatagtcaccacctgcagatatctagggccaccctcaggaagggagctggagagaggctatcggaagaacccctgcaggtcctggaacacccccgtcaggagcaaattgcactgctggctcccgagcccctccttgtcgggctcccgtacacagttgtcattcactatgctggcaatctttcggagactttccacggattttacaaaagcacctacagaaccaaggaaggggaactgaggatactagcatcaacacaatttgaacccactgcagctagaatggcctttccctgctttgatgaacct

SEQ ID NO: 129732 - DNA, 632 bp, Homo sapiens
  Payload ID: 5374
  Gene Symbol: ERAP1
  Gene Name: endoplasmic reticulum aminopeptidase 1
  ENST ID: ENST00000512852
  CDS Start-End: 1-434
ttaagggagataaaataaaaactcaggagtttccacaaattcttacactcattggcaggaacccagtaggatacccactggcctggcaatttctgaggaaaaactggaacaaacttgtacaaaagtttgaacttggctcatcttccatagcccacatggtaatgggtacaacaaatcaattctccacaagaacacggcttgaagaggtaaaaggattcttcagctctttgaaagaaaatggttctcagctccgttgtgtccaacagacaattgaaaccattgaagaaaacatcggttggatggataagaattttgataaaatcagagtgtggctgcaaagtgaaaagcttgaacgtgttgccctgcaacgtaaacccaagtgttgggttccctgccacagaagaataaagtaccttattcttctcattttatagtttatgcttaagcacccgtgtccaaaaccctgtaccccatgtttatcattcataaactgtttcatcagtctcctcgaaagactctgaatagtcgactactgaacaatgaacacctggatctgagactaagccggacgatgactgggttaaagctctcccggctcacccctccagacccgctgcccatccctcttcctt

SEQ ID NO: 129733 - DNA, 551 bp, Homo sapiens
  Payload ID: 5374
  Gene Symbol: ERAP1
  Gene Name: endoplasmic reticulum aminopeptidase 1
  ENST ID: ENST00000503921
  CDS Start-End: 92-94
agctaggccggcggcagtggtggtggcggcggcgcaagggtgagggcggccccagaaccccagagcactgaagcatctccaaaacgtagtgatgggacaccatttccttggaataaaatacgacttcctgagtacgtcatcccagttcattatgatctcttgatccatgcaaaccttaccacgctgaccttctggggaaccacgaaagtagaaatcacagccagtcagcccaccagcaccatcatcctgcatagtcaccacctgcagatatctagggccaccctcaggaagggagctggagagaggctatcggaagaacccctgcaggtcctggaacacccccgtcaggagcaaattgcactgctggctcccgagcccctccttgtcgggctcccgtacacagttgtcattcactatgctggcaatctttcggagactttccacggattttacaaaagcacctacagaaccaaggaaggggaactgaggtgaaatctgtgactgttgctgaaggactcatagaagaccattttgatgtcactgtgaagatg

SEQ ID NO: 129734 - DNA, 3219 bp, Homo sapiens
  Payload ID: 5375
  Gene Symbol: ERAP2
  Gene Name: endoplasmic reticulum aminopeptidase 2
  Uniprot ID: Q6P179
  ENST ID: ENST00000379904
  CDS Start-End: 145-2892
atctgcagcagcatgatttaagattaaattcatgtattgaaaatattgttcagaccccatgtgacataactggagccagtgcagtgccatgaagaactacgagattagcctggatattaacttgtcttctagagaatagatttcatgttccattcttctgcaatggttaattcacacagaaaaccaatgtttaacattcacagaggattttactgcttaacagccatcttgccccaaatatgcatttgttctcagttctcagtgccatctagttatcacttcactgaggatcctggggctttcccagtagccactaatggggaacgatttccttggcaggagctaaggctccccagtgtggtcattcctctccattatgacctctttgtccaccccaatctcacctctctggactttgttgcatctgagaagatcgaagtcttggtcagcaatgctacccagtttatcatcttgcacagcaaagatcttgaaatcacgaatgccacccttcagtcagaggaagattcaagatacatgaaaccaggaaaagaactgaaagttttgagttaccctgctcatgaacaaattgcactgctggttccagagaaacttacgcctcacctgaaatactatgtggctatggacttccaagccaagttaggtgatggctttgaagggttttataaaagcacatacagaactcttggtggtgaaacaagaattcttgcagtaacagattttgagccaacccaggcacgcatggctttcccttgctttgatgaaccgttgttcaaagccaacttttcaatcaagatacgaagagagagcaggcatattgcactatccaacatgccaaaggtgtccatctatgcatccccagacaaacggaatcaaacacattatgctttgcaggcatcactgaagctacttgatttttatgaaaagtactttgatatctactatccactctccaaactggatttaattgctattcctgactttgcacctggagccatggaaaattggggcctcattacatatagggagacgtcactgctttttgaccccaagacctcttctgcttccgataaactgtgggtcaccagagtcatagcccatgaactggcgcaccagtggtttggcaacctggtcacaatggaatggtggaatgatatttggcttaaggagggttttgcaaaatacatggaacttatcgctgttaatgctacatatccagagctgcaatttgatgactattttttgaatgtgtgttttgaagtaattacaaaagattcattgaattcatcccgccctatctccaaaccagcggaaaccccgactcaaatacaggaaatgtttgatgaagtttcctataacaagggagcttgtattttgaatatgctcaaggattttctgggtgaggagaaattccagaaaggaataattcagtacttaaagaagttcagctatagaaatgctaagaatgatgacttgtggagcagtctgtcaaatagttgtttagaaagtgattttacatctggtggagtttgtcattcggatcccaagatgacaagtaacatgctcgcctttctgggggaaaatgcagaggtcaaagagatgatgactacatggactctccagaaaggaatccccctgctggtggttaaacaagacgggtgttcactccgactgcaacaggagcgcttcctccagggggttttccaggaagaccctgaatggagggccctgcaggagaggtacctgtggcatatcccattgacctactccacgagttcttctaatgtgatccacagacacattctaaaatcaaagacagatactctggatctacctgaaaagaccagttgggtgaaatttaatgtggactcaaatggttactacatcgttcactatgagggtcatggatgggaccaactcattacacagctgaatcagaaccacacacttctcagacctaaggacagagtaggtctgattcatgatgtgtttcagctagttggtgcagggagactgaccctagacaaagctcttgacatgacttactacctccaacatgaaacaagcagccccgcacttctcgaaggtctgagttacttggaatcgttttaccacatgatggacagaaggaatatttcagatatctctgaaaacctcaagcgttaccttcttcagtattttaagccagtgattgacaggcaaagctggagtgacaagggctcagtctgggacaggatgctccgctcggctctcttgaagctggcctgtgacctgaaccatgctccttgcatccagaaagctgctgaactcttctcccagtggatggaatccagtggaaaattaaatataccaacagatgttttaaagattgtgtattctgtgggtgctcagacaacagcaggatggaattaccttttagagcaatatgaactgtcaatgtcaagtgctgaacaaaacaaaattctgtatgctttgtcaacgagcaagcatcaggaaaagttactgaagttaattgaactaggaatggaaggaaaggttatcaagacacagaacttggcagctctccttcatgcgattgccagacgtccaaaggggcagcaactagcatgggattttgtaagagaaaattggacccatcttctgaaaaaatttgacttgggctcatatgacataaggatgatcatctctggcacaacagctcacttttcttccaaggataagttgcaagaggtgaaactattttttgaatctcttgaggctcaaggatcacatctggatatttttcaaactgttctggaaacgataaccaaaaatataaaatggctggagaagaatcttccgactctgaggacttggctaatggttaatacttaaatggtcaatagaaaaagtaggctgggcgcggtggctcacgcctgtaatcccagcactttgggaggctgagaagggcggatcacgaggtcaggagatggagaccatcctggctaacacggtgagaccccgtctccgctaaaaatacaaaaaattagccgggcatggtggcaggtgcctgtagtcccagctactcggcaggctgcagcaggaaaatggcataaacccgggaggtggagcttgcagtgagccgagattgcaccactgcattccagcctgggtgactgagcgagactctgtctcaaaaaaaaaaaaaaaaaaaaaaagaaa

SEQ ID NO: 129735 - DNA, 5705 bp, Homo sapiens
  Payload ID: 5375
  Gene Symbol: ERAP2
  Gene Name: endoplasmic reticulum aminopeptidase 2
  Uniprot ID: Q6P179
  ENST ID: ENST00000437043
  CDS Start-End: 712-3594
cccaactcaaacaggcagataaagagagatcaaagagatgagcatgagatacagtcccctcgtgcccaaggagacagggtggttacagacatggaaaatctgagaataatcacctctgataaagatcacagaagctgcccgggaggtgtttggtaagcttggagttacgtttgtggggtggatgggcagaagtcagatttcatagcactgaggatgcagcacaaggagaagttcaagatcaattcctaagacaacaacttggcactaaaaaacataaactatgttctgaaggctttaccctggggacaagggaagggaggtgataacagcagaagtggcagccactggcgatcctttctttccatggtttggcttctactccaaagccacttatttgtgcattctacaaaaagtttcttgtcctttttgaaataaagctcttatcctaagctccattcacacctgcgtgataatgaaccagctagtacttactgtactcaggaagcatgcaaagttctgaatcttagaacagaaagtgaaagcaaaagtaaattccccttcagtcaaatctgcagcagcatgatttaagattaaattcatgtattgaaaatattgttcagaccccatgtgacataactggagccagtgcagtgccatgaagaactacgagattagcctggatattaacttgtcttctagagaatagatttcatgttccattcttctgcaatggttaattcacacagaaaaccaatgtttaacattcacagaggattttactgcttaacagccatcttgccccaaatatgcatttgttctcagttctcagtgccatctagttatcacttcactgaggatcctggggctttcccagtagccactaatggggaacgatttccttggcaggagctaaggctccccagtgtggtcattcctctccattatgacctctttgtccaccccaatctcacctctctggactttgttgcatctgagaagatcgaagtcttggtcagcaatgctacccagtttatcatcttgcacagcaaagatcttgaaatcacgaatgccacccttcagtcagaggaagattcaagatacatgaaaccaggaaaagaactgaaagttttgagttaccctgctcatgaacaaattgcactgctggttccagagaaacttacgcctcacctgaaatactatgtggctatggacttccaagccaagttaggtgatggctttgaagggttttataaaagcacatacagaactcttggtggtgaaacaagaattcttgcagtaacagattttgagccaacccaggcacgcatggctttcccttgctttgatgaaccgttgttcaaagccaacttttcaatcaagatacgaagagagagcaggcatattgcactatccaacatgccaaaggttaagacaattgaacttgaaggaggtcttttggaagatcactttgaaactactgtaaaaatgagtacataccttgtagcctacatagtttgtgatttccactctctgagtggcttcacttcatcaggggtcaaggtgtccatctatgcatccccagacaaacggaatcaaacacattatgctttgcaggcatcactgaagctacttgatttttatgaaaagtactttgatatctactatccactctccaaactggatttaattgctattcctgactttgcacctggagccatggaaaattggggcctcattacatatagggagacgtcactgctttttgaccccaagacctcttctgcttccgataaactgtgggtcaccagagtcatagcccatgaactggcgcaccagtggtttggcaacctggtcacaatggaatggtggaatgatatttggcttaaggagggttttgcaaaatacatggaacttatcgctgttaatgctacatatccagagctgcaatttgatgactattttttgaatgtgtgttttgaagtaattacaaaagattcattgaattcatcccgccctatctccaaaccagcggaaaccccgactcaaatacaggaaatgtttgatgaagtttcctataacaagggagcttgtattttgaatatgctcaaggattttctgggtgaggagaaattccagaaaggaataattcagtacttaaagaagttcagctatagaaatgctaagaatgatgacttgtggagcagtctgtcaaatagttgtttagaaagtgattttacatctggtggagtttgtcattcggatcccaagatgacaagtaacatgctcgcctttctgggggaaaatgcagaggtcaaagagatgatgactacatggactctccagaaaggaatccccctgctggtggttaaacaagacgggtgttcactccgactgcaacaggagcgcttcctccagggggttttccaggaagaccctgaatggagggccctgcaggagaggtacctgtggcatatcccattgacctactccacgagttcttctaatgtgatccacagacacattctaaaatcaaagacagatactctggatctacctgaaaagaccagttgggtgaaatttaatgtggactcaaatggttactacatcgttcactatgagggtcatggatgggaccaactcattacacagctgaatcagaaccacacacttctcagacctaaggacagagtaggtctgattcatgatgtgtttcagctagttggtgcagggagactgaccctagacaaagctcttgacatgacttactacctccaacatgaaacaagcagccccgcacttctcgaaggtctgagttacttggaatcgttttaccacatgatggacagaaggaatatttcagatatctctgaaaacctcaagcgttaccttcttcagtattttaagccagtgattgacaggcaaagctggagtgacaagggctcagtctgggacaggatgctccgctcggctctcttgaagctggcctgtgacctgaaccatgctccttgcatccagaaagctgctgaactcttctcccagtggatggaatccagtggaaaattaaatataccaacagatgttttaaagattgtgtattctgtgggtgctcagacaacagcaggatggaattaccttttagagcaatatgaactgtcaatgtcaagtgctgaacaaaacaaaattctgtatgctttgtcaacgagcaagcatcaggaaaagttactgaagttaattgaactaggaatggaaggaaaggttatcaagacacagaacttggcagctctccttcatgcgattgccagacgtccaaaggggcagcaactagcatgggattttgtaagagaaaattggacccatcttctgaaaaaatttgacttgggctcatatgacataaggatgatcatctctggcacaacagctcacttttcttccaaggataagttgcaagaggtgaaactattttttgaatctcttgaggctcaaggatcacatctggatatttttcaaactgttctggaaacgataaccaaaaatataaaatggctggagaagaatcttccgactctgaggacttggctaatggttaatacttaaatggtcaatagaaaaagtaggctgggcgcggtggctcacgcctgtaatcccagcactttgggaggctgagaagggcggatcacgaggtcaggagatggagaccatcctggctaacacggtgagaccccgtctccgctaaaaatacaaaaaattagccgggcatggtggcaggtgcctgtagtcccagctactcggcaggctgcagcaggaaaatggcataaacccgggaggtggagcttgcagtgagccgagattgcaccactgcattccagcctgggtgactgagcgagactctgtctcaaaaaaaaaaaaaaaaaaaaaaagaaaaagaaaaagaaaagaaaagaaaaggtacatcagacatgactgcctgcatgaagtcaaacagggtaacaccagtgaagctcaagtcaagagctgtggatattttgtctaaccaacaagaagtctcaagaaatcaggcagtgcagctgcctgctctcagctatcgtatccagccaaaagatgcatgatgatggagtggtgggggaaggccagttcagtatcctatttaaaagtaaacttcctgaataatggatatatgtggagatacagacatagatatatagatacagctgtaattatttagcctcaagtgactttctccattgcttcacgctatgccactattttgcttctttaatttttttaaccttgcttagtattctatagtttgcccaaccagttttacgtccaaggaaaattagccaatgcataaaatatacaaactatgaaaggcaaggatcaggaaaccagagactttgccaccaaatctcagattattagaaactaggtgtcagggtttatcaagaaggccaggaaggccttttgggttaagccttacattcatgaagaacctcaagggtagatttttgagagcattccaaatgaatggtctctggtcaaatgaatgaatggtcaaatgaataaatctgccctcacagagatacaaaaggaaaaggaatataattcataccatttggtttaagccttacattcatgaagtacctcaagggtagatttttgagatcattccaaatgaagtcgaatctgccctcacagagacacaagaaaggaatataattcatacactattgcatttttaataaatcttttgaaatttgcagaattagattgtattgtgtattttcggttaaatgataattgaatgtaaatatttagatgcagcaccatattttataacccagctttagcatttcttcatattttaaggaaaccccccacctccttcttttaagggcgcttcttgctctctgaaatgccctgctaaatgcttctcttaattatttgaataaggtagtttggaataaagaaagaaaagatcactctacatacagatagtaaacttaatttgtgatcctatatatgagacagtataaaaatacagataagttttagaaagactcaaaacaatatgtaaatgactgatgtttgcattattaaggaagacttgggatgttgggtcaagaggggaaagtgttagtcaatccactttggagcaatatcatgaaggtcaattataattccatatacctttctttgatgccacagtcagagatagaatacagtttgggtggccatggatgtgccccaatacagtacacattttttggttaaatttgttttcagatcatttcatggaatctttgaagtatctttgactctaactttgacttggtggtggaccttccttggtttttataacacctaagagatatcctttagaattacatgtattttagcataaggaaattgaaaaagtaaaacatactggtttttttcaacaagaccatatgtaaattaaatagtgaaatgtgtatgagtttcagtagaactgtaccatcaacaatgtttccataaatatgcagagttctttcttttgtattgttatttacaatattgttaaattgaatgcatttgcaatttctaggattctaaagaattgagtacagaaagtagcaattttattatttgatgataatatgagaattactgtgccaatactgttttgataaataaatagatttttaaaaataaatgtattgtactta

SEQ ID NO: 129736 - DNA, 2309 bp, Homo sapiens
  Payload ID: 5375
  Gene Symbol: ERAP2
  Gene Name: endoplasmic reticulum aminopeptidase 2
  ENST ID: ENST00000510373
  CDS Start-End: 228-2309
gatacagtcccctcgtgcccaaggagacagggtggttacagacatggaaaatctgagaataatcacctctgataaagatcacagaagctgcccgggaggtgtttgattaaattcatgtattgaaaatattgttcagaccccatgtgacataactggagccagtgcagtgccatgaagaactacgagattagcctggatattaacttgtcttctagagaatagatttcatgttccattcttctgcaatggttaattcacacagaaaaccaatgtttaacattcacagaggattttactgcttaacagccatcttgccccaaatatgcatttgttctcagttctcagtgccatctagttatcacttcactgaggatcctggggctttcccagtagccactaatggggaacgatttccttggcaggagctaaggctccccagtgtggtcattcctctccattatgacctctttgtccaccccaatctcacctctctggactttgttgcatctgagaagatcgaagtcttggtcagcaatgctacccagtttatcatcttgcacagcaaagatcttgaaatcacgaatgccacccttcagtcagaggaagattcaagatacatgaaaccaggaaaagaactgaaagttttgagttaccctgctcatgaacaaattgcactgctggttccagagaaacttacgcctcacctgaaatactatgtggctatggacttccaagccaagttaggtgatggctttgaagggttttataaaagcacatacagaactcttggtggtgaaacaagaattcttgcagtaacagattttgagccaacccaggcacgcatggctttcccttgctttgatgaaccgttgttcaaagccaacttttcaatcaagatacgaagagagagcaggcatattgcactatccaacatgccaaaggttaagacaattgaacttgaaggaggtcttttggaagatcactttgaaactactgtaaaaatgagtacataccttgtagcctacatagtttgtgatttccactctctgagtggcttcacttcatcaggggtcaaggtgtccatctatgcatccccagacaaacggaatcaaacacattatgctttgcaggcatcactgaagctacttgatttttatgaaaagtactttgatatctactatccactctccaaactggatttaattgctattcctgactttgcacctggagccatggaaaattggggcctcattacatatagggagacgtcactgctttttgaccccaagacctcttctgcttccgataaactgtgggtcaccagagtcatagcccatgaactggcgcaccagtggtttggcaacctggtcacaatggaatggtggaatgatatttggcttaaggagggttttgcaaaatacatggaacttatcgctgttaatgctacatatccagagctgcaatttgatgactattttttgaatgtgtgttttgaagtaattacaaaagattcattgaattcatcccgccctatctccaaaccagcggaaaccccgactcaaatacaggaaatgtttgatgaagtttcctataacaagggagcttgtattttgaatatgctcaaggattttctgggtgaggagaaattccagaaaggaataattcagtacttaaagaagttcagctatagaaatgctaagaatgatgacttgtggagcagtctgtcaaatagttgtttagaaagtgattttacatctggtggagtttgtcattcggatcccaagatgacaagtaacatgctcgcctttctgggggaaaatgcagaggtcaaagagatgatgactacatggactctccagaaaggaatccccctgctggtggttaaacaagacgggtgttcactccgactgcaacaggagcgcttcctccagggggttttccaggaagaccctgaatggagggccctgcaggagaggtacctgtggcatatcccattgacctactccacgagttcttctaatgtgatccacagacacattctaaaatcaaagacagatactctggatctacctgaaaagaccagttgggtgaaatttaatgtggactcaaatggttactacatcgttcactatgagggtcatggatgggaccaactcattacacagctgaatcagaaccacacacttctcagacctaaggacagagtaggtctgattcatgatgtgtttcagctagttggtgcagggagactgaccctagacaaagctcttgacatgacttactacctccaacatgaaacaagcagcccc

SEQ ID NO: 129737 - DNA, 3434 bp, Homo sapiens
  Payload ID: 5375
  Gene Symbol: ERAP2
  Gene Name: endoplasmic reticulum aminopeptidase 2
  Uniprot ID: Q6P179
  ENST ID: ENST00000513084
  CDS Start-End: 151-1749
agtcaaatctgcagcagcatgatttaagattaaattcatgtattgaaaatattgttcagaccccatgtgacataactggagccagtgcagtgccatgaagaactacgagattagcctggatattaacttgtcttctagagaatagatttcatgttccattcttctgcaatggttaattcacacagaaaaccaatgtttaacattcacagaggattttactgcttaacagccatcttgccccaaatatgcatttgttctcagttctcagtgccatctagttatcacttcactgaggatcctggggctttcccagtagccactaatggggaacgatttccttggcaggagctaaggctccccagtgtggtcattcctctccattatgacctctttgtccaccccaatctcacctctctggactttgttgcatctgagaagatcgaagtcttggtcagcaatgctacccagtttatcatcttgcacagcaaagatcttgaaatcacgaatgccacccttcagtcagaggaagattcaagatacatgaaaccaggaaaagaactgaaagttttgagttaccctgctcatgaacaaattgcactgctggttccagagaaacttacgcctcacctgaaatactatgtggctatggacttccaagccaagttaggtgatggctttgaagggttttataaaagcacatacagaactcttggtggtgaaacaagaattcttgcagtaacagattttgagccaacccaggcacgcatggctttcccttgctttgatgaaccgttgttcaaagccaacttttcaatcaagatacgaagagagagcaggcatattgcactatccaacatgccaaaggttaagacaattgaacttgaaggaggtcttttggaagatcactttgaaactactgtaaaaatgagtacataccttgtagcctacatagtttgtgatttccactctctgagtggcttcacttcatcaggggtcaaggtgtccatctatgcatccccagacaaacggaatcaaacacattatgctttgcaggcatcactgaagctacttgatttttatgaaaagtactttgatatctactatccactctccaaactggatttaattgctattcctgactttgcacctggagccatggaaaattggggcctcattacatatagggagacgtcactgctttttgaccccaagacctcttctgcttccgataaactgtgggtcaccagagtcatagcccatgaactggcgcaccagtggtttggcaacctggtcacaatggaatggtggaatgatatttggcttaaggagggttttgcaaaatacatggaacttatcgctgttaatgctacatatccagagctgcaatttgatgactattttttgaatgtgtgttttgaagtaattacaaaagattcattgaattcatcccgccctatctccaaaccagcggaaaccccgactcaaatacaggaaatgtttgatgaagtttcctataacaagggagcttgtattttgaatatgctcaaggattttctgggtgaggagaaattccagaaaggaataattcagtacttaaagaagttcagctatagaaatgctaagaatgatgacttgtggagcagtctgtcaaatagttgtttagaaagtgattttacatctggtggagtttgtcattcggatcccaagatgacaagtaacatggtaaggataaagagagtcacagagtagaagagatctgtggaatagcctgacctagactcgcctttctgggggaaaatgcagaggtcaaagagatgatgactacatggactctccagaaaggaatccccctgctggtggttaaacaagacgggtgttcactccgactgcaacaggagcgcttcctccagggggttttccaggaagaccctgaatggagggccctgcaggagaggtacctgtggcatatcccattgacctactccacgagttcttctaatgtgatccacagacacattctaaaatcaaagacagatactctggatctacctgaaaagaccagttgggtgaaatttaatgtggactcaaatggttactacatcgttcactatgagggtcatggatgggaccaactcattacacagctgaatcagaaccacacacttctcagacctaaggacagagtaggtctgattcatgatgtgtttcagctagttggtgcagggagactgaccctagacaaagctcttgacatgacttactacctccaacatgaaacaagcagccccgcacttctcgaaggtctgagttacttggaatcgttttaccacatgatggacagaaggaatatttcagatatctctgaaaacctcaagcgttaccttcttcagtattttaagccagtgattgacaggcaaagctggagtgacaagggctcagtctgggacaggatgctccgctcggctctcttgaagctggcctgtgacctgaaccatgctccttgcatccagaaagctgctgaactcttctcccagtggatggaatccagtggaaaattaaagtagatgtagacttctgtcctaccctttgttcttttctctttgattataccaacagatgttttaaagattgtgtattctgtgggtgctcagacaacagcaggatggaattaccttttagagcaatatgaactgtcaatgtcaagtgctgaacaaaacaaaattctgtatgctttgtcaacgagcaagcatcaggaaaagttactgaagttaattgaactaggaatggaaggaaaggttatcaagacacagaacttggcagctctccttcatgcgattgccagacgtccaaaggggcagcaactagcatgggattttgtaagagaaaattggacccatcttctgaaaaaatttgacttgggctcatatgacataaggatgatcatctctggcacaacagctcacttttcttccaaggataagttgcaagaggtgaaactattttttgaatctcttgaggctcaaggatcacatctggatatttttcaaactgttctggaaacgataaccaaaaatataaaatggctggagaagaatcttccgactctgaggacttggctaatggttaatacttaaatggtcaatagaaaaagtaggctgggcgcggtggctcacgcctgtaatcccagcactttgggaggctgagaagggcggatcacgaggtcaggagatggagaccatcctggctaacacggtgagaccccgtctccgctaaaaatacaaaaaattagccgggcatggtggcaggtgcctgtagtcccagctactcggcaggctgcagcaggaaaatggcataaacccgggaggtggagcttgcagtgagccgagattgcaccactgcattccagcctgggtgactgagcgagactctgtctc

SEQ ID NO: 129738 - DNA, 282 bp, Homo sapiens
  Payload ID: 5375
  Gene Symbol: ERAP2
  Gene Name: endoplasmic reticulum aminopeptidase 2
  ENST ID: ENST00000512869
  CDS Start-End: 1-238
aggaaaggttatcaagacacagaacttggcagctctccttcatgcgattgccagacgtccaaaggggcagcaactagcatgggattttgtaagagaaaattggacccatcttctgaaaaaatttgacttgggctcatatgacataaggatgatcatctctggcacaacagctcacttttcttccaaggataagttgcaagaggtttgtgactttctgtttttaacaatttcaaaataaatgttcaaattgtggaattgaaagtaaacttagatataatctga

SEQ ID NO: 129739 - DNA, 1275 bp, Homo sapiens
  Payload ID: 5375
  Gene Symbol: ERAP2
  Gene Name: endoplasmic reticulum aminopeptidase 2
  Uniprot ID: Q6P179
  ENST ID: ENST00000510309
  CDS Start-End: 123-1175
attaaattcatgtattgaaaatattgttcagaccccatgtgacataactggagccagtgcagtgccatgaagaactacgagattagcctggatattaacttgtcttctagagaatagatttcatgttccattcttctgcaatggttaattcacacagaaaaccaatgtttaacattcacagaggattttactgcttaacagccatcttgccccaaatatgcatttgttctcagttctcagtgccatctagttatcacttcactgaggatcctggggctttcccagtagccactaatggggaacgatttccttggcaggagctaaggctccccagtgtggtcattcctctccattatgacctctttgtccaccccaatctcacctctctggactttgttgcatctgagaagatcgaagtcttggtcagcaatgctacccagtttatcatcttgcacagcaaagatcttgaaatcacgaatgccacccttcagtcagaggaagattcaagatacatgaaaccaggaaaagaactgaaagttttgagttaccctgctcatgaacaaattgcactgctggttccagagaaacttacgcctcacctgaaatactatgtggctatggacttccaagccaagttaggtgatggctttgaagggttttataaaagcacatacagaactcttggtggtgaaacaagaattcttgcagtaacagattttgagccaacccaggcacgcatggctttcccttgctttgatgaaccgttgttcaaagccaacttttcaatcaagatacgaagagagagcaggcatattgcactatccaacatgccaaaggttaagacaattgaacttgaaggaggtcttttggaagatcactttgaaactactgtaaaaatgagtacataccttgtagcctacatagtttgtgatttccactctctgagtggcttcacttcatcaggggtcaaggtgtccatctatgcatccccagacaaacggaatcaaacacattatgctttgcaggcatcactgaagctacttgatttttatgaaaagtactttgatatctactatccactctccaaactgggtatgttcaaattccacattattgtcttcatttttgctcataaaacttgctttgatctcttccctctttctctttctatgtgatttaaatgagcactgaggaattcagttagctcaggaaaaaataatttgttcctcagagatgattcttgagtgtagaaaataaaatatttatgacatgccc

SEQ ID NO: 129740 - DNA, 582 bp, Homo sapiens
  Payload ID: 5375
  Gene Symbol: ERAP2
  Gene Name: endoplasmic reticulum aminopeptidase 2
  ENST ID: ENST00000507346
  CDS Start-End: 496-582
taattcagttgactgggcagggaagtgtttgttgaggaagtgaatttaaattgagagctgagtttttttttaaagagacagttatgagaacatctcggggcaagtgctctaaagtgggattggttgaggaaggccagtgtaagctgaggagagcgaacaagagggagaaagggatcagatcatgtggagccttggggcgtcttgtaaggagttttgactttaactcagatgaaatgggaaatcactggaggattctgctctgatttatgctttataaagatcaagtctatgttgagggtatgttatagagaagcagagtaatcaattgggaggtcattgcagtagttcaggtaagaagtgatgctaatttgggccaggctagtggcagtgcttatggagtgaaacaattgaacttggcagttattttggagggcaaaacaacagagattgctgacatattggtcatgtgaggtgagggaaatagaagaatcaaggatgcttcatagagtggacggcttggtttcccagggccaggatccatctgggagaattcttgcagtaacagattttgagccaacccag

SEQ ID NO: 129741 - DNA, 489 bp, Homo sapiens
  Payload ID: 5375
  Gene Symbol: ERAP2
  Gene Name: endoplasmic reticulum aminopeptidase 2
  ENST ID: ENST00000508077
  CDS Start-End: 1-489
tcaaacacattatgctttgcaggcatcactgaagctacttgatttttatgaaaagtactttgatatctactatccactctccaaactggatttaattgctattcctgactttgcacctggagccatggaaaattggggcctcattacatatagggagacgtcactgctttttgaccccaagacctcttctgcttccgataaactgtgggtcaccagagtcatagcccatgaactggcgcaccagtggtttggcaacctggtcacaatggaatggtggaatgatatttggcttaaggagggttttgcaaaatacatggaacttatcgctgttaatgctacatatccagagctgcaatttggagcttgtattttgaatatgctcaaggattttctgggtgaggagaaattccagaaaggaataattcagtacttaaagaagttcagctatagaaatgctaagaatgatgacttgtggagcagtctgtcaaa

SEQ ID NO: 129742 - DNA, 2433 bp, Homo sapiens
  Payload ID: 5376
  Gene Symbol: ERLEC1
  Gene Name: endoplasmic reticulum lectin 1
  Uniprot ID: Q96DZ1
  ENST ID: ENST00000185150
  CDS Start-End: 132-1583
ggcggcggttgggccggtgatacccgggcgctttatagtcccgccgcctcctcctccacctcctcctcctcctcctctcctcctggagcagaggaggttgtggcggtggctggagaaagcggcggcggaggatggaggaaggaggcggcggcgtacggagtctggtcccgggcgggccggtgttactggtcctctgcggcctcctggaggcgtccggcggcggccgagcccttcctcaactcagcgatgacatccctttccgagtcaactggcccggcaccgagttctctctgcccacaactggagttttatataaagaagataattatgtcatcatgacaactgcacataaagaaaaatataaatgcatacttccccttgtgacaagtggggatgaggaagaagaaaaggattataaaggccctaatccaagagagcttttggagccactatttaaacaaagcagttgttcctacagaattgagtcttattggacttacgaagtatgtcatggaaaacacattcggcagtaccatgaagagaaagaaactggtcagaaaataaatattcacgagtactaccttgggaatatgttggccaagaaccttctatttgaaaaagaacgagaagcagaagaaaaggaaaaatcaaatgagattcccactaaaaatatcgaaggtcagatgacaccatactatcctgtgggaatgggaaatggtacaccttgtagtttgaaacagaaccggcccagatcaagtactgtgatgtacatatgtcatcctgaatctaagcatgaaattctttcagtagctgaagttacaacttgtgaatatgaagttgtcattttgacaccactcttgtgcagtcatcctaaatataggttcagagcatctcctgtgaatgacatattttgtcaatcactgccaggatctccatttaagcccctcaccctgaggcagctggagcagcaggaagaaatactaagggtgccttttaggagaaataaagaggaagatttgcaatcaactaaagaagagagatttccagcgatccacaagtcgattgctattggctctcagccagtgctcactgttgggacaacccacatatccaaattgacagatgaccaactcataaaagagtttcttagtggttcttactgctttcgtgggggtgtcggttggtggaaatatgaattctgctatggcaaacatgtacatcaataccatgaggacaaggatagtgggaaaacctctgtggttgtcgggacatggaaccaagaagagcatattgaatgggctaagaagaatactgctagagcttatcatcttcaagacgatggtacccagacagtcaggatggtgtcacatttttatggaaatggagatatttgtgatataactgacaaaccaagacaggtgactgtaaaactaaagtgcaaagaatcagattcacctcatgctgttactgtatatatgctagagcctcactcctgtcaatatattcttggggttgaatctccagtgatctgtaaaatcttagatacagcagatgaaaatggacttctttctctccccaactaaaggatattaaagttaggggaaagaaaagatcattgaaagtcatgataatttctgtcccactgtgtctcattatagagttctcagccattggacctcttctaaaggatggtataaaatgactctcaaccactttgtgaatacatatgtgtatataagaggttattgataaacttctgaggcagacatttgtctcgctttttttcatttttgttgtgtcttataaactgactgtttttctttgcttggatactgtgattccaaaataaatctcatccaagcaagttagagtccagcctaatcaaatgtcataattgttgtacctattgaaagtttttaaataatagatttattatgtaaattatagtatatgtaagtagctaatgaagtaaagatcatgaagaaagaaattgataggtgtaaatgagagaccatgtaaaatatgtaaattctagtacctgaaatcctttcaacagatttttatatagcaactgctctctgcaagtagttaaactagaaactgggcacatggtagaggctcacatgggagttgtcctcacccttgttaatctcaagaaactcttatttataataggttgcttctctctcagaacttttatctattacttttttcttcttatgagtatgtttactctcagagtatctatctgatgtagacagttggtgatgcttctgagactcagaatggtttactctaacaaaacactgtgctgtctatcccttgtacttgcctactgtaatatggatttcacttctgaacagtttacagcacaatatttattttaaagtgaataaaatgtccacaagcagtgttgtcatgtagtcaatggca

SEQ ID NO: 129743 - DNA, 2271 bp, Homo sapiens
  Payload ID: 5376
  Gene Symbol: ERLEC1
  Gene Name: endoplasmic reticulum lectin 1
  Uniprot ID: Q96DZ1
  ENST ID: ENST00000378239
  CDS Start-End: 132-1421
ggcggcggttgggccggtgatacccgggcgctttatagtcccgccgcctcctcctccacctcctcctcctcctcctctcctcctggagcagaggaggttgtggcggtggctggagaaagcggcggcggaggatggaggaaggaggcggcggcgtacggagtctggtcccgggcgggccggtgttactggtcctctgcggcctcctggaggcgtccggcggcggccgagcccttcctcaactcagcgatgacatccctttccgagtcaactggcccggcaccgagttctctctgcccacaactggagttttatataaagaagataattatgtcatcatgacaactgcacataaagaaaaatataaatgcatacttccccttgtgacaagtggggatgaggaagaagaaaaggattataaaggccctaatccaagagagcttttggagccactatttaaacaaagcagttgttcctacagaattgagtcttattggacttacgaagtatgtcatggaaaacacattcggcagtaccatgaagagaaagaaactggtcagaaaataaatattcacgagtactaccttgggaatatgttggccaagaaccttctatttgaaaaagaacgagaagcagaagaaaaggaaaaatcaaatgagattcccactaaaaatatcgaaggtcagatgacaccatactatcctgtgggaatgggaaatggtacaccttgtagtttgaaacagaaccggcccagatcaagtactgtgatgtacatatgtcatcctgaatctaagcatgaaattctttcagtagctgaagttacaacttgtgaatatgaagttgtcattttgacaccactcttgtgcagtcatcctaaatataggttcagagcatctcctgtgaatgacatattttgtcaatcactgccaggatctccatttaagcccctcaccctgaggcagctggagcagcaggaagaaatactaagggtgccttttaggagaaataaagagggtgtcggttggtggaaatatgaattctgctatggcaaacatgtacatcaataccatgaggacaaggatagtgggaaaacctctgtggttgtcgggacatggaaccaagaagagcatattgaatgggctaagaagaatactgctagagcttatcatcttcaagacgatggtacccagacagtcaggatggtgtcacatttttatggaaatggagatatttgtgatataactgacaaaccaagacaggtgactgtaaaactaaagtgcaaagaatcagattcacctcatgctgttactgtatatatgctagagcctcactcctgtcaatatattcttggggttgaatctccagtgatctgtaaaatcttagatacagcagatgaaaatggacttctttctctccccaactaaaggatattaaagttaggggaaagaaaagatcattgaaagtcatgataatttctgtcccactgtgtctcattatagagttctcagccattggacctcttctaaaggatggtataaaatgactctcaaccactttgtgaatacatatgtgtatataagaggttattgataaacttctgaggcagacatttgtctcgctttttttcatttttgttgtgtcttataaactgactgtttttctttgcttggatactgtgattccaaaataaatctcatccaagcaagttagagtccagcctaatcaaatgtcataattgttgtacctattgaaagtttttaaataatagatttattatgtaaattatagtatatgtaagtagctaatgaagtaaagatcatgaagaaagaaattgataggtgtaaatgagagaccatgtaaaatatgtaaattctagtacctgaaatcctttcaacagatttttatatagcaactgctctctgcaagtagttaaactagaaactgggcacatggtagaggctcacatgggagttgtcctcacccttgttaatctcaagaaactcttatttataataggttgcttctctctcagaacttttatctattacttttttcttcttatgagtatgtttactctcagagtatctatctgatgtagacagttggtgatgcttctgagactcagaatggtttactctaacaaaacactgtgctgtctatcccttgtacttgcctactgtaatatggatttcacttctgaacagtttacagcacaatatttattttaaagtgaataaaatgtccacaagcagtgttgtcatgtagtcaatggca

SEQ ID NO: 129744 - DNA, 1756 bp, Homo sapiens
  Payload ID: 5376
  Gene Symbol: ERLEC1
  Gene Name: endoplasmic reticulum lectin 1
  Uniprot ID: Q96DZ1
  ENST ID: ENST00000405123
  CDS Start-End: 132-1505
ggcggcggttgggccggtgatacccgggcgctttatagtcccgccgcctcctcctccacctcctcctcctcctcctctcctcctggagcagaggaggttgtggcggtggctggagaaagcggcggcggaggatggaggaaggaggcggcggcgtacggagtctggtcccgggcgggccggtgttactggtcctctgcggcctcctggaggcgtccggcggcggccgagcccttcctcaactcagcgatgacatccctttccgagtcaactggcccggcaccgagttctctctgcccacaactggagttttatataaagaagataattatgtcatcatgacaactgcacataaagaaaaatataaatgcatacttccccttgtgacaagtggggatgaggaagaagaaaaggattataaaggccctaatccaagagagcttttggagccactatttaaacaaagcagttgttcctacagaattgagtcttattggacttacgaagtatgtcatggaaaacacattcggcagtaccatgaagagaaagaaactggtcagaaaataaatattcacgagtactaccttgggaatatgttggccaagaaccttctatttgaaaaagaacgagaagcagaagaaaaggaaaaatcaaatgagattcccactaaaaatatcgaaggtcagatgacaccatactatcctgtgggaatgggaaatggtacaccttgtagtttgaaacagaaccggcccagatcaagtactgtgatgtacatatgtcatcctgaatctaagcatgaaattctttcagtagctgaagttacaacttgtgaatatgaagttgtcattttgacaccactcttgtgcagtcatcctaaatataggttcagagcatctcctgtgaatgacatattttgtcaatcactgccaggatctccatttaagcccctcaccctgaggcagctggagcagcaggaagaaatactaagggtgccttttaggagaaataaagaggaagatttgcaatcaactaaagaagagagatttccagcgatccacaagtcgattgctattggctctcagccagtgctcactgttgggacaacccacatatccaaattgacagatgaccaactcataaaagagtttcttagtggttcttactgctttcgtgggggtgtcggttggtggaaatatgaattctgctatggcaaacatgtacatcaataccatgaggacaaggatagtgggaaaacctctgtggttgtcgggacatggaaccaagaagagcatattgaatgggctaagaagaatactgctagagcttatcatcttcaagacgatggtacccagacagtcaggtgcaaagaatcagattcacctcatgctgttactgtatatatgctagagcctcactcctgtcaatatattcttggggttgaatctccagtgatctgtaaaatcttagatacagcagatgaaaatggacttctttctctccccaactaaaggatattaaagttaggggaaagaaaagatcattgaaagtcatgataatttctgtcccactgtgtctcattatagagttctcagccattggacctcttctaaaggatggtataaaatgactctcaaccactttgtgaatacatatgtgtatataagaggttattgataaacttctgaggcagacatttgtctcgctttttttcatttttgttgtgtcttataaactgactgtttttctttgcttggatact

SEQ ID NO: 129745 - DNA, 5376 bp, Homo sapiens
  Payload ID: 5377
  Gene Symbol: ERMP1
  Gene Name: endoplasmic reticulum metallopeptidase 1
  Uniprot ID: Q7Z2K6
  ENST ID: ENST00000339450
  CDS Start-End: 91-2805
aggaggcgctgcggcagcgacggcggcgtcggcggcggccggggctgtcgcgggttggggcggttgggctggcagctgaggctcgtggccatggagtggggttctgagtcggctgctgtgaggcggcaccgcgtcggagtagagcgtcgagagggagcggcggccgcgccaccgccggagagggaggcccgagcgcaggagcctctggtggatgggtgcagcggcggcgggaggacgcggaagaggagccccgggggtagcggcggcgcgagcaggggcgcggggaccgggctgtctgaggtgcgcgccgcgctggggctcgcgctctacctgatcgcgctgcggacgctggtgcagctctcgctgcagcagctcgtgctacgcggggccgctggacaccgcggggagttcgacgcgctccaagccagggattatcttgaacacataacctccattggccccaggactacaggaagtccagaaaatgaaattctgaccgtgcactaccttttggaacagattaaactgattgaagtgcaaagcaacagccttcataagatttcagtagatgtacaacggcccacaggctcttttagcattgatttcttgggaggttttacaagctattatgacaacatcaccaatgttgtggtaaagctggaacccagagatggagcccagcatgctgtcttggctaattgtcattttgactcagtagcaaactcaccaggtgccagtgatgatgcagttagctgctcagtgatgctggaagtccttcgcgtcttgtcaacatcttcagaagccttgcatcatgctgtcatatttctctttaatggtgctgaggaaaatgtcttgcaagccagtcatggtttcattactcagcacccctgggctagcttgattcgtgcattcattaacctagaggcagcaggtgtaggagggaaagaacttgtattccaaacaggtcctgaaaatccttggttggttcaagcttatgtttcagcagctaaacacccttttgcttctgtggtggctcaggaggtttttcagagtggaatcattccttcagatactgactttcgtatctacagggattttgggaacattccaggaatagacttagcttttattgagaatggatacatttatcacaccaagtatgacacagcggacagaattctaacagattccattcagagagcaggtgacaacattttagcagttcttaagcatctagctacatctgatatgctggctgctgcttctaagtatcgacatggaaacatggtcttctttgatgtgctgggcctgtttgtcattgcctacccctctcgtattggctcaatcataaactacatggtggtaatgggtgttgttttgtacctgggcaaaaaatttttgcagcccaaacataagactggtaactacaagaaggacttcttgtgtggacttggcatcactttgatcagctggttcactagccttgttaccgttctcattatagcagtgttcatctctcttattggacagtctctctcatggtataaccacttctatgtctccgtttgtctgtatggaactgcaactgtagccaaaataatacttatacatactcttgcgaaaagattttattacatgaatgccagtgcccagtatctgggagaagtattttttgacatttcgctgtttgtccattgctgttttcttgttaccctcacttaccaaggactttgctcggcgtttattagtgctgtctgggtagcattcccattgctcacaaagctctgtgtgcataaggacttcaagcagcatggtgcccaaggaaaatttattgctttttaccttttggggatgtttattccttatctttatgcattgtacctcatctgggcagtatttgagatgtttacccctatcctcgggagaagtggttctgaaatcccacctgatgttgtgctggcatccattttggctggctgtacaatgattctctcgtcctattttattaacttcatctaccttgccaagagcacaaaaaaaaccatgctaactttaactttggtatgtgcaattacattcctccttgtttgcagtggaacattttttccatatagctccaatcctgctaatccgaagccaaagagagtgtttcttcagcatatgactagaacattccatgacttggaaggaaatgcagttaaacgggactctggaatatggatcaatgggtttgattatactggaatttctcacataacccctcacattcctgagatcaatgatagtatccgagctcactgtgaggagaatgcacctctttgtggttttccttggtatcttccagtgcactttctgatcaggaaaaactggtatcttcctgccccagaagtttctccaagaaatcctcctcatttccgactcatatccaaagaacagacaccttgggattctataaaattgacttttgaagcaacaggaccaagccatatgtccttctatgttcgagcccacaaagggtcaacactttctcagtggtctcttggcaatggcaccccagtcacaagtaaaggaggagactactttgtcttttactcccatggactccaggcctctgcatggcagttctggatagaagtgcaggtttcagaagaacatcctgaaggaatggtcaccgtggccattgctgcccactatctgtctggggaagacaagagatcccctcaactggatgctctgaaggaaaagttcccagattggacatttccctctgcctgggtgtgcacctacgatctctttgtattttaatcttgtggatgagctctaagtacatgcccagtggatactccatgtgacatggtttctccctatgttacgtggatgtttgtaacgtaagtcaatgaattttaatgatcatatgttcaaagagctttctgggttaacgcttttcagggccaagcactataagggtttagctgtggcgcagtgatgcatggcctgttgacacttgaaaatgccagtcttttggcacttcagcacatgtgggtactgccactacacacacgtcattttatatgaccttaaggacaaagccaacaatccacttcaatagctgcccctttaggatcaagaaagatgtacactgtcagagcattgttaatgagacaaaagttgtttccaatttaagccccaaaaccatttgttgtattagtggatggtgggtaaaatatcattcactgaggtaatgattccccttgagaatataactctgtgtaggtcactggaaagtgattgccatagggctgggagagaagcattgcactcttgaggctgtagcctgtgtcaagctgtttcttcaggcagcctctcaaatgtgctttgtctctctgtgctgaggcctggaccctgtgctgagctggtgactcactgtcctgacaagtggacacacagatgcactgctgtgctgctttcctgaggtggttttctatgcctgttttcctctgaaacatgtctgttacccctctccatcttaccaagttgaaaaggggaatatttggccacatacccctctggttttcgtaggttcttttggttcagaatattgtttgtgccagtacatgaccttaacttccttcctcagagcactgagctgccatctgggctattctggggtagaaggaaggctgggagtggtgggaattttataaatatttattctcttttctttgtttcataggagtcttgtgttatacaaggttagtccttcatggtataatcttactgatgcactgggcctatctttttgttttccagccagttgaatagattagtttttctcagtaacttactatccagcagactggctttcctgagacttgaggttgtggcttatactggaatgagaccactgtacgtgtaggtggttcagatcctgcgtaatggcagcatgaggacttaaaaggtggttttcattttgaagatggctatgtagcttgtaaggtgtatcacagcagtacctctcatggctttttggttccagcagtgagggcattggtgagatcaatggtaaactgtgcaagctttctttttatcattaggaaatgtgaaacgttggacaaattttgagttttaacaaggacaaaaagttgaaagaaaaggcacagttaacaaaaaagggtggctagatttatcttgggtgatggaggaaatgagagaggaatgctcttgaaaggtggtctgtggatctgtctgaatagaaagagcacagtaagtatgcattgccggagaaaacgtccttgaagctgcttgtctcatgtgtatgatgtgctttttaaatcatgcccctcgttgcctgcctaatctgtgactccctaaaaactaactgggcccatgtagatggggctgcaaccagagctgaataacatgttaggctcacacatgcatcagcactgcacactggaatcattgctcttcctggactttgtagaaatcagtctcaagtgcttcaagagtctggctcctgctacttttatctgtcaggtagcacataaggtttgcagggtttatattttgtatagaatcacagttgtggagaaaaagtaataatttctcaatgaattttaaaaatgggcctattttctatccccgtggttcatctgatataattagtgttccctgtgaattccccccctctatgggaaggatgcctttactctttatcagtaataaattatgactgttttcatattgccttagggttatttccctgtgtaaaccattgtcttttgttttggttttctttagcattatgaagctttggtattgtacaaggtcagtagtaagatgctcactagtctcagggcttgtgtaatattctgggaggtcatttaaatgccagaaatggtcaagcaattatacacagtatttatgactctgttaagcataccgtttgtctgtcacattagtagattctgagattaaaaaaaatttttaaagagtgatcatttaaataatttctaaaagggtcttttcaagctctaacaaagtcactaacaaatgcattattttctacagaattagatgttagtagtacagtactgcatattcagggaaaaagtgtgaggaattgatttcaaaatagttcgttcttgtgtttgacctaagaatgattgtcgcatgaagtgtttgtttttacagtttagcatatataaacaaacatgataggattccttaagatgttaccacccagggggccacaagccagcctgctgtctcaggaagctgtagaaggagtgtttgtcaatttcttgtcactggtttgctgacttactgaggattaattgttgccttacaatgttactgaaataaactgtttaatat

SEQ ID NO: 129746 - DNA, 3554 bp, Homo sapiens
  Payload ID: 5377
  Gene Symbol: ERMP1
  Gene Name: endoplasmic reticulum metallopeptidase 1
  Uniprot ID: Q7Z2K6
  ENST ID: ENST00000462592
  CDS Start-End: 44-2758
tcgcgggttggggcggttgggctggcagctgaggctcgtggccatggagtggggttctgagtcggctgctgtgaggcggcaccgcgtcggagtagagcgtcgagagggagcggcggccgcgccaccgccggagagggaggcccgagcgcaggagcctctggtggatgggtgcagcggcggcgggaggacgcggaagaggagccccgggggtagcggcggcgcgagcaggggcgcggggaccgggctgtctgaggtgcgcgccgcgctggggctcgcgctctacctgatcgcgctgcggacgctggtgcagctctcgctgcagcagctcgtgctacgcggggccgctggacaccgcggggagttcgacgcgctccaagccagggattatcttgaacacataacctccattggccccaggactacaggaagtccagaaaatgaaattctgaccgtgcactaccttttggaacagattaaactgattgaagtgcaaagcaacagccttcataagatttcagtagatgtacaacggcccacaggctcttttagcattgatttcttgggaggttttacaagctattatgacaacatcaccaatgttgtggtaaagctggaacccagagatggagcccagcatgctgtcttggctaattgtcattttgactcagtagcaaactcaccaggtgccagtgatgatgcagttagctgctcagtgatgctggaagtccttcgcgtcttgtcaacatcttcagaagccttgcatcatgctgtcatatttctctttaatggtgctgaggaaaatgtcttgcaagccagtcatggtttcattactcagcacccctgggctagcttgattcgtgcattcattaacctagaggcagcaggtgtaggagggaaagaacttgtattccaaacaggtcctgaaaatccttggttggttcaagcttatgtttcagcagctaaacacccttttgcttctgtggtggctcaggaggtttttcagagtggaatcattccttcagatactgactttcgtatctacagggattttgggaacattccaggaatagacttagcttttattgagaatggatacatttatcacaccaagtatgacacagcggacagaattctaacagattccattcagagagcaggtgacaacattttagcagttcttaagcatctagctacatctgatatgctggctgctgcttctaagtatcgacatggaaacatggtcttctttgatgtgctgggcctgtttgtcattgcctacccctctcgtattggctcaatcataaactacatggtggtaatgggtgttgttttgtacctgggcaaaaaatttttgcagcccaaacataagactggtaactacaagaaggacttcttgtgtggacttggcatcactttgatcagctggttcactagccttgttaccgttctcattatagcagtgttcatctctcttattggacagtctctctcatggtataaccacttctatgtctccgtttgtctgtatggaactgcaactgtagccaaaataatacttatacatactcttgcgaaaagattttattacatgaatgccagtgcccagtatctgggagaagtattttttgacatttcgctgtttgtccattgctgttttcttgttaccctcacttaccaaggactttgctcggcgtttattagtgctgtctgggtagcattcccattgctcacaaagctctgtgtgcataaggacttcaagcagcatggtgcccaaggaaaatttattgctttttaccttttggggatgtttattccttatctttatgcattgtacctcatctgggcagtatttgagatgtttacccctatcctcgggagaagtggttctgaaatcccacctgatgttgtgctggcatccattttggctggctgtacaatgattctctcgtcctattttattaacttcatctaccttgccaagagcacaaaaaaaaccatgctaactttaactttggtatgtgcaattacattcctccttgtttgcagtggaacattttttccatatagctccaatcctgctaatccgaagccaaagagagtgtttcttcagcatatgactagaacattccatgacttggaaggaaatgcagttaaacgggactctggaatatggatcaatgggtttgattatactggaatttctcacataacccctcacattcctgagatcaatgatagtatccgagctcactgtgaggagaatgcacctctttgtggttttccttggtatcttccagtgcactttctgatcaggaaaaactggtatcttcctgccccagaagtttctccaagaaatcctcctcatttccgactcatatccaaagaacagacaccttgggattctataaaattgacttttgaagcaacaggaccaagccatatgtccttctatgttcgagcccacaaagggtcaacactttctcagtggtctcttggcaatggcaccccagtcacaagtaaaggaggagactactttgtcttttactcccatggactccaggcctctgcatggcagttctggatagaagtgcaggtttcagaagaacatcctgaaggaatggtcaccgtggccattgctgcccactatctgtctggggaagacaagagatcccctcaactggatgctctgaaggaaaagttcccagattggacatttccctctgcctgggtgtgcacctacgatctctttgtattttaatcttgtggatgagctctaagtacatgcccagtggatactccatgtgacatggtttctccctatgttacgtggatgtttgtaacagggaccagatggcatacttagtgttttctgtaaactgaatttactggcaggaacattttcagctgactgggataaactgatgcttcgattcctgaagaactcaaatccaccacttgaactgggttcctaggattacacaccatatgcagtaccattagagaaagatgctacgtgggtgtatggcctagagaagatgtgtaacttttgcaactaacctgagctgtgggtgtggatggaggtgtctcagattctccagagccaatggctttaagaaatcgaatcatgtgtcgacaaaggtcccacttgccttgttctagtgctgtgttgaatagaagggtagcatgttgcctacttactgcagggacttccatattctacaaaaaacaaccaggacagcattctttttatactacacaatttgggaagatatgagcaattctttatctcgttttctaaactcaaagaatgtagccacaccaccacaggggttagtttaataataagattaaaaagtaccatacaaggaaaagcgaggcaagtactcttctggtgtatgtaaactataatttattaaactcctactacatgccagatagcatacatatactttaagtcatttcatttatttctcccagtgactctgcagataggcatatcatttgtattttacaagtgaggaaactgagttaagtaaattgttgaagatcagcag

SEQ ID NO: 129747 - DNA, 3293 bp, Homo sapiens
  Payload ID: 5377
  Gene Symbol: ERMP1
  Gene Name: endoplasmic reticulum metallopeptidase 1
  ENST ID: ENST00000489219
  CDS Start-End: 29-2554
gttgggctggcagctgaggctcgtggccatggagtggggttctgagtcggctgctgtgaggcggcaccgcgtcggagtagagcgtcgagagggagcggcggccgcgccaccgccggagagggaggcccgagcgcaggagcctctggtggatgggtgcagcggcggcgggaggacgcggaagaggagccccgggggtagcggcggcgcgagcaggggcgcggggaccgggctgtctgaggtgcgcgccgcgctggggctcgcgctctacctgatcgcgctgcggacgctggtgcagctctcgctgcagcagctcgtgctacgcggggccgctggacaccgcggggagttcgacgcgctccaagccagggattatcttgaacacataacctccattggccccaggactacaggaagtccagaaaatgaaattctgaccgtgcactaccttttggaacagattaaactgattgaagtgcaaagcaacagccttcataagatttcagtagatgtacaacggcccacaggctcttttagcattgatttcttgggaggttttacaagctattatgacaacatcaccaatgttgtggtaaagctggaacccagagatggagcccagcatgctgtcttggctaattgtcattttgactcagtagcaaactcaccaggtgccagtgatgatgcagttagctgctcagtgatgctggaagtccttcgcgtcttgtcaacatcttcagaagccttgcatcatgctgtcatatttctctttaatggtgctgaggaaaatgtcttgcaagccagtcatggtttcattactcagcacccctgggctagcttgattcgtgcattcattaacctagaggcagcaggtgtaggagggaaagaacttgtattccaaacaggtcctgaaaatccttggttggttcaagcttatgtttcagcagctaaacacccttttgcttctgtggtggctcaggaggtttttcagagtggaatcattccttcagatactgactttcgtatctacagggattttgggaacattccaggaatagacttagcttttattgagaatggatacatttatcacaccaagtatgacacagcggacagaattctaacagattccattcagagagcaggtgacaacattttagcagttcttaagcatctagctacatctgatatgctggctgctgcttctaagtatcgacatggaaacatggtcttctttgatgtgctgggcctgtttgtcattgcctacccctctcgtattggctcaatcataaactacatggtggtaatgggtgttgttttgtacctgggcaaaaaatttttgcagcccaaacataagactggtaactacaagaaggacttcttgtgtggacttggcatcactttgatcagctggttcactagccttgttaccgttctcattatagcagtgttcatctctcttattggacagtctctctcatggtataaccacttctatgtctccgtttgtctgtatggaactgcaactgtagccaaaataatacttatacatactcttgcgaaaagattttattacatgaatgccagtgcccagtatctgggagaagtattttttgacatttcgctgtttgtccattgctgttttcttgttaccctcacttaccaaggactttgctcggcgtttattagtgctgtctgggtagcattcccattgctcacaaagctctgtgtgcataaggacttcaagcagcatggtgcccaaggaaaatttattgctttttaccttttggggatgtttattccttatctttatgcattgtacctcatctgggcagtatttgagatgtttacccctatcctcgggagaagtggttctgaaatcccacctgatgttgtgctggcatccattttggctggctgtacaatgattctctcgtcctattttattaacttcatctaccttgccaagagcacaaaaaaaaccatgctaactttaactttggtatgtgcaattacattcctccttgtttgcagtggaacattttttccatatagctccaatcctgctaatccgaagccaaagagagtgtttcttcagcatatgactagaacattccatgacttggaaggaaatgcagttaaacgggactctggaatatggatcaatgggtttgattatactggaatttctcacataacccctcacattcctgagatcaatgatagtatccgagctcactgtgaggagaatgcacctctttgtggttttccttggtatcttccagtgcactttctgatcaggaaaaactggtatcttcctgccccagaagtttctccaagaaatcctcctcatttccgactcatatccaaagaacagacaccttgggattctataaaattgacttttgaagcaacagcctgcctgcctatccttcagattttggacttgccagcctcaacaatcatgaccaagccatatgtccttctatgttcgagcccacaaagggtcaacactttctcagtggtctcttggcaatggcaccccagtcacaagtaaaggaggagactactttgtcttttactcccatggactccaggcctctgcatggcagttctggatagaagtgcaggtttcagaagaacatcctgaaggaatggtcaccgtggccattgctgcccactatctgtctggggaagacaagagatcccctcaactggatgctctgaaggaaaagttcccagattggacatttccctctgcctgggtgtgcacctacgatctctttgtattttaatcttgtggatgagctctaagtacatgcccagtggatactccatgtgacatggtttctccctatgttacgtggatgtttgtaacgtaagtcaatgaattttaatgatcatatgttcaaagagctttctgggttaacgcttttcagggccaagcactataagggtttagctgtggcgcagtgatgcatggcctgttgacacttgaaaatgccagtcttttggcacttcagcacatgtgggtactgccactacacacacgtcattttatatgaccttaaggacaaagccaacaatccacttcaatagctgcccctttaggatcaagaaagatgtacactgtcagagcattgttaatgagacaaaagttgtttccaatttaagccccaaaaccatttgttgtattagtggatggtgggtaaaatatcattcactgaggtaatgattccccttgagaatataactctgtgtaggtcactggaaagtgattgccatagggctgggag

SEQ ID NO: 129748 - DNA, 2799 bp, Homo sapiens
  Payload ID: 5377
  Gene Symbol: ERMP1
  Gene Name: endoplasmic reticulum metallopeptidase 1
  ENST ID: ENST00000487088
  CDS Start-End: 839-1894
cggccgcgccaccgccggagagggaggcccgagcgcaggagcctctggtggatgggtgcagcggcggcgggaggacgcggaagaggagccccgggggtagcggcggcgcgagcaggggcgcggggaccgggctgtctgaggtgcgcgccgcgctggggctcgcgctctacctgatcgcgctgcggacgctggtgcagctctcgctgcagcagctcgtgctacgcggggccgctggacaccgcggggagttcgacgcgctccaagccaggtaccggccgctccctcctggcacggcccgcgcgtccgtttgcggctcctgcgcaggctccggggcaccgcacctgtgtgcacccgcccctgccggaccgctgggactcgctgacccctcccaggctgcacgtggggtggggtgaccttgcttgtccttcttctggggtctgaattgccgggacttggggcttgcctgtccccggttaagctcgtggtgcagattggggttgccagggattatcttgaacacataacctccattggccccaggactacaggaagtccagaaaatgaaattctgaccgtgcactaccttttggaacagattaaactgattgaagtgcaaagcaacagccttcataagatttcagtagatgtacaacggcccacaggctcttttagcattgatttcttgggaggttttacaagctattatgacaacatcaccaatgttgtggtaaagctggaacccagagatggagcccagcatgctgtcttggctaattgtcattttgactcagtagcaaactcaccaggtgccagtgatgatgcagttagctgctcagtgatgctggaagtccttcgcgtcttgtcaacatcttcagaagccttgcatcatgctgtcatatttctctttaatggtgctgaggaaaatgtcttgcaagccagtcatggtttcattactcagcacccctgggctagcttgattcgtgcattcattaacctagaggcagcaggtgtaggagggaaagaacttgtattccaaacaggtcctgaaaatccttggttggttcaagcttatgtttcagcagctaaacacccttttgcttctgtggtggctcaggaggtttttcagagtggaatcattccttcagatactgactttcgtatctacagggattttgggaacattccaggaatagacttagcttttattgagaatggatacatttatcacaccaagtatgacacagcggacagaattctaacagattccattcagagagcaggtgacaacattttagcagttcttaagcatctagctacatctgatatgctggctgctgcttctaagtatcgacatggaaacatggtcttctttgatgtgctgggcctgtttgtcattgcctacccctctcgtattggctcaatcataaactacatggtggtaatgggtgttgttttgtacctgggcaaaaaatttttgcagcccaaacataagactggtaactacaagaaggacttcttgtgtggacttggcatcactttgatcagctggttcactagccttgttaccgttctcattatagcagtgttcatctctcttattggacagtctctctcatggtataaccacttctatgtctccgtttgtctgtatggaactgcaactgtagccaaaataatacttatacatactcttgcgaaaagattttattacatgaatgccagtgcccagtatctgggagaagtattttttgacatttcgctgtttgtccattgctgttttcttgttaccctcacttaccaaggactttgctcggcgtttattagtgctgtctgggtagcattcccattgctcacaaagctctgtgtgcataaggacttcaagcagcatgattaacttcatctaccttgccaagagcacaaaaaaaaccatgctaactttaactttggtatgtgcaattacattcctccttgtttgcagtggaacattttttccatatagctccaatcctgctaatccgaagccaaagagagtgtttcttcagcatatgactagaacattccatgacttggaaggaaatgcagttaaacgggactctggaatatggatcaatgggtttgattatactggaatttctcacataacccctcacattcctgagatcaatgatagtatccgagctcactgtgaggagaatgcacctctttgtggttttccttggtatcttccagtgcactttctgatcaggaaaaactggtatcttcctgccccagaagtttctccaagaaatcctcctcatttccgactcatatccaaagaacagacaccttgggattctataaaattgacttttgaagcaacaggaccaagccatatgtccttctatgttcgagcccacaaagggtcaacactttctcagtggtctcttggcaatggcaccccagtcacaagtaaaggaggagactactttgtcttttactcccatggactccaggcctctgcatggcagttctggatagaagtgcaggtttcagaagaacatcctgaaggaatggtcaccgtggccattgctgcccactatctgtctggggaagacaagagatcccctcaactggatgctctgaaggaaaagttcccagattggacatttccctctgcctgggtgtgcacctacgatctctttgtattttaatcttgtggatgagctctaagtacatgcccagtggatactccatgtgacatggtttctccctatgttacgtggatgtttgtaacgtaagtcaatgaattttaatgatcat

SEQ ID NO: 129749 - DNA, 5285 bp, Homo sapiens
  Payload ID: 5378
  Gene Symbol: ERO1A
  Gene Name: endoplasmic reticulum oxidoreductase alpha
  Uniprot ID: Q96HE7
  ENST ID: ENST00000395686
  CDS Start-End: 225-1631
cgaggccccgggctgccggcgcgggcgccgcggcacgtccacaggctgggtcgcgaggtggcgatcgctgagaggcaggagggccgaggcgggcctgggaggcggcccggaggtggggcgccgctggggccggcccgcacgggcttcatctgagggcgcacggcccgcgaccgagcgtgcggactggcctcccaagcgtggggcgacaagctgccggagctgcaatgggccgcggctggggattcttgtttggcctcctgggcgccgtgtggctgctcagctcgggccacggagaggagcagcccccggagacagcggcacagaggtgcttctgccaggttagtggttacttggatgattgtacctgtgatgttgaaaccattgatagatttaataactacaggcttttcccaagactacaaaaacttcttgaaagtgactactttaggtattacaaggtaaacctgaagaggccgtgtcctttctggaatgacatcagccagtgtggaagaagggactgtgctgtcaaaccatgtcaatctgatgaagttcctgatggaattaaatctgcgagctacaagtattctgaagaagccaataatctcattgaagaatgtgaacaagctgaacgacttggagcagtggatgaatctctgagtgaggaaacacagaaggctgttcttcagtggaccaagcatgatgattcttcagataacttctgtgaagctgatgacattcagtcccctgaagctgaatatgtagatttgcttcttaatcctgagcgctacactggttacaagggaccagatgcttggaaaatatggaatgtcatctacgaagaaaactgttttaagccacagacaattaaaagacctttaaatcctttggcttctggtcaagggacaagtgaagagaacactttttacagttggctagaaggtctctgtgtagaaaaaagagcattctacagacttatatctggcctacatgcaagcattaatgtgcatttgagtgcaagatatcttttacaagagacctggttagaaaagaaatggggacacaacattacagaatttcaacagcgatttgatggaattttgactgaaggagaaggtccaagaaggcttaagaacttgtattttctctacttaatagaactaagggctttatccaaagtgttaccattcttcgagcgcccagattttcaactctttactggaaataaaattcaggatgaggaaaacaaaatgttacttctggaaatacttcatgaaatcaagtcatttcctttgcattttgatgagaattcattttttgctggggataaaaaagaagcacacaaactaaaggaggactttcgactgcattttagaaatatttcaagaattatggattgtgttggttgttttaaatgtcgtctgtggggaaagcttcagactcagggtttgggcactgctctgaagatcttattttctgagaaattgatagcaaatatgccagaaagtggacctagttatgaattccatctaaccagacaagaaatagtatcattattcaacgcatttggaagaatttctacaagtgtgaaagaattagaaaacttcaggaacttgttacagaatattcattaaagaaaacaagctgatatgtgcctgtttctggacaatggaggcgaaagagtggaatttcattcaaaggcataatagcaatgacagtcttaagccaaacattttatataaagttgcttttgtaaaggagaattatattgttttaagtaaacacatttttaaaaattgtgttaagtctatgtataatactactgtgagtaaaagtaatactttaataatgtggtacaaattttaaagtttaatattgaataaaaggaggattatcaaattcatatatgataaaagtgaatgttctaagtctctcaaactagcgttttatgtaataatatgtaatataaataaaactatggtaaatgtgacaagcatttaataggaaaatgctaaggaggcctcataaatgacccataattaccaacgtagaatttttcagtacatttagggttgctggatttagcaaataaaaataaagattgcccagttagatttgaatttcagataaacaattagttttttaatattttacatggaatatttggaaaatacttatactaaaaaattatttgtttgaaattcaaatttaactgggagtcttgtattttatctggcaatcctaaaatacattggtatgaaacaaatcacttttagaagtatattgctattttgattgggttgtttttgtgtgtagaaacgtacaataacaactcaaaggcacaggagatttctaaacattgtgaaaagttgaatagattatatatttattctcataatactttcactaatactaaataaaatttggggaacactttttatttttatataatttccaatttacagaaaagtttcaaaaatagtacaaagagctctcttacccagattcactaattgttcatacgtgctttatctttcatgctttctctgtacacacacacacacacacaaatttttcctcaatcatttgaaagtcagttataggcatcatgccccttaaaccctaaatacttcagtgtgtaatactgaataattactaaaaatgattttctcagaaaaaaaaactcccacaattctggaactataatactgtaagccttagaataaataatactttcaagttccaatctaaagttctttttgagttttgttgcccgttttatgcttgatgtgtatagtaatagggtaggctatttattttattaaaattttttttagagacaaggttttgctgtgttgcccaagctggaacttgaacgactgggctgaagtgatcttcccacctcagcctcccaagtagctgggaatacaggtgtctgccaccatacccagtttcatttttgttttttatacccgaagttcatttcctttgtctccctaaaactgaactgtaattttgggaggttttcattagtggaagctcttcatttataaagctatttgaaggggtttaggaatttatatcacatggtaattgtagagaaaaagaagctatatacctcaaaatcgtgccctctttacatatgtcttatcaggtataacatgttgaaatgtcacattagtagtaaagtggggtttatttatatagtggttaagaaatgtcagtttacactgctgtatacttcttcttctgtgtccctaaggcctggtacagtgccaagcacatacttggtatccaataaatatttgttggatgaatgtatgcatatgtattcagtatattttaaatgaataatcacagaagtaagtttaataatttgtcctatttttctctgtcacttcctttttctctaaggcaggaaaggaaagacattaaaccattaattaagtcaatcctcttggagactcaaaagactatgaagtgatcactctatataaaatataaatacagtgtgggttcaaatggccattttttgtgtgtccctctctctcatcttatgcttcccttcctttttttatttttattttttggagacggagtcttgctgtgtcgcccaggttggagtgcagtggcgtgatcttagctcactgcaagctctgccttccaggttcacgccattcttctgcctcagccccctgagtagctgggactacaggcgcccgccaccacgcccggctaatttttttttttttttttttgtatttttagtagaggcagtgtttcaccgtgttagccaggatggtcttgatctcctgacctcgtgatccacccacctcgacctcccaaagtgctgggattacaggcgtgagccaccacgcccggcctcttttttttttagctgccaatctttttgaaggaatattcttacctctactttgtcaccttctactggctccttaactaaaatctgccatttggctctctggttaacagtcccttcctgtaaagtctaaaatcttaattctaaatccacagtttaattcacaagctagtacttgactttttttctgtatttgacatttttgacaacccctactttaaagatttattcccttgacttcttacattttgctcactcctgaaccaccccccaccttttggcctcttcatttattccttaaatgttattcctcagacctccattttttttttctctcttaatcacaacaccacttctcacgcttgggtaattttaattcagcagttcctaaatccttatctttagccagactcctcaatccatctgcctgttgcacttttcttggttgtcccagagacacctgtgtgtgtcttaaaacattcattctctgcaaaacctactctaatgcctgtgtcccttactttggttaattttagaaccattatattctaagttttctaggctcattcctctcctccaccttcccctatcatttagtgtctaagttttactgattttatctccacctctctgatacatcactctttcatcttcattgctattattaataaatacctacagtactaacctgcctcctatacctagctggtctcctctctgttgctcaatgttaccacagcaggctttctagaagcactctgacagtgttactccctaatatccttcagtgacttcaggaactttcaggagaaagccaaactcctctgtttggtgtacaaggtcttctgatgtgtttcctccaccgaatgttctggtgaaacagacttacacttcttcagaagccacatttggccaggcctcccgccttggtaaatgctgtactctttgcatcaagtatgctagtcatccttccccacttggaaaattcctatgcatcttgcaggcctgacataagcatttcctctgtgaaacctcctttgctccactcaaggagagtcatctaacttccactttcgtgtcaccactgtaattacaacctacctctattgtatgtcacttaaatcgtactgtattgttttatttttcaaaagtctttactagaatgtgagctccttaagggcaggaaaaggaacctttttattttttgcatctccatagcatagtttttggcatatgaatgtttaataaatgtttgttgaataaattgattttaaagtgacatctttattatattagaggtcctacctatattccaaatactttcactcccttcactttacagcaagggtcagtagagtcccaaggatttgtagactttagggggtcaataaagctgaaattgtattca

SEQ ID NO: 129750 - DNA, 951 bp, Homo sapiens
  Payload ID: 5378
  Gene Symbol: ERO1A
  Gene Name: endoplasmic reticulum oxidoreductase alpha
  ENST ID: ENST00000556358
  CDS Start-End: 727-951
ttttttctagtttaaaaagcatgtaatgaatccttagttttcatggcatgaattgttatcaaggctaggtattttcccattcttgactgatttactatttaaattctgtattttgacctcctgtaaaacactttaaccagaacgttatgagactgggtcaacctaaggcaatgctaaagccttttaaagaccaagcagcaggctggtacttaactgaatccataacctttcttcttcctttcgagaaattgcaattaagacttggaccgttaggttaaataatctttacattgttgtttggcacaaatttgctataatgctttaaaacttttgaaaaacttgtattttggcatttttctattcttatgacttatttttcttttgatttcagagaacactttttacagttggctagaaggtctctgtgtagaaaaaagagcattctacagacttatatctggcctacatgcaagcattaatgtgcatttgagtgcaagatatcttttacaagagacctggttagaaaagaaatggggacacaacattacagaatttcaacagcgatttgatggaattttgactgaaggagaaggtccaagaaggcttaagaacttgtattttctctacttaatagaactaagggctttatccaaagtgttaccattcttcgagcgcccagattttcaactctttactggaaataaaattcaggatgaggaaaacaaaatgttacttctggaaatacttcatgaaatcaagtcatttcctttgcattttgatgagaattcattttttgctggggataaaaaagaagcacacaaactaaaggaggactttcgactgcattttagaaatatttcaagaattatggattgtgttggttgttttaaatgtcgtctgtggggaaagcttcagactcagggtttgggcactgctctgaagatcttattt

SEQ ID NO: 129751 - DNA, 2094 bp, Homo sapiens
  Payload ID: 5378
  Gene Symbol: ERO1A
  Gene Name: endoplasmic reticulum oxidoreductase alpha
  ENST ID: ENST00000554019
  CDS Start-End: 408-1181
tgggaactggaaggacccccgactcccgcgcagggtctggggttgtgcgcgtcgggttgcgtctccaggccgggggcgtcagggagccgggggcggggacgggcgcgggcgcagcggaccgggcggggccgagccgggaagctggtcggtgcgtcagcctcacgcggcgggaaggaaccggtccgaggccccgggctgccggcgcgggcgccgcggcacgtccacaggctgggtcgcgaggtggcgatcgctgagaggcaggagggccgaggcgggcctgggaggcggcccggaggtggggcgccgctggggccggcccgcacgggcttcatctgagggcgcacggcccgcgaccgagcgtgcggactggcctcccaagcgtggggcgacaagctgccggagctgcaatgggccgcggctggggattcttgtttggcctcctgggcgccgtgtggctgctcagctcgggccacggagaggagcagcccccggagacagcggcacagaggtgcttctgccaggttagtggttacttggatgattgtacctgtgatgttgaaaccattgatagatttaataactacaggcttttcccaagactacaaaaacttcttgaaagtgactactttaggtattacaaggtaaacctgaagaggccgtgtcctttctggaatgacatcagccagtgtggaagaagggactgtgctgtcaaaccatgtcaatctgatgaagttcctgatggaattaaatctgcgagctacaagtattctgaagaagccaataatctcattgaagaatgtgaacaagctgaacgacttggagcagtggatgaatctctgagtgaggaaacacagaaggctgttcttcagtggaccaagcatgatgattcttcagataacttctgtgaagctgatgacattcagtcccctgaagctgaatatgtagatttgcttcttaatcctgagcgctacactggttacaagggaccagatgcttggaaaatatggaatgtcatctacgaagaaaactgttttaagccacagacaattaaaagacctttaaatcctttggcttctggtcaaggtaaattacttatttgcgtttcactgctttttcttaggtctctgtgtagaaaaaagagcattctacagacttatatctggcctacatgcaagcattaatgtgcatttgagtgcaagatatcttttacaagagacctggttagaaaagaaatggggacacaacattacagaatttcaacagcgatttgatggaattttgactgaaggagaaggtccaagaaggcttaagaacttgtattttctctacttaatagaactaagggctttatccaaagtgttaccattcttcgagcgcccagattttcaactctttactggaaataaaattcaggatgaggaaaacaaaatgttacttctggaaatacttcatgaaatcaagtcatttcctttgcattttgatgagaattcattttttgctggggataaaaaagaagcacacaaactaaaggaggactttcgactgcattttagaaatatttcaagaattatggattgtgttggttgttttaaatgtcgtctgtggggaaagcttcagactcagggtttgggcactgctctgaagatcttattttctgagaaattgatagcaaatatgccagaaagtggacctagttatgaattccatctaaccagacaagaaatagtatcattattcaacgcatttggaagaatttctacaagtgtgaaagaattagaaaacttcaggaacttgttacagaatattcattaaagaaaacaagctgatatgtgcctgtttctggacaatggaggcgaaagagtggaatttcattcaaaggcataatagcaatgacagtcttaagccaaacattttatataaagttgcttttgtaaaggagaattatattgttttaagtaaacacatttttaaaaattgtgttaagtctatgtataatactactgtgagtaaaagtaatactttaataatgtggtacaaattttaaagtttaatattgaataaaaggaggattatcaaattcatatatgataaaag

SEQ ID NO: 129752 - DNA, 1855 bp, Homo sapiens
  Payload ID: 5378
  Gene Symbol: ERO1A
  Gene Name: endoplasmic reticulum oxidoreductase alpha
  ENST ID: ENST00000556039
  CDS Start-End: 420-1193
tcgctctcgctctgggaactggaaggacccccgactcccgcgcagggtctggggttgtgcgcgtcgggttgcgtctccaggccgggggcgtcagggagccgggggcggggacgggcgcgggcgcagcggaccgggcggggccgagccgggaagctggtcggtgcgtcagcctcacgcggcgggaaggaaccggtccgaggccccgggctgccggcgcgggcgccgcggcacgtccacaggctgggtcgcgaggtggcgatcgctgagaggcaggagggccgaggcgggcctgggaggcggcccggaggtggggcgccgctggggccggcccgcacgggcttcatctgagggcgcacggcccgcgaccgagcgtgcggactggcctcccaagcgtggggcgacaagctgccggagctgcaatgggccgcggctggggattcttgtttggcctcctgggcgccgtgtggctgctcagctcgggccacggagaggagcagcccccggagacagcggcacagaggtgcttctgccaggttagtggttacttggatgattgtacctgtgatgttgaaaccattgatagatttaataactacaggcttttcccaagactacaaaaacttcttgaaagtgactactttaggtattacaaggtaaacctgaagaggccgtgtcctttctggaatgacatcagccagtgtggaagaagggactgtgctgtcaaaccatgtcaatctgatgaagttcctgatggaattaaatctgcgagctacaagtattctgaagaagccaataatctcattgaagaatgtgaacaagctgaacgacttggagcagtggatgaatctctgagtgaggaaacacagaaggctgttcttcagtggaccaagcatgatgattcttcagataacttctgtgaagctgatgacattcagtcccctgaagctgaatatgtagatttgcttcttaatcctgagcgctacactggttacaagggaccagatgcttggaaaatatggaatgtcatctacgaagaaaactgttttaagccacagacaattaaaagacctttaaatcctttggcttctggtcaaggtaaattacttatttgcgtttcactgctttttcttaggtctctgtgtagaaaaaagagcattctacagacttatatctggcctacatgcaagcattaatgtgcatttgagtgcaagatatcttttacaagagacctggttagaaaagaaatggggacacaacattacagaatttcaacagcgatttgatggaattttgactgaaggagaaggtccaagaaggcttaagaacttgtattttctctacttaatagaactaagggctttatccaaagtgttaccattcttcgagcgcccagattttcaactctttactggaaataaaattcaggatgaggaaaacaaaatgttacttctggaaatacttcatgaaatcaagtcatttcctttgcattttgatgagaattcattttttgctggggataaaaaagaagcacacaaactaaaggaggactttcgactgcattttagaaatatttcaagaattatggattgtgttggttgttttaaatgtcgtctgtggggaaagcttcagaatttctacaagtgtgaaagaattagaaaacttcaggaacttgttacagaatattcattaaagaaaacaagctgatatgtgcctgtttctggacaatggaggcgaaagagtggaatttcattcaaaggcataatagcaatgacagtcttaagccaaacattttatataaagttgcttttgtaaaggagaattatattgttttaagtaaacacatttttaaaaattg

SEQ ID NO: 129753 - DNA, 567 bp, Homo sapiens
  Payload ID: 5378
  Gene Symbol: ERO1A
  Gene Name: endoplasmic reticulum oxidoreductase alpha
  ENST ID: ENST00000556223
  CDS Start-End: 49-426
gtgcggactggcctcccaagcgtggggcgacaagctgccggagctgcaatgggccgcggctggggattcttgtttggcctcctgggcgccgtgtggctgctcagctcgggccacggagaggagcagcccccggagacagcggcacagaggtgcttctgccaggttagtggttacttggatgattgtacctgtgatgttgaaaccattgatagatttaataactacaggcttttcccaagactacaaaaacttcttgaaagtgactactttaggtattacaaggtaaacctgaagaggccgtgtcctttctggaatgacatcagccagtgtggaagaagggactgtgctgtcaaaccatgtcaatctgatgaagttcctgatggaattaaatctgcgagctacaaggtgtgtacgtatacctattgatgtgtccagtatcttaatgaaaaacttgaaaaacccatttccgttgtacctactatcccatttatctgcttccagtggtgaaaccccttgagagtattctgaagaagccaataatctcattgaagaatgtgaacaagctga

SEQ ID NO: 129754 - DNA, 555 bp, Homo sapiens
  Payload ID: 5378
  Gene Symbol: ERO1A
  Gene Name: endoplasmic reticulum oxidoreductase alpha
  ENST ID: ENST00000554251
  CDS Start-End: 49-555
gtgcggactggcctcccaagcgtggggcgacaagctgccggagctgcaatgggccgcggctggggattcttgtttggcctcctgggcgccgtgtggctgctcagctcgggccacggagaggagcagcccccggagacagcggcacagaggtgcttctgccaggtaaacctgaagaggccgtgtcctttctggaatgacatcagccagtgtggaagaagggactgtgctgtcaaaccatgtcaatctgatgaagttcctgatggaattaaatctgcgagctacaagtattctgaagaagccaataatctcattgaagaatgtgaacaagctgaacgacttggagcagtggatgaatctctgagtgaggaaacacagaaggctgttcttcagtggaccaagcatgatgattcttcagataacttctgtgaagctgatgacattcagtcccctgaagctgaatatgtagatttgcttcttaatcctgagcgctacactggttacaagggaccagatgcttggaaaatatggaatgtcatctacgaagaaaactgtttt

SEQ ID NO: 129755 - DNA, 998 bp, Homo sapiens
  Payload ID: 5378
  Gene Symbol: ERO1A
  Gene Name: endoplasmic reticulum oxidoreductase alpha
  ENST ID: ENST00000629528
  CDS Start-End: 225-998
cgaggccccgggctgccggcgcgggcgccgcggcacgtccacaggctgggtcgcgaggtggcgatcgctgagaggcaggagggccgaggcgggcctgggaggcggcccggaggtggggcgccgctggggccggcccgcacgggcttcatctgagggcgcacggcccgcgaccgagcgtgcggactggcctcccaagcgtggggcgacaagctgccggagctgcaatgggccgcggctggggattcttgtttggcctcctgggcgccgtgtggctgctcagctcgggccacggagaggagcagcccccggagacagcggcacagaggtgcttctgccaggttagtggttacttggatgattgtacctgtgatgttgaaaccattgatagatttaataactacaggcttttcccaagactacaaaaacttcttgaaagtgactactttaggtattacaaggtaaacctgaagaggccgtgtcctttctggaatgacatcagccagtgtggaagaagggactgtgctgtcaaaccatgtcaatctgatgaagttcctgatggaattaaatctgcgagctacaagtattctgaagaagccaataatctcattgaagaatgtgaacaagctgaacgacttggagcagtggatgaatctctgagtgaggaaacacagaaggctgttcttcagtggaccaagcatgatgattcttcagataacttctgtgaagctgatgacattcagtcccctgaagctgaatatgtagatttgcttcttaatcctgagcgctacactggttacaagggaccagatgcttggaaaatatggaatgtcatctacgaagaaaactgttttaagccacagacaattaaaagacctttaaatcctttggcttctggtcaaggtaaattacttatttgcgtttcactgctttttcttaggtctctgtgtagaaaaaagagcattctacagacttatatctggcctacatgcaagcattaa

SEQ ID NO: 129756 - DNA, 1177 bp, Homo sapiens
  Payload ID: 5379
  Gene Symbol: ERO1B
  Gene Name: endoplasmic reticulum oxidoreductase beta
  ENST ID: ENST00000264181
  CDS Start-End: 1-522
tggggacctaatattaaagaattcaaacaccgctttgaccctgtggaaaccaagggagaaggtccaagaaggctcaagaatctttactttttatacttgattgagcttcgagctttgtcaaaggtggctccatattttgagcgctcaattgtcgatctttacactggaaatgcagaagaagatgctgacacaaaaactcttctactgaatatctttcaagatacaaagtcctttcccatgcactttgatgagaaatccatgtttgcaggtgacaaaaaaggggccaagtcactaaaggaggaattccgattacatttcaagaatatctcccgtataatggactgtgttggatgtgacaaatgcagattatggggaaaattacagactcagggtttaggaactgccctgaagatattattctctgaaaaagaaatccaaaagcttccagagaatagtccatctaaaggcttccaactcacccgacaggaaatagttgctcttttaaatgcttttggaaggtaagaaccattatatgttgaagatttttgatttcccattgggtttcaacaaactgcaaagataatcttctttgctaaaagtagggtttgttttgttgacaaaaaaaaattttatattgtatctgtactaacttagagaggccttaatgctgacaagtcagtttctctacaggtcataggaaaaactaagtttccaattgccagtgtttttcagtttgctgccttaattttgtaagggagatattcttctaatattctttttgcttggctataacttgttcaactacaatagcaggagtaaggaatgtgtgattgagaaggtgataaaagaaaattaaaaccttcatctgctccttatttttcttaaattttcattactatttttttcttttctcacctttttcctgcactatgctctttatttctgaagctcagaggtcatttttctttcactcatttctacatgatttacttctgtatagagacatataatttgcttgcttgtttatatcaccagtggtttaaaaaataatttgaatttgccagcagagatacatgtaatgccaactgaggaatacagaacagaaggaaaagaatcacagaaaataatactatgcttccttggggaaaaagagaaaaaagtcaacttgaggaagaat

SEQ ID NO: 129757 - DNA, 4567 bp, Homo sapiens
  Payload ID: 5379
  Gene Symbol: ERO1B
  Gene Name: endoplasmic reticulum oxidoreductase beta
  Uniprot ID: Q86YB8
  ENST ID: ENST00000354619
  CDS Start-End: 203-1606
agtgggggcgctcgcctttcctgcctcactcgcagctgccgggtgttggggaaagagtcgcctgcctccggactggagtgcagacctctgaccctggagtcgctcggccgctgggaaccgtccccttgggtcgtcgcctgggccgcccgtcgttccccggccccgaggggtccggctggccgcggtgtgggtagaggtcagcatgagccaaggggtccgccgggcaggcgctgggcagggggtagcggccgcggtgcagctgctggtcaccctgagcttcctgcggagcgtcgtcgaggcgcaggtcactggagttctggatgattgcttgtgtgatattgacagcatcgataacttcaatacctacaaaatcttccccaaaataaaaaaattgcaagagagagactattttcgttattacaaggttaatctgaagcgaccttgtcctttctgggcagaagatggccactgttcaataaaagactgtcatgtggagccctgtccagagagtaaaattccggttggaataaaagctgggcattctaataagtacttgaaaatggcaaacaataccaaagaattagaagattgtgagcaagctaataaactgggagcaattaacagcacattaagtaatcaaagcaaagaagctttcattgactgggcaagatatgatgattcacgggatcacttttgtgaacttgatgatgagagatctccagctgctcagtatgtagacctattgctgaacccagagcgttacactggctataaagggacctctgcatggagagtgtggaacagcatctatgaagagaactgtttcaagcctcgatctgtttatcgtcctttaaatcctctggcgcctagccgaggcgaagatgatggagaatcattctacacatggctagaaggtttgtgtctggagaaaagagtcttctataagcttatatcgggacttcatgctagcatcaatttacatctatgcgcaaattatcttttggaagaaacctggggtaagcccagttggggacctaatattaaagaattcaaacaccgctttgaccctgtggaaaccaagggagaaggtccaagaaggctcaagaatctttactttttatacttgattgagcttcgagctttgtcaaaggtggctccatattttgagcgctcaattgtcgatctttacactggaaatgcagaagaagatgctgacacaaaaactcttctactgaatatctttcaagatacaaagtcctttcccatgcactttgatgagaaatccatgtttgcaggtgacaaaaaaggggccaagtcactaaaggaggaattccgattacatttcaagaatatctcccgtataatggactgtgttggatgtgacaaatgcagattatggggaaaattacagactcagggtttaggaactgccctgaagatattattctctgaaaaagaaatccaaaagcttccagagaatagtccatctaaaggcttccaactcacccgacaggaaatagttgctcttttaaatgcttttggaaggctttctacaagtataagagacttacagaattttaaagtcttattacaacacagtaggtaataaaggcttttatgtgtctaactagagacataaagtgactgtggaaagccttttaattatggacattcatcagaaagacactaatctgacttcaagaattctgaactattaaatagaaaatttaaatgctcacttgaatatttatgattcttaatagattattatcaactagagatatttataaatgaagtatatacttttaaaacatgtaagttatactaattttgtgtttaatttcatatgttttcatgtaatgaaaattctattttttttagaattggttttgtttttattctattatcctttatttccagttgtcaaactttaaatggctatgtctgcattctaataacactgttcagtctgttatggaaaaggagaactagggaacaaatgttgctcagggctggtgtcagtgagaaaaatttatcaatgctttttaatgtgtttttacccttgcctcactgtgtgtgtgtcactttctataatataaagaaatactataatatttctagaatctggaactgtcaccatgatgaatggccctttcaatgcatagttacagaaattcctgaagattccccaggacttcaatttcattggtttttatttgcagtttttagttgctgtaattgttgctgtttccagtctaaaggacctcctttggtaaaggtgaacaagacctctcccctatgctacccagccagattttgtgtgtgtaatgggctggcccaagagtgttcttttacttagaactccttttgattttgcttttctctgcccctagaaattttagggacaaagacattttggaaattgtcagttacttttagaaagaaaacactgcagaaatatttaacagattacttcttgataaaatttaaatgggattatatgaatttataatgccaattgaaaatattatatacacaaaatttgctattttcacttaaagtaagcatttttaaaggatttattttagaatacaatctatgcaatcctcgaactcagtgtgcttttccctgacaggatatataaaaaggtagattaggtcaaccctcctttaagcttactctcccctcaccttttcttttcactgtatataaacggtactttctgtgattcataccaacagaggactttctgtgattcataccaacagtcctaaactgtcattttctaaatctgggatttaaaatctttagacaatatttaaaatcttgattttttttaaatgtcagcagatacaatttggaagattgcatctgtgtagaagtaatgcaggtacaagatctagagtttttccttagactctttagtcttttctgaattaaagaataagtgctcttaaatccatattttatcctgtcaaagtctgaaatgtgttcattgatgatttggtgacatctaaaaaattgtatttagttggcttggctcacccctcttaaaaatacttagccatctcttggtgggatgtggtgggggtattaaggtctcagagttatttattttctcacctaatttcaaacctttataaacttggggttttgttgttgatggtggtagtattttttgttaagttgtttaaaaggctgacttgattggagcctcctctactttttcttgagggttgcaagtattgtatggtgggggaggggggccttaaggcaaactgtctaaaaagtgactatccaattaatttaactagtaaattagtaagaattattcttagtattcactcagagtttaagatgtgaaaaatctgcactttgtttatcactctaaatgtaaagaactttttgatagtgttatttcaccactccctcagttaaaggctattatttaaactgtttactggagaaaatcctcgctcatgtccatttattgtttttttctgtactgtgatttgtttcaagcttaggaaaactagtatattagagtatgttctaggaaattaaaagatctggttagagtaaaaagttctttttaaggttcttaactaattttttcacaactaagaaaataaatgaagtattcttaggctgaaattcatcttattttatcataaattagattgtaggggcagcctacatttttgtgtatgtgtttttatttcttaaatgattgtgtgagcctggtgacattttatggttcttgtgatctaaactgtttttccaattcacatcttttgtcgtgaagtgatattatactagagtactgtttgcattgtaaaaatgctttgctggtgctctggcattttgtctttatctcatcacctaatttaaaaacccagcacttgataatataactgacagaaatgattgtacccactgatgaagtaatgaaaatgaagaaaaggaaaatattccttccttcaatggcgtaagtttattttttacttaagtggcatctatgtaagttagacaaactatatattaaaattggtaaactttgaatgtttctcctgttttgattcttagattatgaggaggatcagacagaataagactccacacttttgaaatttgataagtcaaaacgttttattttgacatttttaacattgtgaattattcgatatttgtaatctctgtatgtatatgaaactctgccatgtttttcaactttgcctatgtgccactgtatataagaaaggacagctattttgatcttcatcagcattgccttcagctgaaaatttgggaacagttcacagtaaacctctcagtagtttgcaaactgaggtacctgcagaaaccatagctactcaccaaaatacacagattaggtgcatggtatcgtggaaattatttggtaaaaaaacacacacacaaatctatgtgtactgtattttaaggaatatctacaggtgcagctttgattttgaacagaattccaaataatttactgttgtacccaccagaatctagaaaatgtgaattaaagtacatgtttctgcaa

SEQ ID NO: 129758 - DNA, 605 bp, Homo sapiens
  Payload ID: 5379
  Gene Symbol: ERO1B
  Gene Name: endoplasmic reticulum oxidoreductase beta
  ENST ID: ENST00000366589
  CDS Start-End: 391-605
ggagggccgggcagggccgggccagaaaagaggtgatttctggcgagcagaaaacccggggagcagagacctgaccgtccagtgcgggaaacatctgcgaaccgcccgcagggtggggggacggcgacactccgggtcactggagttctggatgattgcttgtgtgatattgacagcatcgataacttcaatacctacaaaatcttccccaaaataaaaaaattgcaagagagagactattttcgttattacaaggttaatctgaagcgaccttgtcctttctgggcagaagatggccactgttcaataaaagactgtcatgtggagccctgtccagagagtaaaattccggttggaataaaagctgggcattctaataagtacttgaaaatggcaaacaataccaaagaattagaagattgtgagcaagctaataaactgggagcaattaacagcacattaagtaatcaaagcaaagaagctttcattgactgggcaagatatgatgattcacgggatcacttttgtgaacttgatgatgagagatctccagctgctcagtatgtagacctattgctgaacccagagcgttacactggctataa

SEQ ID NO: 129759 - DNA, 2096 bp, Homo sapiens
  Payload ID: 5380
  Gene Symbol: ERP27
  Gene Name: endoplasmic reticulum protein 27
  Uniprot ID: Q96DN0
  ENST ID: ENST00000266397
  CDS Start-End: 575-1396
gattacaggtatgagccaccacgcccggcctgtgctttagttctttacatgaaactccctttctaccttgtgttgcctggcaaaatcttacttacccagaactctgctccggcatcctccgcaggaagaacactttcattgaaccctagcattgtccctaatacccttaatatgtattgtcatagcaccctatgaatttttctatatcactttccatcttatatttaaataatctttttacttgcccatctctcccactgataatctaagctggcagaggctggatcagatcataattatctttctattcttagcgctaggatcaatgcctggcatagcatatttacattttttatttaaataaactgacctgactttcttctggttggatatgttctgagtccctattactaaccttggtcttttatctcagaagttgaaggctcccctggagccagctgcaaagttcccaaagccctaacaaccccacagccaatcagctacagagtaggctgccctgagtcggcctccccaacacaaagtccagggttggagcaggagcaggagagggacaatggaagctgccccgtccaggttcatgttcctcttatttctcctcacgtgtgagctggctgcagaagttgctgcagaagttgagaaatcctcagatggtcctggtgctgcccaggaacccacgtggctcacagatgtcccagctgccatggaattcattgctgccactgaggtggctgtcataggcttcttccaggatttagaaataccagcagtgcccatactccatagcatggtgcaaaaattcccaggcgtgtcatttgggatcagcactgattctgaggttctgacacactacaacatcactgggaacaccatctgcctctttcgcctggtagacaatgaacaactgaatttagaggacgaagacattgaaagcattgatgccaccaaattgagccgtttcattgagatcaacagcctccacatggtgacagagtacaaccctgtgactgtgattgggttattcaacagcgtaattcagattcatctcctcctgataatgaacaaggcctccccagagtatgaagagaacatgcacagataccagaaggcagccaagctcttccaggggaagattctctttattctggtggacagtggtatgaaagaaaatgggaaggtgatatcatttttcaaactaaaggagtctcaactgccagctttggcaatttaccagactctagatgacgagtgggatacactgcccacagcagaagtttccgtagagcatgtgcaaaacttttgtgatggattcctaagtggaaaattgttgaaagaaaatcgtgaatcagaaggaaagactccaaaggtggaactctgacttctccttggaactacatatggccaagtatctactttatgcaaagtaaaaaggcacaactcaaatctcagagacactaaacaacaggatcactaggcctgccaaccacacacacacgcacgtgcacacacgcacgcacgcgtgcacacacacacgcacacacacacacacacacagagcttcatttcctgtcttaaaatctcgttttctcttcttccttcttttaaatttcatatcctcactccctatccaatttccttcttatcgtgcattcatactctgtaagcccatctgtaacacacctagatcaaggctttaagagactcactgtgatgcctctatgaaagagaggcattcctagagaaagattgttccaatttgtcatttaatatcaagtttgtatactgcacatgacttacacacaacatagttcctgctcttttaaggttacctaagggttgaaactctaccttctttcataagcacatgtccgtctctgactcaggatcaaaaaccaaaggatggttttaaacacctttgtgaaattgtctttttgccagaagttaaaggctgtctccaagtccctgaactcagcagaaatagaccatgtgaaaactccatgcttggttagcatctccaactccctatgtaaatcaacaacctgcataataaataaaaggcaatcatgttataggagaaa

SEQ ID NO: 129760 - DNA, 993 bp, Homo sapiens
  Payload ID: 5380
  Gene Symbol: ERP27
  Gene Name: endoplasmic reticulum protein 27
  ENST ID: ENST00000540097
  CDS Start-End: 152-670
gcacagcgatgtgagctgaggtgcaggcaccagacctaggaattcctagaaaaatagtcaggaagcatttagacacatcaaatgttaaacgagtcctgattatgatgataatgatgatgattttggtggttgcaatagcaaagccttaagtatgaaggagacttgccagctggaaatacaggtagacaatgaacaactgaatttagaggacgaagacattgaaagcattgatgccaccaaattgagccgtttcattgagatcaacagcctccacatggtgacagagtacaaccctgtgactgtgattgggttattcaacagcgtaattcagattcatctcctcctgataatgaacaaggcctccccagagtatgaagagaacatgcacagataccagaaggcagccaagctcttccaggggaagattctctttattctggtggacagtggtatgaaagaaaatgggaaggtgatatcatttttcaaactaaaggagtctcaactgccagctttggcaatttaccagactctagatgacgagtgggatacactgcccacagcagaagtttccgtagagcatgtgcaaaacttttgtgatggattcctaagtggaaaattgttgaaagaaaatcgtgaatcagaaggaaagactccaaaggtggaactctgacttctccttggaactacatatggccaagtatctactttatgcaaagtaaaaaggcacaactcaaatctcagagacactaaacaacaggatcactaggcctgccaaccacacacacacgcacgtgcacacacgcacgcacgcgtgcacacacacacgcacacacacacacacacacagagcttcatttcctgtcttaaaatctcgttttctcttcttccttcttttaaatttcatatcctcactccctatccaatttccttcttatcgtgcattcatactctgtaagcccatctgtaacacacctagatcaaggctttaagaga

SEQ ID NO: 129761 - DNA, 1735 bp, Homo sapiens
  Payload ID: 5381
  Gene Symbol: ERP29
  Gene Name: endoplasmic reticulum protein 29
  Uniprot ID: P30040
  ENST ID: ENST00000261735
  CDS Start-End: 151-936
cgtggccccaccctctcaccctagacagatgggagcctcctggggtgtccacgtgagcgcgcgtgagtccgcccccccagtcacgtgaccgctgactcggggcgttctccactatcgcttacctacctccctctgcaggaacccggcgatatggctgccgctgtgccccgcgccgcatttctctccccgctgcttccccttctcctgggcttcctgctcctctccgctccgcatggcggcagcggcctgcacaccaagggcgcccttcccctggatacggtcactttctacaaggtcattcccaaaagcaagttcgtcttggtgaagttcgacacccagtacccctacggtgagaagcaggatgagttcaagcgtcttgctgaaaactcggcttccagcgatgatctcttggtggcagaggtggggatctcagattatggtgacaagctgaacatggagctgagtgagaaatacaagctggacaaagagagctacccagtcttctacctcttccgggatggggactttgagaacccagtcccatacactggggcagttaaggttggagccatccagcgctggctgaaggggcaaggggtctacctaggtatgcctggttgcctgcctgtatacgacgccctggccggggagttcatcagggcctctggtgtggaggcccgccaggccctcttgaagcaggggcaagataacctctcaagtgtgaaggagactcagaagaagtgggccgagcaatacctgaagatcatggggaagatcttagaccaaggggaggacttcccagcatcagagatgacacggatcgccaggctgattgagaagaacaagatgagtgacgggaagaaggaggagctccagaagagcttaaacatcctgactgccttccagaagaagggggccgagaaagaggagctgtaaaaaggctgtctgtgattttccagggtttggtgggggtagggaggggagagttaacctgctggctgtgagtcccttgtggaatataagggggtagtgggaaaagtggtactaacccacgattctgagccctgagtatgcctggacattgatgctaacatgaccatgcttgggatgtctctagctggtctggggatagctggagcacttactcaggtggctggtgaaatgacacctcagaaggaatgagtgctatagagaggagagaggagtgtactgcccaggtctttgacagatgtaattctcattcaattaaagtttcagtgttttggttaagtggacctgaagccattcttttttcttttcaaattatactttcgtctatgacctgctttcctctttgaatctaagctggtatagactccactttcccagggtaacaaactatcctcataacactgtggaaactggcatacctttgttattttccagtgatattcagactgacatggattgactgtcaatggtaaagtttgtctattttccagtccttaaaactcaatagcagtattgatgaatatattgaaccaacattgatggaccatggtgtaattattttccatgctttgtgaggtacacatagcaaattcttagttttactgatatattctgtgacttggatttacacagctaaatgatatagtccgatttcaaaattaaaaaatattttccatctaaatcactatcactaaataaatactaacttctagaaagcagaataaagagcacttgtgccaacatt

SEQ ID NO: 129762 - DNA, 1333 bp, Homo sapiens
  Payload ID: 5381
  Gene Symbol: ERP29
  Gene Name: endoplasmic reticulum protein 29
  Uniprot ID: P30040
  ENST ID: ENST00000455836
  CDS Start-End: 119-280
gagcctcctggggtgtccacgtgagcgcgcgtgagtccgcccccccagtcacgtgaccgctgactcggggcgttctccactatcgcttacctacctccctctgcaggaacccggcgatatggctgccgctgtgccccgcgccgcatttctctccccgctgcttccccttctcctgggcttcctgctcctctccgctccgcatggcggcagcggcctgcacaccaagggcgcccttcccctggatacggtcactttctacaagattatggtgacaagctgaacatggagctgagtgagaaatacaagctggacaaagagagctacccagtcttctacctcttccgggatggggactttgagaacccagtcccatacactggggcagttaaggttggagccatccagcgctggctgaaggggcaaggggtctacctaggtatgcctggttgcctgcctgtatacgacgccctggccggggagttcatcagggcctctggtgtggaggcccgccaggccctcttgaagcaggggcaagataacctctcaagtgtgaaggagactcagaagaagtgggccgagcaatacctgaagatcatggggaagatcttagaccaaggggaggacttcccagcatcagagatgacacggatcgccaggctgattgagaagaacaagatgagtgacgggaagaaggaggagctccagaagagcttaaacatcctgactgccttccagaagaagggggccgagaaagaggagctgtaaaaaggctgtctgtgattttccagggtttggtgggggtagggaggggagagttaacctgctggctgtgagtcccttgtggaatataagggggtagtgggaaaagtggtactaacccacgattctgagccctgagtatgcctggacattgatgctaacatgaccatgcttgggatgtctctagctggtctggggatagctggagcacttactcaggtggctggtgaaatgacacctcagaaggaatgagtgctatagagaggagagaggagtgtactgcccaggtctttgacagatgtaattctcattcaattaaagtttcagtgttttggttaagtggacctgaagccattcttttttcttttcaaattatactttcgtctatgacctgctttcctctttgaatctaagctggtatagactccactttcccagggtaacaaactatcctcataacactgtggaaactggcatacctttgttattttccagtgatattcagactgacatggattgactgtcaatggtaaagtttgtctattttccagtccttaaaactcaatagcagtat

SEQ ID NO: 129763 - DNA, 284 bp, Homo sapiens
  Payload ID: 5381
  Gene Symbol: ERP29
  Gene Name: endoplasmic reticulum protein 29
  ENST ID: ENST00000552052
  CDS Start-End: 1-284
gccccgcgccgcatttctctccccgctgcttccccttctcctgggcttcctgctcctctccgctccgcatggcggcagcggcctgcacaccaagggcgcccttcccctggatacggtcactttctacaaggggccccttgggaaggggaattagccccaaaagtccctggaacacccacttgctcagctctatacgccctcaggtcattcccaaaagcaagttcgtcttggtgaagttcgacacccagtacccctacggtgagaagcaggatgagttcaagcgt

SEQ ID NO: 129764 - DNA, 1698 bp, Homo sapiens
  Payload ID: 5381
  Gene Symbol: ERP29
  Gene Name: endoplasmic reticulum protein 29
  ENST ID: ENST00000546477
  CDS Start-End: 700-1182
tacagtgtaatatttatttggccataaaaagtaacagtgtgccaatacatggtacaacatggacaaaccttgaaaacatgctaagtgaaaaaagccagacacaaaagggcacatattgtacatttccatcagaatagacaaatctatagagacagaaaatagatgagtggttgctggggctgggaggaggaagactggggagtgactgcgtaatgagtatagggtttccttttgggatgatgaaaatgttctggcactagatagtaacctctatggttgcacattcttaatgcactgaatcatgcagaatgtacacttttaaatggttacaatggcaaatattatgtgaattttactgcaattaaaagtcttggccctgacagtttaaaacccagagatctagccagagggaagtgtagtctagggagaagacattgtcccaagcctggcctctcactagcttatctgccctgaaattgctgggttcaaactctggcctatctagccaaagcgtcctccatgatgccaactcctttgtaggtcattcccaaaagcaagttcgtcttggtgaagttcgacacccagtacccctacggtgagaagcaggatgagttcaagcgtcttgctgaaaactcggcttccagcgatgatctcttggtggcagaggtggggatctcagattatggtgacaagctgaacatggagctgagtgagaaatacaagctggacaaagagagctacccagtcttctacctcttccgggatggggactttgagaacccagtcccatacactggggcagttaaggttggagccatccagcgctggctgaaggggcaaggggtctacctaggtatgcctggttgcctgcctgtatacgacgccctggccggggagttcatcagggcctctggtgtggaggcccgccaggccctcttgaagcaggggcaagataacctctcaagtgtgaaggagactcagaagaagtgggccgagcaatacctgaagatcatggggaagatcttagaccaaggggaggacttcccagcatcagagatgacacggatcgccaggctgattgagaagaacaagatgagtgacgggaagaaggaggagctccagaagagcttaaacatcctgactgccttccagaagaagggggccgagaaagaggagctgtaaaaaggctgtctgtgattttccagggtttggtgggggtagggaggggagagttaacctgctggctgtgagtcccttgtggaatataagggggtagtgggaaaagtggtactaacccacgattctgagccctgagtatgcctggacattgatgctaacatgaccatgcttgggatgtctctagctggtctggggatagctggagcacttactcaggtggctggtgaaatgacacctcagaaggaatgagtgctatagagaggagagaggagtgtactgcccaggtctttgacagatgtaattctcattcaattaaagtttcagtgttttggttaagtggacctgaagccattcttttttcttttcaaattatactttcgtctatgacctgctttcctctttgaatctaagctggtatagactccactttcccagggtaacaaactatcctcataacactgtggaaactggcatacctttgttattttccagtgatattcagactgacatggattgact

SEQ ID NO: 129765 - DNA, 4854 bp, Homo sapiens
  Payload ID: 5382
  Gene Symbol: ERP44
  Gene Name: endoplasmic reticulum protein 44
  Uniprot ID: Q9BS26
  ENST ID: ENST00000262455
  CDS Start-End: 201-1421
gaagtgagggtgtgagaggcctctctggaagttgtcccgggtgttcgccgctggagcccgggtcgagaggacgaggtgccgctgcctggagaatcctccgctgccgtcggctcccggagcccagccctttcctaacccaacccaacctagcccagtcccagccgccagcgcctgtccctgtcacggaccccagcgttaccatgcatcctgccgtcttcctatccttacccgacctcagatgctcccttctgctcctggtaacttgggtttttactcctgtaacaactgaaataacaagtcttgatacagagaatatagatgaaattttaaacaatgctgatgttgctttagtaaatttttatgctgactggtgtcgtttcagtcagatgttgcatccaatttttgaggaagcttccgatgtcattaaggaagaatttccaaatgaaaatcaagtagtgtttgccagagttgattgtgatcagcactctgacatagcccagagatacaggataagcaaatacccaaccctcaaattgtttcgtaatgggatgatgatgaagagagaatacaggggtcagcgatcagtgaaagcattggcagattacatcaggcaacaaaaaagtgaccccattcaagaaattcgggacttagcagaaatcaccactcttgatcgcagcaaaagaaatatcattggatattttgagcaaaaggactcggacaactatagagtttttgaacgagtagcgaatattttgcatgatgactgtgcctttctttctgcatttggggatgtttcaaaaccggaaagatatagtggcgacaacataatctacaaaccaccagggcattctgctccggatatggtgtacttgggagctatgacaaattttgatgtgacttacaattggattcaagataaatgtgttcctcttgtccgagaaataacatttgaaaatggagaggaattgacagaagaaggactgccttttctcatactctttcacatgaaagaagatacagaaagtttagaaatattccagaatgaagtagctcggcaattaataagtgaaaaaggtacaataaactttttacatgccgattgtgacaaatttagacatcctcttctgcacatacagaaaactccagcagattgtcctgtaatcgctattgacagctttaggcatatgtatgtgtttggagacttcaaagatgtattaattcctggaaaactcaagcaattcgtatttgacttacattctggaaaactgcacagagaattccatcatggacctgacccaactgatacagccccaggagagcaagcccaagatgtagcaagcagtccacctgagagctccttccagaaactagcacccagtgaatataggtatactctattgagggatcgagatgagctttaaaaacttgaaaaacagtttgtaagcctttcaacagcagcatcaacctacgtggtggaaatagtaaacctatattttcataattctatgtgtatttttattttgaataaacagaaagaaattttgggtttttaatttttttctccccgactcaaaatgcattgtcatttaatatagtagcctcttaaaaaaaaaaaacctgctaggatttaaaaataaaaatcagaggcctatctccactttaaatctgtcctgtaaaagttttataaatcaaatgaaaggtgacattgccagaaacttaccattaacttgcactactagggtagggaggacttagggatgtttcctgtgtcgtatgtgcttttctttctttcatatgatcaattctgttggtattttcagtatctcatttctcaaagctaaagagatatacattctggatacttgggaggggaataaattaaagttttcacactgtgtactgtgttttactgattggttggatattgcttatgaaaattccatagtggtatttttttggattcttaatgtgtaacttaaacatactttgaagtggaggagagtcataagacagaacatttggcaggaattgtccttatgaaacaagaaaaagaaaatgaaaagtattattaagcttctgtgtttgtctaaaaatgtggcatatggatggcatttaaaactttgaatgaattatacctaaatctgggacagggaggtgacagtggaacaggctaccaatcagaactagatgacttttaaggctcctcctattatgagacttcaatttccaaagagaagaactagcagagaaattgtatttcagtaattttaagctccttctgtcttgtagagtcttgttatagttgtataaatcaaaaacacagaataaggaacatatttaactttttttcattataaaatggttagaggaccctaccccctctagattccctgatttccccaggcctgcagcatacagtaagatgggtccctgtgccaggcctcaatactgccagggaataaaaccagagggagaggaccctcagtgtcatatcaggaagcccagtgccagaggacagacaggttcaaaactggcttttcctctgggcctgggttggtgctataggccaagggtcattttatacttgggtataaatcaatcccagtttgggaaaagattatttttaagcttaaaaggctgacatgtgccattatatgtagtatgtaatatatgtaacatcttccaattcttttaaaataaaattaatatttataatggatatttaatgattgttatttttaaaaaccagcttataattcctcgttatgcatgatttatccaaagtttccatagttttattcaaaataataaatgttaataaggtgataaggggtatatttaatgtattgtatcaaattgtgaataagaaagtaggatggagctttctagaggttgggccttagttctgttatcctcattgcttttaaccaataagttaaatgaagttagagttatggtcttcaggttagattatggaccagatctgtgagggtcagcatggaaattcacattcaacaaggtagcacacaggaccaagagcagcacatgcaatcaactggaataatatagtaatcctgtaactgggtttgaaaaaataatcaacaaaagatacaattcaagggttaggttgcagagagctggcttgagagtagttattatgaaaaaggcctcaaggagtacgtgttcagtatgctctaagatgataaagtggctgttaaaaagggagttgatttgaggaagtattacttagcattcatgcatattgggcttaggctctagccctgccactatcattgtcttctctggactgtgaagtcactgaggacaaggaaactaaatttaatgtctgtatcactagtgcctagaatttctggacacttagtagtcaccatcaggcgtttatttaatgaatgagaagcaaagtgaccttggttacttttttaccctgaggggctcagcactcattaggacttggtgcctaattttataaaaagtcactaagctcaagtgcttggatgaaaggacagcgtggataaaaaggtttttaaaacatggatgttaaggctgttttgcttggagaagacttgggactgggacagtctttagatattatttgaaatgctggcactgtctatctggatcccagggcttgaactaggatttgaggaagtcacagggaagcagatttcagtctgacatttattcagtgcaagttttttggtgctgtagtatatgatgaaagatgtaaagctgaataaagcattatttctgccctagagttgttcacagcctagtcaggcatatggatatgtaaacaatgactgtaacgtgttatagatgtaaagacaaaataaaggttaaagagggcataaaggagcactcaattgcagagatttgaggacattatttttattttgagctttaaaaagatgaataggtgttctcaggaggtagggatctggctgagagggaataatctgagcaaaggtatgaaacagcctaatgcattagagaaaaaagttcttttagtaaggcatttggggttggggaagctagaaaaagaaatgggagctggtcacacagggccttgtgtgccagactaaggggtttgtagtatatattgtaggcagaagagatccatcaacagattgcaagcaaggaagtatgttcactttaaagtttgagaaagaatagtgtggaagcacgtctcaaatttagacttgttccccctctgaaccgtgaatcagaccatttcaggtagaagtcttccccggtttatctgatctactcggggcctcaggcttctcagctgggaagagaggatgcaagaccagactgaagaacacggttgagtccccagaaccaaaagggggcctttctgcttcttagccagctacctcttcgagtttttcaaattgtgagggggaccataaaaggatggaaacttttagatgacattctacaaattatttttttctttaaattaaaagaacctagccaataagatagagaatgggcatctaaggcatctcagagctctctgatgaagccaggttgtcaaagatcatttgcaaaagaagggaaaactggcatgacaaaagctacagagaggagagtgaaatatagaagtgtttgaaatgttcaagctcacaataagcttaaatttatagaaaatgctaaggttgtcaagaaggcttttttttttttcttttttaaacctgagggcaaaaaggaatggataaagtagtgtaatggattgacaatcaggaagaacagaataactcagttttttttctcctacaaggagatatggctggaccaaaataaaatgacatgaaactgcaaaaatgaaaa

SEQ ID NO: 129766 - DNA, 7876 bp, Homo sapiens
  Payload ID: 5383
  Gene Symbol: ERN1
  Gene Name: endoplasmic reticulum to nucleus signaling 1
  Uniprot ID: O75460
  ENST ID: ENST00000433197
  CDS Start-End: 97-3030
gtccgctgaggctcggtcaccgcctcgctgtcgtcgcggcgcccccgccccgtcctctgtccgtaccgcccccggagccagggccgagtcctcgccatgccggcccggcggctgctgctgctgctgacgctgctgctgcccggcctcgggatttttggaagtaccagcacagtgacgcttcctgaaaccttgttgtttgtgtcaacgctggatggaagtttgcatgctgtcagcaagaggacaggctcaatcaaatggactttaaaagaagatccagtcctgcaggtcccaacacatgtggaagagcctgcctttctcccagatcctaatgatggcagcctgtatacgcttggaagcaagaataatgaaggcctgacgaaacttccttttaccatcccagaattggtgcaggcatccccatgccgaagttcagatggaatcctctacatgggtaaaaagcaggacatctggtatgttattgacctcctgaccggagagaagcagcagactttgtcatcggcctttgcagatagtctctgcccatcaacctctcttctgtatcttgggcgaacagaatacaccatcaccatgtacgacaccaaaacccgagagctccggtggaatgccacctactttgactatgcggcctcactgcctgaggacgacgtggactacaagatgtcccactttgtgtccaatggtgatgggctggtggtgactgtggacagtgaatctggggacgtcctgtggatccaaaactacgcctcccctgtggtggccttttatgtctggcagcgggagggtctgaggaaggtgatgcacatcaatgtcgctgtggagaccctgcgctatctgaccttcatgtctggggaggtggggcgcatcacaaagtggaagtacccgttccccaaggagacagaggccaagagcaagctgacgcccactctgtatgttgggaaatactctaccagcctctatgcctctccctcaatggtacacgagggggttgctgtcgtgccccgcggcagcacacttcctttgctggaagggccccagactgatggcgtcaccattggggacaagggggagtgtgtgatcacgcccagcacggacgtcaagtttgatcccggactcaaaagcaagaacaagctcaactacttgaggaattactggcttctgataggacaccatgaaaccccactgtctgcgtctaccaagatgctggagagatttcccaacaatctacccaaacatcgggaaaatgtgattcctgctgattcagagaaaaagagctttgaggaagttatcaacctggttgaccagacttcagaaaacgcacctaccaccgtgtctcgggatgtggaggagaagcccgcccatgcccctgcccggcccgaggcccccgtggactccatgcttaaggacatggctaccatcatcctgagcaccttcctgctgattggctgggtggccttcatcatcacctatcccctgagcatgcatcagcagcagcagctccagcaccagcagttccagaaggaactggagaagatccagctcctgcagcagcagcagcagcagctgcccttccacccacctggagacacggctcaggacggcgagctcctggacacgtctggcccgtactcagagagctcgggcaccagcagccccagcacgtcccccagggcctccaaccactcgctctgctccggcagctctgcctccaaggctggcagcagcccctccctggaacaagacgatggagatgaggaaaccagcgtggtgatagttgggaaaatttccttctgtcccaaggatgtcctgggccatggagctgagggcacaattgtgtaccggggcatgtttgacaaccgcgacgtggccgtgaagaggatcctccccgagtgttttagcttcgcagaccgtgaggtccagctgttgcgagaatcggatgagcacccgaacgtgatccgctacttctgcacggagaaggaccggcaattccagtacattgccatcgagctgtgtgcagccaccctgcaagagtatgtggagcagaaggactttgcgcatctcggcctggagcccatcaccttgctgcagcagaccacctcgggcctggcccacctccactccctcaacatcgttcacagagacctaaagccacacaacatcctcatatccatgcccaatgcacacggcaagatcaaggccatgatctccgactttggcctctgcaagaagctggcagtgggcagacacagtttcagccgccgatctggggtgcctggcacagaaggctggatcgctccagagatgctgagcgaagactgtaaggagaaccctacctacacggtggacatcttttctgcaggctgcgtcttttactacgtaatctctgagggcagccacccttttggcaagtccctgcagcggcaggccaacatcctcctgggtgcctgcagccttgactgcttgcacccagagaagcacgaagacgtcattgcacgtgaattgatagagaagatgattgcgatggatcctcagaaacgcccctcagcgaagcatgtgctcaaacacccgttcttctggagcctagagaagcagctccagttcttccaggacgtgagcgacagaatagaaaaggaatccctggatggcccgatcgtgaagcagttagagagaggcgggagagccgtggtgaagatggactggcgggagaacatcactgtccccctccagacagacctgcgtaaattcaggacctataaaggtggttctgtcagagatctcctccgagccatgagaaataagaagcaccactaccgggagctgcctgcagaggtgcgggagacgctggggtccctccccgacgacttcgtgtgctacttcacatctcgcttcccccacctcctcgcacacacctaccgggccatggagctgtgcagccacgagagactcttccagccctactacttccacgagcccccagagccccagcccccagtgactccagacgccctctgagcgagggcggcccctctgttctggtggccccagctgtgactgagggcctggtcaccacaattagagcttgatgcctcccggctttgcagggagaccaggcttcccaaaccaagtgccttgagctgcctgctctgcagcccacagaggacagtgctgaccccaggaagtgggagaagtggcccctcgtgacctacagggaactgggaagatgctggccccaaaagccttacggtcatgatgtctgcaaaggagggcctcagagacagcgcgagtagcacccccagccatctactggataaacttgcttcagactttttaaattcctgcttaatgtcagtctacaggcctttcaggaagggagaggagggaatcgtacattttgcttgcgtgctgggacagctaggctgagatgcaccaagtacagccttcactggagaccggaattgagaggtgggggatgctgaggagggggaggacggagttcagagggtgtcgtcctgcagtgtgagatttctcattgatcacagatgtgcccagagtagcccaggtcactgttaactagtgtttctgcagaggcagcaggagccatgagcatgaggtgtggcattagggactggtcagctatgcatgctggcaggtggggttgtgtctgcaggtctcagaaatgaagaggctgctctgttctggaggcagccgtggcccagtgccagtggccagaacagtggcctttggtgggtgtgtcccgggccatctcggggtggtgctcaggagcgcctggggcaagaggtaaagagttccctggccttcaaggagagcagcgaagacccagacaggggccagccttcaggaccagagggaggccgccgaatgggaccctcctggtcaccaggagaaagccctgggccagcgagtaggcagtcaaactccttcgtccccaaggccggtggaacaagaggctcgtggtgagtcagggccagggtgggtggccaaggccagggtcaccgtgtgcttcatgggccagcttttttgtttttcttggcaaattttaataactatattttgattatactgtagaatgctatgtcagcataagtaagctaaacttgaagctttcttgtgaagaataaatgcaagatagaatacatcttctattttttgtggtaccaaaaatcaccatcccctcaagagtgttcatgtatagaacattctctaatgctgaagagtaaaacattatagcaacactatgtaaatgtattgaacagtatcaaagaaatagtctctaaattgtttgtaccatatttttttttctaaacttaacataatttttagctttagtttcagtcaaaactttgtcttttctctcccgagagccttagaggttaaaatgcaatcagcctaccgtgtaaggagatgttgtccatgtactttctccagccagttgggggatcattgcagctcaggcctggtgaactcagagattccattcagtattaagaatgggattgttgaattttactcacagagaaatcactgtttcttcatgttgtaagatgttttctgtttgtgtatttgtatcatggttactcatcaaaagctctcattctgcctttgtagaattcagttcccttcctttcatcatagctaaagtgacttttttccctactattaacgtgatcctacatccttaaatctcatcgattacctcacttaggccttggaaccttggcccttggtcggtgtccttggcgtcttctaagcaaggctgtgcgttgttcagaaacgtggccagaccgcatttcctgctgctcccatgccgcatgccaggtggcctgagacagagctccccatacggctgcaaggtgctttacctgtgggctttggcagtaacccaagagaggatcagaaggtggagaaggtgccacgagtgatttaacaggcctgccacagggagtgcccccagcccagctcgttctcagcacaggttttctctttgggagtacccaggtgatttctagtgacccaattttgtgtcatctccctgttttagccccacttgcctagagacaactgtttccgatgccttttctgcttatcatactagtttctaaccacgcagatttctcaaaatcatttattcaatgtattttatttgagcacttagtgtattgagctaggcaggatatagggtgccggagatacagcgatgaacaagacaggcaaaacttctgctttcctaaaacttgtgatgagagagaacaataaaaaagtgttgctgccacaaagaaaccaaagtgtgtggggaagggcgcgtgtttgcggtttacatctcttctgtcccagaatcacagggatctggtccggtcacctctggtctttcctcttagtcgcctttaggagccctggttcccgtccatcctctggggggtttgtttgaagagatctcgtgtgggtacttgtcatgaaaacaccttgggcatcatctggtgtatccagttctagtctcgagaattctggtttcccactgtgctcagcaagtggaaagttcttttcaggccagaacagctctgcaccatcacatatcgtgttgcggcttagctgtttggtctgtagttcaggttatgggacttctccaatcctggaaggctgttgagctttttagaagtactgtacgctatcttcaagatggagcttggtcacatctgttaggaatccaaaggacactatgacttatttaaatcttgtcttactaaacctctcttgggcacgtgtgccagaatttctcttgttgcttcttgagtctttttaatttcagtgttttttcgtttgttttttgtttttttgagacagagtctcgctctgtcacccaggctggagtgcagtggcacgacctcagctcactgcaacctccgcctccttggttcaagcaattctcctgcctcagcctcccgagtagctgggattacaggtgtgtgccaccacgctcggctaattttttatattttttttagtagagacggggtttccccatgttaggcaggatggtctcgatctcctaacctcgtgatccgcctgcctcagcctcccaaagtgctgggattacaggcttgagccaccgcacccggcctaatctcagtttttgaagtgctccacaagtcattaggcaccaaaacattttcacctggggaacactggcatttccctgattagctgtgaagcaatctagtggctaagtgtgaaatcctgggtgcgcaggtgttctcactcccgccgtgttctcagtgcagtggtggtcagaggcccttccaaggagacatcactctgatcagttacagatagatgttctggaagatctgcaggtgagtagatccagcagagtttcttcccaccaactctagaagaaagggccttatcagagttgaccctgagcctttggtaaggttttgtgtgcatgcgattcagttatctttggcaattcttttcttgctgcagtgagagattaattggttgctgatcaaaccgttcatgcagatggggggacctttggattgtacggctttctcctcttggctgctttcttttcaggaagttggactttggccaggtttggctttcccagagccgttcctttctctgtcctttccttgggtcctcatggtgtgcccattggatccttggccttgtgatcctctgggaactgggggccagttccacttttgcagccttctgtgctggaagagaagcccagcgccctggaaggagcctctttaagtcccccatgtcgctttctctctctgctcttttagtgtctgagattgcctttctttgaatttcccagtgtttcttttccttgtcccttccctcaccaacctggagttattttggttgactatgtcctggctttggcttctcctggcaggaagtcatcaggcatcctctccaggtgagccgaaattccaccctcccaggttggacatcatcttttaaacccaatggtctactcccctccttctttatgaaacagtgatttcccgtgagtaactctggttctgattttttgtaccggcgcttaaattctttctgtagacgttggaaagccacaaagaacgtgactgcagtgagcctcccactggagcagccttaaccaacactttggccaaagcccccccacctcccctgtgtactgtgtgtgtgtttggtggatacagtattccttttcagtgtccctaaagctgtgatggggagtccccacttacctagaaagcattaccagtcacctactctgcattctcagatgtaaaccttgtgtagtgttctttttgcaatgacctatttatttaacctatttatatttatttaatttttactctgaaatgtatccagttacaattgtacttgcttaaagcacatcagatttgttttggacaacacccttgaccattttaaaactggaaaagtgatactgtatccttccatgggatggatgctttacagtagtcttattattaaagggtgattaatttggtcggggtaaaatgttaatttttaggtgatttttaagaattctgtgccattatgtcttctgtgtggatggttaattgtttaattagtacgtgttaattgtgtgatacagtcttctttgtggaacccaaaatcctctttttagctttatattttataaactgccagattgtacaacttttatgtgcatttttaaagcttgaagacatgagggtcattatctaagttaaacagcctatttttgtgcctcctgtacagttttataattctgctgatggcggcatcttatgtcgagccaaccacaataaaggtagttttagattttgga

SEQ ID NO: 129767 - DNA, 2068 bp, Homo sapiens
  Payload ID: 5383
  Gene Symbol: ERN1
  Gene Name: endoplasmic reticulum to nucleus signaling 1
  Uniprot ID: O75460
  ENST ID: ENST00000606895
  CDS Start-End: 791-1003
gttcattccaagcggaagtgatggctggtggatatgacttgaggggaattcctgagggcaaggaaaaggaagaaaggggccccagagaagacgaggcacagctggagaaccctagggctgtgaacactgcgactgccgcgcggggcagctgcgccgtgtttgctggaagcctccggtagctgctgaaaccttcgctccggaggtcgcctcggtaaaccttgcggatgattccaccacggcggaaagacgaaaaggaggcttctaggcacccgggaccgcccgtgtcccgcccttttccccgatgaagtctgacgcggcaggtccctcggcagggttaatgggacggcctggtggggcattgccggtctttcccagccacagacaagcttcgcgcctcgatcccccagcgcccccagacgctggatgccgaggcctggtcctttacagccgccgacgcctcatgagcgaagccagccagatgccagcaccgccttcggccccgccccgagccagcccctcccacatccccgcccggggcacgccctcggcccgcccccatctccgccccgaacacgcccctagattggccccgccccgtccccgcccgcaactccgccccgaccggaagaagccgcggcacccagcgcttatagggccgggaatgggggtgccgccgctgcctagtcagttctgcgtccgctgaggctcggtcaccgcctcgctgtcgtcgcggcgcccccgccccgtcctctgtccgtaccgcccccggagccagggccgagtcctcgccatgccggcccggcggctgctgctgctgctgacgctgctgctgcccggcctcggggtgagtgaccggggagcgtggggtggaggacagctcgcgacggccgggtcggggccggggcagcgtcgcggcgccggggctggagtccgagctgggagcgcgacggcggcggccagatgccccgtgagcccagccgtgggaggctcgggccgggcgtaggaggcggcaccgggccgggagagcttccctgacgggagtcgcggccccaccgaggcgtcggccgcccgaagagcctcccaagccagcgcggctgtcacgggcagcggctccccggaccccgcgggctcgggcgcaacttcgtggcgtcctgcacggcacttgggggtcccagaaggccccggcctgaggaggccgcccacctgcgggaccctcctcctcgcgggcgggcgccggcgctgcctggcgggggccgcggaggagccgaaagggcgttgggatccaggggaagggtctgtcctgcgcttcgaatccttgtttgaactttttaaaaattcgaaaactttggggaacgaatgcaacagggagtaaggactctcacccgagagctggcttctgccacttgccctgccggtttcttggtactgggaggctgcaggcttccttctgtgcaccgagacttccttgagcaagtggagctgtgggaattgcactcttggaagatcccgcatgggttcgaggtgaggccgcttcagaacctcaaatgaaagactgtctcctcgtgggagagcacctggggccatcagaaatgtcttttcatctttttctggaggagacgaatgatagggcctggtttacattcatttaactctttatgaccttcactcagctgtggatttgggggcactttgtgggagacttggcttttttttttcttctggttggaagaacctaaattagcgaatgtttttcacaaaatgtattgttcaggatgtgagcgtggcaaatttgtccgtgttctgtttaatgacctctttaaaggtactgtgtactctttaatagggatatcatgtaccaggtgtcccagtagagcactgacatgtgtgtgcctgagtgccagccaccgtgtgaactctttggaggttttgcattttaggtaaataactgtctgtactcttggagtaacaagaatttggaaacaggagaagtaaataaataaggttgcctttttcaaattcagggtttttttttttaaataaaggaaaatttgtagactctttataatag

SEQ ID NO: 129768 - DNA, 3549 bp, Homo sapiens
  Payload ID: 5384
  Gene Symbol: ERN2
  Gene Name: endoplasmic reticulum to nucleus signaling 2
  Uniprot ID: Q76MJ5
  ENST ID: ENST00000256797
  CDS Start-End: 314-3094
gcttgtacctgctgtgcagtgaggactccaggaactgatgatgaaccggcacggtcctcggcacgtggcaagttctccataagtgggctcagtaaaatccctctcccgggaaagcgccccaccgtgtttggtggggtgactgggacgcgaggatgcggctgggagtgtgatgagaagggcggggatcggcgaggactccaggctggggttgcaggcccagccaggggcggagccttctccgggtcgggcggggacagagcgctcccttggaggcacccagggacctggccagccgtgcagctgcccaggcgctatggcgagtgcggtcagggggtcgaggccgtggccccggctggggctccagctccagttcgcggcgctgctgctcgggacgctgagtccacaggttcatactctcaggccagagaacctcctgctggtgtccaccttggatggaagtctccacgcactaagcaagcagacaggggacctgaagtggactctgagggatgatcccgtcatcgaaggaccaatgtacgtcacagaaatggcctttctctctgacccagcagatggcagcctgtacatcttggggacccaaaaacaacagggattaatgaaactgccattcaccatccctgagctggttcatgcctctccctgccgcagctctgatggggtcttctacacaggccggaagcaggatgcctggtttgtggtggaccctgagtcaggggagacccagatgacactgaccacagagggtccctccaccccccgcctctacattggccgaacacagtatacggtcaccatgcatgacccaagagccccagccctgcgctggaacaccacctaccgccgctactcagcgccccccatggatggctcacctgggaaatacatgagccacctggcgtcctgcgggatgggcctgctgctcactgtggacccaggaagcgggacggtgctgtggacacaggacctgggcgtgcctgtgatgggcgtctacacctggcaccaggacggcctgcgccagctgccgcatctcacgctggctcgagacactctgcatttcctcgccctccgctggggccacatccgactgcctgcctcaggcccccgggacacagccaccctcttctctaccttggacacccagctgctaatgacgctgtatgtggggaaggatgaaactggcttctatgtctctaaagcactggtccacacaggagtggccctggtgcctcgtggactgaccctggcccccgcagatggccccaccacagatgaggtgacactccaagtctcaggagagcgagagggctcacccagcactgctgttagatacccctcaggcagtgtggccctcccaagccagtggctgctcattggacaccacgagctacccccagtcctgcacaccaccatgctgagggtccatcccaccctggggagtggaactgcagagacaagacctccagagaatacccaggccccagccttcttcttggagctattgagcctgagccgagagaaactttgggactccgagctgcatccagaagaaaaaactccagactcttacttggggctgggaccccaagacctgctggcagctagcctcactgctgtcctcctgggagggtggattctctttgtgatgaggcagcaacagccgcaggtggtggagaagcagcaggagacccccctggcacctgcagactttgctcacatctcccaggatgcccagtccctgcactcgggggccagccggaggagccagaagaggcttcagagtccctcaaagcaagcccagccactcgacgaccctgaagctgagcaactcaccgtagtggggaagatttccttcaatcccaaggacgtgctgggccgcggggcaggcgggactttcgttttccggggacagtttgagggacgggcagtggctgtcaagcggctcctccgcgagtgctttggcctggttcggcgggaagttcaactgctgcaggagtctgacaggcaccccaacgtgctccgctacttctgcaccgagcggggaccccagttccactacattgccctggagctctgccgggcctccttgcaggagtacgtagaaaacccggacctggatcgcgggggtctggagcccgaggtcgtgctgcagcagctgatgtctggcctggcccacctgcactctttacacatagtgcaccgggacctgaagccaggaaatattctcatcaccgggcctgacagccagggcctgggcagagtggtgctctcagacttcggcctctgcaagaagctgcctgctggccgctgtagcttcagcctccactccggcatccccggcacggaaggctggatggcgcccgagcttctgcagctcctgccaccagacagtcctaccagcgctgtggacatcttctctgcaggctgcgtgttctactacgtgctttctggtggcagccacccctttggagacagtctttatcgccaggcaaacatcctcacaggggctccctgtctggctcacctggaggaagaggtccacgacaaggtggttgcccgggacctggttggagccatgttgagcccactgccgcagccacgcccctctgccccccaggtgctggcccaccccttcttttggagcagagccaagcaactccagttcttccaggacgtcagtgactggctggagaaggagtccgagcaggagcccctggtgagggcactggaggcgggaggctgcgcagtggtccgggacaactggcacgagcacatctccatgccgctgcagacagatctgagaaagttccggtcctataaggggacatcagtgcgagacctgctccgtgctgtgaggaacaagaagcaccactacagggagctcccagttgaggtgcgacaggcactcggccaagtccctgatggcttcgtccagtacttcacaaaccgcttcccacggctgctcctccacacgcaccgagccatgaggagctgcgcctctgagagcctcttcctgccctactacccgccagactcagaggccaggaggccatgccctggggccacagggaggtgaggtgggctggatgccacacagatggtctccgtgctggctcactgaagagctgagcctgtggctggcctcagaatcaggctgggtgcagtggctcacacctgtaatcccagcattttgggaggctgagtgagaggatcacttgagctcaggagttcgagaccagcctggccaacatggcaacaccccatttctacaaaaaatttgtaaaattagccaggcatggtggcgcacgcctgtagtcccagctgcttgggaggctgaggtgggagaatcacttgagcccaggagttcgaggctgcagtgagccaggatcatgccactgcactccagcctggtccacagagagacactgtcaccccctttcccccacaagactggcagaggctgggcagcctggggctgatgaagcagagatgttcgctggatcccaggccctggcacccctcaggaaatac

SEQ ID NO: 129769 - DNA, 3169 bp, Homo sapiens
  Payload ID: 5384
  Gene Symbol: ERN2
  Gene Name: endoplasmic reticulum to nucleus signaling 2
  ENST ID: ENST00000457008
  CDS Start-End: 40-2664
acccagggacctggccagccgtgcagctgcccaggcgctatggcgagtgcggtcagggggtcgaggccgtggccccggctggggctccagctccagttcgcggcgctgctgctcgggacgctgagtccacaggttcatactctcaggccagagaacctcctgctggtgtccaccttggatggaagtctccacgcactaagcaagcagacaggggacctgaagtggactctgagggatgatcccgtcatcgaaggaccaatgtacgtcacagaaatggcctttctctctgacccagcagatggcagcctgtacatcttggggacccaaaaacaacagggattaatgaaactgccattcaccatccctgagctggttcatgcctctccctgccgcagctctgatggggtcttctacacaggccggaagcaggatgcctggtttgtggtggaccctgagtcaggggagacccagatgacactgaccacagagggtccctccaccccccgcctctacattggccgaacacagtatacggtcaccatgcatgacccaagagccccagccctgcgctggaacaccacctaccgccgctactcagcgccccccatggatggctcacctgggaaatacatgagccacctggcgtcctgcgggatgggcctgctgctcactgtggacccaggaagcgggacggtgctgtggacacaggacctgggcgtgcctgtgatgggcgtctacacctggcaccaggacggcctgcgccagctgccgcatctcacgctggctcgagacactctgcatttcctcgccctccgctggggccacatccgactgcctgcctcaggcccccgggacacagccaccctcttctctaccttggacacccagctgctaatgacgctgtatgtggggaaggatgaaactggcttctatgtctctaaagcactggtccacacaggagtggccctggtgcctcgtggactgaccctggcccccgcagatggccccaccacagatgaggtgacactccaagtctcaggagagcgagagggctcacccagcactgctgttagatacccctcaggcagtgtggccctcccaagccagtggctgctcattggacaccacgagctacccccagtcctgcacaccaccatgctgagggtccatcccaccctggggagtggaactgcagagacaagacctccagagaatacccaggccccagccttcttcttggagcaacagccgcaggtggtggagaagcagcaggagacccccctggcacctgcagactttgctcacatctcccaggatgcccagtccctgcactcgggggccagccggaggagccagaagaggcttcagagtccctcaaagcaagcccagccactcgacgaccctgaagctgagcaactcaccgtagtggggaagatttccttcaatcccaaggacgtgctgggccgcggggcaggcgggactttcgttttccggggacagtttgagggacgggcagtggctgtcaagcggctcctccgcgagtgctttggcctggttcggcgggaagttcaactgctgcaggagtctgacaggcaccccaacgtgctccgctacttctgcaccgagcggggaccccagttccactacattgccctggagctctgccgggcctccttgcaggagtacgtagaaaacccggacctggatcgcgggggtctggagcccgaggtcgtgctgcagcagctgatgtctggcctggcccacctgcactctttacacatagtgcaccgggacctgaagccaggaaatattctcatcaccgggcctgacagccagggcctgggcagagtggtgctctcagacttcggcctctgcaagaagctgcctgctggccgctgtagcttcagcctccactccggcatccccggcacggaaggctggatggcgcccgagcttctgcagctcctgccaccagacagtcctaccagcgctgtggacatcttctctgcaggctgcgtgttctactacgtgctttctggtggcagccacccctttggagacagtctttatcgccaggcaaacatcctcacaggggctccctgtctggctcacctggaggaagaggtccacgacaaggtggttgcccgggacctggttggagccatgttgagcccactgccgcagccacgcccctctgccccccaggtgctggcccaccccttcttttggagcagagccaagcaactccagttcttccaggacgtcagtgactggctggagaaggagtccgagcaggagcccctggtgagggcactggaggcgggaggctgcgcagtggtccgggacaactggcacgagcacatctccatgccgctgcagacagatctgagaaagttccggtcctataaggggacatcagtgcgagacctgctccgtgctgtgaggaacaagaagcaccactacagggagctcccagttgaggtgcgacaggcactcggccaagtccctgatggcttcgtccagtacttcacaaaccgcttcccacggctgctcctccacacgcaccgagccatgaggagctgcgcctctgagagcctcttcctgccctactacccgccagactcagaggccaggaggccatgccctggggccacagggaggtgaggtgggctggatgccacacagatggtctccgtgctggctcactgaagagctgagcctgtggctggcctcagaatcaggctgggtgcagtggctcacacctgtaatcccagcattttgggaggctgagtgagaggatcacttgagctcaggagttcgagaccagcctggccaacatggcaacaccccatttctacaaaaaatttgtaaaattagccaggcatggtggcgcacgcctgtagtcccagctgcttgggaggctgaggtgggagaatcacttgagcccaggagttcgaggctgcagtgagccaggatcatgccactgcactccagcctggtccacagagagacactgtcaccccctttcccccacaagactggcagaggctgggcagcctggggctgatgaagcagagatgttcgctggatcccaggccctggcacccctcaggaaatacaagaaaaagaatattcacatctgtttaatgtgcataaagccaaggaaagg

SEQ ID NO: 129770 - DNA, 759 bp, Homo sapiens
  Payload ID: 5384
  Gene Symbol: ERN2
  Gene Name: endoplasmic reticulum to nucleus signaling 2
  ENST ID: ENST00000562458
  CDS Start-End: 1-72
gagcttctgcagctcctgccaccagacagtcctacaaggtggttgcccgggacctggttggagccatgttgagcccactgccgcagccacgcccctctgccccccaggtgctggcccaccccttcttttggagcagagccaagcaactccagttcttccaggacgtcagtgactggctggagaaggagtccgagcaggagcccctggtgagggcactggaggcgggaggctgcgcagtggtccgggacaactggcacgagcacatctccatgccgctgcagacagatctgagaaagttccggtcctataaggggacatcagtgcgagacctgctccgtgctgtgaggaacaagaagcaccactacagggagctcccagttgaggtgcgacaggcactcggccaagtccctgatggcttcgtccagtacttcacaaaccgcttcccacggctgctcctccacacgcaccgagccatgaggagctgcgcctctgagagcctcttcctgccctactacccgccagactcagaggccaggaggccatgccctggggccacagggaggtgaggtgggctggatgccacacagatggtctccgtgctggctcactgaagagctgagcctgtggctggcctcagaatcaggctgggtgcagtggctcacacctgtaatcccagcattttgggaggctgagtgagaggatcacttgagctcaggagttcgagaccagcctggccaacatggcaacaccccatttcta

SEQ ID NO: 129771 - DNA, 2263 bp, Homo sapiens
  Payload ID: 5384
  Gene Symbol: ERN2
  Gene Name: endoplasmic reticulum to nucleus signaling 2
  ENST ID: ENST00000562562
  CDS Start-End: 36-425
agggacctggccagccgtgcagctgcccaggcgctatggcgagtgcggtcagggggtcgaggccgtggccccggctggggctccagctccagttcgcggcgctgctgctcgggacgctgagtccacaggttcatactctcaggccagagaacctcctgctggtgtccaccttggatggaagtctccacgcactaagcaagcagacaggggacctgaagtggactctgagggatgatcccgtcatcgaaggaccaatgtacgtcacagaaatggcctttctctctgacccagcagatggcagcctgtacatcttggggacccaaaaacaacagggattaatggctggagtgcagtggtacgatcacaaggctcactgcagcctcgaactcctggcctcaagcaatcctcgcacctcagtatcctgagtagctggaactacagaaactgccattcaccatccctgagctggttcatgcctctccctgccgcagctctgatggggtcttctacacaggccggaagcaggatgcctggtttgtggtggaccctgagtcaggggagacccagatgacactgaccacagagggtccctccaccccccgcctctacattggccgaacacagtatacggtcaccatgcatgacccaagagccccagccctgcgctggaacaccacctaccgccgctactcagcgccccccatggatggctcacctgggaaatacatgagccacctggcgtcctgcgggatgggcctgctgctcactgtggacccaggaagcgggacggtgctgtggacacaggacctgggcgtgcctgtgatgggcgtctacacctggcaccaggacggcctgcgccagctgccgcatctcacgctggctcgagacactctgcatttcctcgccctccgctggggccacatccgactgcctgcctcaggcccccgggacacagccaccctcttctctaccttggacacccagctgctaatgacgctgtatgtggggaaggatgaaactggcttctatgtctctaaagcactggtccacacaggagtggccctggtgcctcgtggactgaccctggcccccgcagatggccccaccacagatgaggtgacactccaagtctcaggagagcgagagggctcacccagcactgctgttagatacccctcaggcagtgtggccctcccaagccagtggctgctcattggacaccacgagctacccccagtcctgcacaccaccatgctgagggtccatcccaccctggggagtggaactgcagagacaagacctccagagaatacccaggccccagccttcttcttggagctattgagcctgagccgagagaaactttgggactccgagctgcatccagaagaaaaaactccagactcttacttggggctgggaccccaagacctgctggcagctagcctcactgctgtcctcctgggagggtggattctctttgtgatgaggcaggtaggcccaccgccctgacctcaggtctatctggggagaacgctgcttctcctctctgagaccactcagcaactctctccctctacccagctctgattttgccccctgcctccctcccagcagctccccaggcccctgcgatcttgctctgtaagttcatgcagtctggtgaggccatctcagtcacagatactgggcccatcacggggcagggcgtggccaggacaaagctctcttaggctctcatgttacagcaacagccgcaggtggtggagaagcagcaggagacccccctggcacctgcagactttgctcacatctcccaggatgcccagtccctgcactcgggggccagccggaggagccagaagaggcttcagagtccctcaaagcaagcccagccactcgacgaccctgaagctgagcaactcaccgtagtggggaagatttccttcaatcccaaggacgtgctgggccgcggggcaggcgggactttcgttttccggggacagtttgagggacgggcagtggctgtcaagcggctcctccgcgagtgctttggcctggttcggcgggaagttcaactgctgcaggagtctgacaggcaccccaacgtgctccgctacttctgcaccgagcggggaccccagttccactacattgccctggagctctgccgggcctccttgcaggagtgcaccgggacctgaagccaggaaatattctcatcaccgggcctgacagccagggcctgggcagagtggtgctc

SEQ ID NO: 129772 - DNA, 980 bp, Homo sapiens
  Payload ID: 5384
  Gene Symbol: ERN2
  Gene Name: endoplasmic reticulum to nucleus signaling 2
  ENST ID: ENST00000569903
  CDS Start-End: 24-266
agccgtgcagctgcccaggcgctatggcgagtgcggtcagggggtcgaggccgtggccccggctggggctccagctccagttcgcggcgctgctgctcgggacgctgagtccacaggggtgcggctgggccacccggatgttaggcctcctgctgggagctcagcctcaccctgtttgctcaaggagggactggagcaggttcatactctcaggccagagaacctcctgctggtgtccaccttggatggaagtctccacgcactaagcaagcagacaggggacctgaagtggactctgagggatgatcccgtcatcgaaggaccaatgtacgtcacagaaatggcctttctctctgacccagcagatggcagcctgtacatcttggggacccaaaaacaacagggattaatggtttgtatcccatggtgttcgggaatgggtgagagccagggctttcgtcagctggagcactgagaggtggagaggcagtatggtcagtatctcctgttctgcagaggatataagtcaggactcagcacattgtgagaaggctgtctgagggacctgttgaaagggtggtaaggggaggtctggctgtgtctgcagggcaatctgactatcaagctggaggtatcccagggccttctccaggactctgagggctttaaagagaaatgtatataccagttagcttttgctaaataaaaatcaacccaaaactcaagagcttaaaactaaaacatcacttaaatttattcaactcagaatttggtgagatgacaatttaggttgggctcagcacagtggttcttctgctggtcttgactgaacttgttcatgcatgtgtggtcagctgctagtcaactggatggctgtgtttctgaaagttggttggtagttggttggcttttggcagaggtggctgggccatatgtctcttatccctagcaggcaagcctaggcttgttcacatgatatc

SEQ ID NO: 129773 - DNA, 3616 bp, Homo sapiens
  Payload ID: 5384
  Gene Symbol: ERN2
  Gene Name: endoplasmic reticulum to nucleus signaling 2
  ENST ID: ENST00000634482
  CDS Start-End: 170-3094
gcttgtacctgctgtgcagtgaggactccaggaactgatgatgaaccggcacggtcctcggcacgtggcaagttctccataagtgggctcagtaaaatccctctcccgggaaagcgccccaccgtgtttggtggggtgactgggacgcgaggatgcggctgggagtgtgatgagaagggcggggatcggcgaggactccaggctggggttgcaggcccagccaggggcggagccttctccgggtcgggcggggacagagcgctcccttggaggcacccagggacctggccagccgtgcagctgcccaggcgctatggcgagtgcggtcagggggtcgaggccgtggccccggctggggctccagctccagttcgcggcgctgctgctcgggacgctgagtccacaggttcatactctcaggccagagaacctcctgctggtgtccaccttggatggaagtctccacgcactaagcaagcagacaggggacctgaagtggactctgagggatgatcccgtcatcgaaggaccaatgtacgtcacagaaatggcctttctctctgacccagcagatggcagcctgtacatcttggggacccaaaaacaacagggattaatgaaactgccattcaccatccctgagctggttcatgcctctccctgccgcagctctgatggggtcttctacacaggccggaagcaggatgcctggtttgtggtggaccctgagtcaggggagacccagatgacactgaccacagagggtccctccaccccccgcctctacattggccgaacacagtatacggtcaccatgcatgacccaagagccccagccctgcgctggaacaccacctaccgccgctactcagcgccccccatggatggctcacctgggaaatacatgagccacctggcgtcctgcgggatgggcctgctgctcactgtggacccaggaagcgggacggtgctgtggacacaggacctgggcgtgcctgtgatgggcgtctacacctggcaccaggacggcctgcgccagctgccgcatctcacgctggctcgagacactctgcatttcctcgccctccgctggggccacatccgactgcctgcctcaggcccccgggacacagccaccctcttctctaccttggacacccagctgctaatgacgctgtatgtggggaaggatgaaactggcttctatgtctctaaagcactggtccacacaggagtggccctggtgcctcgtggactgaccctggcccccgcagatggccccaccacagatgaggtgacactccaagtctcaggagagcgagagggctcacccagcactgctgttagatacccctcaggcagtgtggccctcccaagccagtggctgctcattggacaccacgagctacccccagtcctgcacaccaccatgctgagggtccatcccaccctggggagtggaactgcagagacaagacctccagagaatacccaggccccagccttcttcttggagctattgagcctgagccgagagaaactttgggactccgagctgcatccagaagaaaaaactccagactcttacttggggctgggaccccaagacctgctggcagctagcctcactgctgtcctcctgggagggtggattctctttgtgatgaggcagcaacagccgcaggtggtggagaagcagcaggagacccccctggcacctgcagactttgctcacatctcccaggatgcccagtccctgcactcgggggccagccggaggagccagaagaggcttcagagtccctcaaagcaagcccagccactcgacgaccctgaagctgagcaactcaccgtagtggggaagatttccttcaatcccaaggacgtgctgggccgcggggcaggcgggactttcgttttccggggacagtttgagggacgggcagtggctgtcaagcggctcctccgcgagtgctttggcctggttcggcgggaagttcaactgctgcaggagtctgacaggcaccccaacgtgctccgctacttctgcaccgagcggggaccccagttccactacattgccctggagctctgccgggcctccttgcaggagtacgtagaaaacccggacctggatcgcgggggtctggagcccgaggtcgtgctgcagcagctgatgtctggcctggcccacctgcactctttacacatagtgcaccgggacctgaagccaggaaatattctcatcaccgggcctgacagccagggcctgggcagagtggtgctctcagacttcggcctctgcaagaagctgcctgctggccgctgtagcttcagcctccactccggcatccccggcacggaaggctggatggcgcccgagcttctgcagctcctgccaccagacagtcctaccagcgctgtggacatcttctctgcaggctgcgtgttctactacgtgctttctggtggcagccacccctttggagacagtctttatcgccaggcaaacatcctcacaggggctccctgtctggctcacctggaggaagaggtccacgacaaggtggttgcccgggacctggttggagccatgttgagcccactgccgcagccacgcccctctgccccccaggtgctggcccaccccttcttttggagcagagccaagcaactccagttcttccaggacgtcagtgactggctggagaaggagtccgagcaggagcccctggtgagggcactggaggcgggaggctgcgcagtggtccgggacaactggcacgagcacatctccatgccgctgcagacagatctgagaaagttccggtcctataaggggacatcagtgcgagacctgctccgtgctgtgaggaacaagaagcaccactacagggagctcccagttgaggtgcgacaggcactcggccaagtccctgatggcttcgtccagtacttcacaaaccgcttcccacggctgctcctccacacgcaccgagccatgaggagctgcgcctctgagagcctcttcctgccctactacccgccagactcagaggccaggaggccatgccctggggccacagggaggtgaggtgggctggatgccacacagatggtctccgtgctggctcactgaagagctgagcctgtggctggcctcagaatcaggctgggtgcagtggctcacacctgtaatcccagcattttgggaggctgagtgagaggatcacttgagctcaggagttcgagaccagcctggccaacatggcaacaccccatttctacaaaaaatttgtaaaattagccaggcatggtggcgcacgcctgtagtcccagctgcttgggaggctgaggtgggagaatcacttgagcccaggagttcgaggctgcagtgagccaggatcatgccactgcactccagcctggtccacagagagacactgtcaccccctttcccccacaagactggcagaggctgggcagcctggggctgatgaagcagagatgttcgctggatcccaggccctggcacccctcaggaaatacaagaaaaagaatattcacatctgtttaatgtgcataaagccaaggaaaggacagttccgaattcaat

SEQ ID NO: 129774 - DNA, 3952 bp, Homo sapiens
  Payload ID: 5385
  Gene Symbol: ERGIC1
  Gene Name: endoplasmic reticulum-golgi intermediate compartment 1
  Uniprot ID: Q969X5
  ENST ID: ENST00000326654
  CDS Start-End: 216-695
gaagcccaggctctccttagttgactgtgtgttaatcacccagcaatttcattactcaacagctctccagagttgcacattacagctggggtagaaattgggtgctgaaggccaggcagagcatttggctgtagggaggccgatcctcctcgggcctgttaccggcgggtctttgttcttagacctggggttcttggcctcacggattccaaggaatggaacgttgggccatgcgtgtgaacgagctctatgtcgatgacccagacaaggacagcggtggcaagatcgacgtcagtctgaacatcagtttacccaatctgcactgcgagttggttgggcttgacattcaggatgagatgggcaggcacgaagtgggccacatcgacaactccatgaagatcccgctgaacaatggggcaggctgccgcttcgaggggcagttcagcatcaacaaggtatggaagccctgcctcagccctttctacctgctcccctttcctgctgtctccccgctccctggaaactggttgtggaggcactcactcgacctgaccctgacacagcccccagcaagcgagggttcgtgtccagctgcctggccgttcctgctgagaatctggatgggggtccaggctccctggggttttaagcccctgatggctggttcaggaaggagctactcttctctccagtgagggggacaatgatgagaagacctgaggatttgcagcccccagccctgggttcaagtcccagctctaccccttcttggcccctacaagtcacttgacccatcttaggctgagggtgtgatggcgataatagtatcacgataccacccacttcacaaagtttgtgtggggattaaatgagctaatgcagattcattcattcagaaaaatttttgaatggcacgttctgtgttccagggtcggtgataggctctggggcagcgttcctgggctggtggggctcccattctggtagagggagacagtctacaaaccagaaagcatcagggatgctaagtgcagtgatgaggaataaagccaaggggagtgagatgaggtgggcttgaaagtaccttgtccgctcagaaggaccattcaaggttcactgttgttttgtcctcagaaccaggagcttcagatcctaagtcaagtgggtgaacgcagtgcccttgggagggccgaggcacccggtggcagctggcagggttttgctcagcacgtgccggccttcctcgaagctcggtactgtcacagtggagcctctcaacaacgctgtgaggcagcaccatttgacaggttaggatgctggggcccagagaggttaagtgtcttgcccgaggtcacacagctatctgcatgtcccacaactccccttcccagccccagccaaactgagccactggccactcctggcttctccttgtccctcctgcagcctctgctcagaacgcccttcctccagaccctgacacctgagctggggttgcaaagtcactggccacatccagcccaaagataaattttgtttgtccagtatagcatttaactgcatcagaaccagtatgaaaagaccaggaatccagatttctggcttttaaaagtcagaggctctcactacactgggtccgtgttcccgctatgacaatgacctggcaccaatgggcagtgttcccctttagagagggtgtgtgctgtcccttcccacagtccctggcaggcggctggaaggccaggcctggtcatctgtcaagcagggtggacttcttacgtgacagttcagggctcccttaagtgctaaagcagaagctgcaaggctttcttaaggtttcgagtgttgctgggagaaatctgctgcatgttgtgggttaaagggagtctctcaccagcccaggccctcaggaggaggagataccaggaggcagggatgctgggggtcgtggttcactgggggctctctctgcccatgagctgccacacagcacctttgccatgccccgtaatttggattttatggtggttgtgatggaaagccatttgagggttttgaacagggaggcaatgtaatcagatttatgccttagaactggactatccaataggttgccaccagccacataaggctatttaaattaattcaaattaaatgtacaattcagtcactcattctcatcaaccacatttcaagtgctcaaagccacgtgctggctaggggccacagcgttagacagtgcagagagaaagcacttccatcgctgaggaaagttctgctggaccgcacacccttagaaggatggctctggtggccgggcgcggtggctcaaacctgtaatcccagcactttgggaggccgaggtgggtggatcacgaggtcaggagatcgagaccatcccggctaacatggtgaaaccctgcctctactaaaaatacaaaaaaaaacaaaattagccgggcgtggttgcgggcacctgtagtcccagctactcaggaggctgaggcgggagaatggcatgaacccgggaggtggagcttgcagtgagccaagatcgtaccactgcactccagtctgggcgacagagtgagactccatctcaaaacaaacaaaaaaaggatggggctgggctggagagggtggcaggcagtggttgtggcagtggagctggggagatgtggtcggattagggaggtagaatcaataagactcagtgaagaatcggatgtgggggtaagggcacatgtggaagcaaagaaacctttgacgtctttgtcttgacaaccgggtggtcctgtttctagacatggaagcttagaaaagcctggagtctgtgggaagtaggtagggctgggcactggtcattccactctggtttcctttggggttcccattaggtgtctacagggagaggtgaaattggaagttggaggtgtggagagttcaggagagggttctggaccacagatgttgaggtgggagtcattagtgaatagatgatgttggaagtcatgggtcctcagagtgggggctccttaagcctccaggccagcagcatcagcatcacctgggagattgttaggaatgcagattctcaggcccccctaagacccaccgactctgtgctagaacaagcgcccctcagagattctgatgccactgaagtttgaggagcattggtttaagcaagattacctacggagaggctgtagatccgtgttctaaacctggggtccacagacacccccaagaagagcggattgaatgcaagagatctatgaagttggatgggggaaaaattgacatctttatttttgctaaactcgatctaaagtttagcatttccatctgcgatgaatgtaggccacaaaccacagtagtattagcagtgcctgggacctcctcaacaacagaaattgccggtatttatagcacgttacagttgttgcagataatttccagagactgtttatatgcaccactgttttaaaattacggtgattggccaggtgcagtggctcacacctgtaatcccagcactttgggaggccaaagtgggtggatcacttgaggagttcaagaccagcctggtcaacatgtcaaaaccctgtacctacaaaaaaatacaaaagttaaccaagcctatgcttgtagtcacagctactcgggaggccgaggtgggagggtcttctgagcccagggaggtagaggcttcagtgagctgagatcgcaccaccacactccagcctgggtgacagagtgaaacccttaatcaatcagtcaataaaaattacagtaattattagacccaccactaggtcatcttatttgatgcatcagtaaagcagcatattcaaatgtggatttttaaatattttaattactatttaaatatctctttactttgtaatcctatgcattttacgcattaaaacattttaagcatttaaaa

SEQ ID NO: 129775 - DNA, 2881 bp, Homo sapiens
  Payload ID: 5385
  Gene Symbol: ERGIC1
  Gene Name: endoplasmic reticulum-golgi intermediate compartment 1
  Uniprot ID: Q969X5
  ENST ID: ENST00000393784
  CDS Start-End: 140-1012
ggcgagtggcgagtggcgagtgtcaggggggcggccggcgggggcggggcggccggaggaggcgttggcagcgggctcggacccacgcggcgccgcggcccgcctggcctgcagcgctcccacccccggcggcggcacgatgccctttgacttcaggaggtttgacatctacaggaaggtgcccaaggaccttacgcagccaacgtacaccggggccattatctccatctgctgctgcctcttcatcctcttcctcttcctctcggagctcaccggatttataacgacagaagttgtgaacgagctctatgtcgatgacccagacaaggacagcggtggcaagatcgacgtcagtctgaacatcagtttacccaatctgcactgcgagttggttgggcttgacattcaggatgagatgggcaggcacgaagtgggccacatcgacaactccatgaagatcccgctgaacaatggggcaggctgccgcttcgaggggcagttcagcatcaacaaggtccccggcaacttccacgtgtccacacacagtgccacagcccagccacagaacccagacatgacgcatgtcatccacaagctctcctttggggacacgctacaggtccagaacatccacggagctttcaatgctctcgggggagcagacagactcacctccaaccccctggcctcccacgactacatcctgaagattgtgcccacggtttatgaggacaagagtggcaagcagcggtactcctaccagtacacggtggccaacaaggaatacgtcgcctacagccacacgggccgcatcatccctgcaatctggttccgctacgacctcagccccatcacggtcaagtacacagagagacggcagccgctgtacagattcatcaccacgatctgtgccatcattggcgggaccttcaccgtcgccggcatcctggactcatgcatcttcacagcctctgaggcctggaagaagatccagctgggcaagatgcattgacgccacacccagcctaatggccgaggaccctgggcatcgccagccttgcctccagtgccctgtctcctttggccctcaatctggtcccaaatctggctgtgtcccaaagggtgtgtgggaagtggggggaaagtagaggatggctcgatgttttgcagctacctcttttccccgtgtttctttttagacaaattacactgcctgaagttgcagttcccctttccctggggagccccaagaacagagtcaggcaaggggtggggagtccagggatcttggggacccctcctaggagagctgcagtctcttccctcaggggaacatcccagaatgcatatcgatcagctctcagccaggcttcgacaatctcgcagcccccactaggtggacacattaatgatttggtttctcccctgggcagccaacctgccccagaggcaccagacctgggctttcagctttgggaccaggctgcccaaaggtactcctttatacacccggcaccttccacgaaagatggtacttcccaagcaagcccctatgatttgtcactatagatggaaccctgacttctgccccatcccttcctgcccaacctagaacccaggcctcaagtctttaccccacccctttcttgttcttccaagaagcagatgcccagttgctcagcagcagcggtagagacttgaatctgcccaccagtcacaaggcgggtcacagattcctcttcctctcttctcctcgttcctctgaaccctccaccaatgtgcctcagcctgtgtgctgtgtggcaacagcattctggttcccactgccaagatctcccaccactctgctgggatctgcagtggcagggagtgggggttgtgtaaaggggaagtcatcttttgagatccagatagacatggtttgtgcacttacgtccagatgggaagcatccttcctgcaaccctaaaataatcatgcagcctctcagacggacgccatcggtcccaaggccttaggtggaggaagcaaagcaggccaggcctgtcctgtccgtggacctctaccttctggactccctacgggtgcagagcacttgggtttctctacagccatcgtggcccacttgacactgtgctcctccatcagctggtcacatgccaacacgttcccagcccctgaggcagctccagggtgccccacctgctcctgaggtgggtccctaccctgctgctcctcttcatcctttcccttttgtcctgaaagggaggagcaatggtccaggcattaattccacccagggaattttagctatgccctcatgtcccagggagagagccacacgcctgttttccatttatagcaagattgtttgcatacttttgtaatgaaggggagtgtccagtggaaggatttttaaaattatcttatggatagctcaagtctctgccatttgtaatttttggctctaagctccgattggagacgcttctccttgtgcatgtgagttgactgatgttgtgagtgtaaatgcatttggttatttctggtatcggtggccacttggatggatttttttacattctgttccccagttacaggaaggagtccctttggtgtgtgaatatgtgtgcctgtagagggtggggcagggtggggtggggatggaaatgtgtggcatgcacatgagttgaaattcttttatgcatttttttgaagaaaaaaaaaaaaacaactctgaggacataggggatgtcagtttcctatggaagagacacctctgacccgttattcttataatcaaaatctgaagggaaaaaaatgttttagttctttccccactcgttgggttcaactagattaaaaggctgattttcagaaata

SEQ ID NO: 129776 - DNA, 586 bp, Homo sapiens
  Payload ID: 5385
  Gene Symbol: ERGIC1
  Gene Name: endoplasmic reticulum-golgi intermediate compartment 1
  ENST ID: ENST00000523291
  CDS Start-End: 4-420
acgatgccctttgacttcaggaggtttgacatctacaggaaggtgcccaaggaccttacgcagccaacgtacaccggggccattatctccatctgctgctgcctcttcatcctcttcctcttcctctcggagctcaccggatttataacgacagaagttgtgaacgagctctatgtcgatgacccagacaaggacagcggtggcaagatcgacgtcagtctgaacatcagtttacccaatctgcactgcgagttggttgggcttgacattcaggatgagatgggcaggcacgaagtgggccacatcgacaactccatgaagatcccgctgaacaatggggcaggctgccgcttcgaggggcagttcagcatcaacaaggaagttgaccagcagccagatgtcagagtttgcgtgttttgagcagcagcggcagcctcaccagagaccccacggtgacctcgtttcatcagccagccccgcaggaggaggacaggatggggtgaggggtatggggcctggctccagctatatgtttttaaaatccatcagagacactgacgtaggttcctaagtcacaggctctaaa

SEQ ID NO: 129777 - DNA, 539 bp, Homo sapiens
  Payload ID: 5385
  Gene Symbol: ERGIC1
  Gene Name: endoplasmic reticulum-golgi intermediate compartment 1
  ENST ID: ENST00000520642
  CDS Start-End: 30-197
gcagcgctcccacccccggcggcggcacgatgccctttgacttcaggaggtttgacatctacaggaaggtgcccaaggaccttacgcagccaacgtacaccggggccattatctccatctgctgctgcctcttcatcctcttcctcttcctctcggagctcaccggatttataacgacagaagttggttgggcttgacattcaggatgagatgggcaggcacgaagtgggccacatcgacaactccatgaagatcccgctgaacaatggggcaggctgccgcttcgaggggcagttcagcatcaacaagaaccaggagcttcagatcctaagtcaagtgggtgaacgcagtgcccttgggagggccgaggcacccggtggcagctggcagggttttgctcagcacgtgccggccttcctcgaagctcggtactgtcacagtggagcctctcaacaacgctgtgaggcagcaccatttgacaggtccccggcaacttccacgtgtccacacacagtgccacagcccagccacagaaccca

SEQ ID NO: 129778 - DNA, 578 bp, Homo sapiens
  Payload ID: 5385
  Gene Symbol: ERGIC1
  Gene Name: endoplasmic reticulum-golgi intermediate compartment 1
  ENST ID: ENST00000519796
  CDS Start-End: 1-163
tgtgaacgagctctatgtcgatgacccagacaaggacagcggtggcaagatcgacgtcagtctgaacatcagtttacccaatctgcactgcgagttctttggaccccagaccatgagctcctggaggtccccagcccggcctgcccctgcaatggatgaatgaaggctcccagagagaacaggctggcccccatcctcccgcgtctctgggtttgtgactgttgtctccctttggctcctgcagtggttgggcttgacattcaggatgagatgggcaggcacgaagtgggccacatcgacaactccatgaagatcccgctgaacaatggggcaggctgccgcttcgaggggcagttcagcatcaacaaggtccccggcaacttccacgtgtccacacacagtgccacagcccagccacagaacccagacatgacgcatgtcatccacaagctctcctttggggacacgctacaggtccagaacatccacggagctttcaatgctctcgggggagcagacagactcacctccaaccccctggcctcccacgactacatcctgaagattgtgcccacggt

SEQ ID NO: 129779 - DNA, 554 bp, Homo sapiens
  Payload ID: 5385
  Gene Symbol: ERGIC1
  Gene Name: endoplasmic reticulum-golgi intermediate compartment 1
  ENST ID: ENST00000518247
  CDS Start-End: 239-554
aggcagcttcctggctgggaagggaagcccaggctctccttagttgactgtgtgttaatcacccagcaatttcattactcaacagctctccagagttgcacattacagctggggtagaaattgggtgctgaaggccaggcagagcatttggctgtagggaggccgatcctcctcgggcctgttaccggcgggtctttgttcttagacctggggttcttggcctcacggattccaaggaatggaacgttgggccatgcgtgtgaacgagctctatgtcgatgacccagacaaggacagcggtggcaagatcgacgtcagtctgaacatcagtttacccaatctgcactgcgagttggttgggcttgacattcaggatgagatgggcaggcacgaagtgggccacatcgacaactccatgaagatcccgctgaacaatggggcaggctgccgcttcgaggggcagttcagcatcaacaaggtccccggcaacttccacgtgtccacacacagtgccacagcccagccacagaacccagacatgacgcatgtcatcc

SEQ ID NO: 129780 - DNA, 2818 bp, Homo sapiens
  Payload ID: 5386
  Gene Symbol: ENSA
  Gene Name: endosulfine alpha
  Uniprot ID: O43768
  ENST ID: ENST00000271690
  CDS Start-End: 108-461
agtgacaggagccgaagcagcagcgcaggttgtccccgtttcccctcccccttcccttctccggttgccttcccgggccccttacactccacagtcccggtcccgccatgtcccagaaacaagaagaagagaaccctgcggaggagaccggcgaggagaagcaggacacgcaggagaaagaaggtattctgcctgagagagctgaagaggcaaagctaaaggccaaatacccaagcctaggacaaaagcctggaggctccgacttcctcatgaagagactccagaaagggcaaaagtactttgactcaggagactacaacatggccaaagccaagatgaagaataagcagctgccaagtgcaggaccagacaagaacctggtgactggtgatcacatccccaccccacaggatctgccccagagaaagtcctcgctcgtcaccagcaagcttgcggggtaacctgagcccccctctcctccccttcctcaaccactggacgtttatatattataggcagggatgaaatgggcacctagtcagatcttctcagcttgctagccagaaatgactgtgattctgctgggggctgctgagaaggtaatgtaggttgaaaaggggctctaagtttatttatttcgttagattgacacttccacacactccctgtagtccaggtagggcccagaaataggaaaggctaggattggataatgctgcaaatgctttttttgtgtgagaaactggagagatgtgatttctccttttgggagagaatgtcccaaaattgattaggctgagccttgggaatagtttggcaggtttaacatcccaaggctaacctaacgtagttgggaaaggtagattgaatgagacatgttttctgtgcttctaagtgttctgtcccttaggctgctattgcttcatgtttccattatggcaggtttagagaatccttaaaaagaaaaattgacttgcttgcctaaaactacagtgcccccttagcctccattacttagtatctcttacagtttgctctggctctcaaataatataaagattgatgaacattattcacagaaaatgggcaccttctctctctcttccagcatgttgcttttgaaagtatcatgggatagtgggacgagcactggtttaggagtcaagatatctgggttctcactctactcagtcccagcagagctgttgtataaccttgattaagtcatttagcctctctggatttctatttcctcatctgtaaaatagagttaaatgtatgtaagattgattctgattctgaagtcttaactgccagcagaaaaactccatactgttcattgtaaaactaaaagtgaggaaggctcgtgggtggtgaacctctgctctgtaatactgggaaagtactacagaggggaaccatttgagggatacatgaggagagagtaaattgaggtttggggattataaattcaggcaagagaaccttatagatatcacagtcttgagggtcaaaaaaaaatacttaggaagctagccatggaagcttcttgcctctgacccagcccactttcccagcctacctctgggccttagctgctaaaaagcttctctggcagcggagctgcaggcctgaggaaacatgctcagtcatgcacatgtgttgacccatgtttcagatgcagtctgatgccaggtatattgttagggaaagaggaagaagggtaaactgagctagcccctggggctgagtactcctgcagggctggaggaacaggttcttagaagatgattcaccttggaggaagctggggaaagtggttagggagggagaggaggaagactgagaaatctctgcatccccagaactcagcaacccagctcttttatcatgaggagaggtagccatgctgactcatgaacaggtggaggaaaggggttgcaggtgaccagcatcttcaatctagttaccaccagcttggctagaattttattgaacgcaacttgctagttatgacagagaggaccagggtgagaactaatgctcaagagagcaagattctgtaatcctcttgccctctcacatcacaaattctgatatgccaaacatttggcccaatgagaatgactgatagacttgctgatgtgcatgtggggggatgaggtgtgtatatgcctttctcctgactggccattcagtgttcaggctgtcattcaaattggataggagaaagttggtgaggaaggaatggagagagcaggatccctggactccctggtccccaaactccttgactgtcacttgtaattgtatataatttttgtgtttcttgctccatttcctcatgctgtcatccttaaagtccatctgggaaggggaaaatgctgaacaccattgtatagtttcttcaactgtcccagccatgttgtacatagatatgtcatgttattatatatataaatatatatataattttgtacgttttcttcatctccgatcttctcaaattctgtactttttttcttttctgtctgagctgccttctctatcattcagcttgagtcctcaagactactggtcacaatgagtctgatttttaggaaggaataggaggagcagggaaatcagaaaaactgttggtctcactctgtctctctacctggtcatcttcaaggctaagaaaacaaacaagctacattctgtatttgccagtttccacagcatgaagtacatagcttccttagcaaggagtggtcattccaaaatccaaatgcaaattgctttgattaaacctagattattaaatccattcagaaca

SEQ ID NO: 129781 - DNA, 633 bp, Homo sapiens
  Payload ID: 5386
  Gene Symbol: ENSA
  Gene Name: endosulfine alpha
  Uniprot ID: O43768
  ENST ID: ENST00000339643
  CDS Start-End: 107-520
gtgacaggagccgaagcagcagcgcaggttgtccccgtttcccctcccccttcccttctccggttgccttcccgggccccttacactccacagtcccggtcccgccatgtcccagaaacaagaagaagagaaccctgcggaggagaccggcgaggagaagcaggacacgcaggagaaagaaggtattctgcctgagagagctgaagaggcaaagctaaaggccaaatacccaagcctaggacaaaagcctggaggctccgacttcctcatgaagagactccagaaaggggattataaatcattacattggagtgtgcttctctgtgcggatgaaatgcaaaagtactttgactcaggagactacaacatggccaaagccaagatgaagaataagcagctgccaagtgcaggaccagacaagaacctggtgactggtgatcacatccccaccccacaggatctgccccagagaaagtcctcgctcgtcaccagcaagcttgcgggtggccaagttgaatgatgctgcccggggctctgccagatcctgagacgcttcccctccctgccccacccgggtcctgtgctggctcctgccccttcctgcttttgcagccaggggtcaggaggtggctc

SEQ ID NO: 129782 - DNA, 2546 bp, Homo sapiens
  Payload ID: 5386
  Gene Symbol: ENSA
  Gene Name: endosulfine alpha
  ENST ID: ENST00000356527
  CDS Start-End: 108-530
agtgacaggagccgaagcagcagcgcaggttgtccccgtttcccctcccccttcccttctccggttgccttcccgggccccttacactccacagtcccggtcccgccatgtcccagaaacaagaagaagagaaccctgcggaggagaccggcgaggagaagcaggacacgcaggagaaagaaggtattctgcctgagagagctgaagaggcaaagctaaaggccaaatacccaagcctaggacaaaagcctggaggctccgacttcctcatgaagagactccagaaaggggtatggggcatagtctcttaccctctttctttggagctaaaggaggttcttcgaatgaagtctgtagagcaaaagtactttgactcaggagactacaacatggccaaagccaagatgaagaataagcagctgccaagtgcaggaccagacaagaacctggtgactggtgatcacatccccaccccacaggatctgccccagagaaagtcctcgctcgtcaccagcaagcttgcggggtaacctgagcccccctctcctccccttcctcaaccactggacgtttatatattataggcagggatgaaatgggcacctagtcagatcttctcagcttgctagccagaaatgactgtgattctgctgggggctgctgagaaggtaatgtaggttgaaaaggggctctaagtttatttatttcgttagattgacacttccacacactccctgtagtccaggtagggcccagaaataggaaaggctaggattggataatgctgcaaatgctttttttgtgtgagaaactggagagatgtgatttctccttttgggagagaatgtcccaaaattgattaggctgagccttgggaatagtttggcaggtttaacatcccaaggctaacctaacgtagttgggaaaggtagattgaatgagacatgttttctgtgcttctaagtgttctgtcccttaggctgctattgcttcatgtttccattatggcaggtttagagaatccttaaaaagaaaaattgacttgcttgcctaaaactacagtgcccccttagcctccattacttagtatctcttacagtttgctctggctctcaaataatataaagattgatgaacattattcacagaaaatgggcaccttctctctctcttccagcatgttgcttttgaaagtatcatgggatagtgggacgagcactggtttaggagtcaagatatctgggttctcactctactcagtcccagcagagctgttgtataaccttgattaagtcatttagcctctctggatttctatttcctcatctgtaaaatagagttaaatgtatgtaagattgattctgattctgaagtcttaactgccagcagaaaaactccatactgttcattgtaaaactaaaagtgaggaaggctcgtgggtggtgaacctctgctctgtaatactgggaaagtactacagaggggaaccatttgagggatacatgaggagagagtaaattgaggtttggggattataaattcaggcaagagaaccttatagatatcacagtcttgagggtcaaaaaaaaatacttaggaagctagccatggaagcttcttgcctctgacccagcccactttcccagcctacctctgggccttagctgctaaaaagcttctctggcagcggagctgcaggcctgaggaaacatgctcagtcatgcacatgtgttgacccatgtttcagatgcagtctgatgccaggtatattgttagggaaagaggaagaagggtaaactgagctagcccctggggctgagtactcctgcagggctggaggaacaggttcttagaagatgattcaccttggaggaagctggggaaagtggttagggagggagaggaggaagactgagaaatctctgcatccccagaactcagcaacccagctcttttatcatgaggagaggtagccatgctgactcatgaacaggtggaggaaaggggttgcaggtgaccagcatcttcaatctagttaccaccagcttggctagaattttattgaacgcaacttgctagttatgacagagaggaccagggtgagaactaatgctcaagagagcaagattctgtaatcctcttgccctctcacatcacaaattctgatatgccaaacatttggcccaatgagaatgactgatagacttgctgatgtgcatgtggggggatgaggtgtgtatatgcctttctcctgactggccattcagtgttcaggctgtcattcaaattggataggagaaagttggtgaggaaggaatggagagagcaggatccctggactccctggtccccaaactccttgactgtcacttgtaattgtatataatttttgtgtttcttgctccatttcctcatgctgtcatccttaaagtccatctgggaaggggaaaatgctgaacaccattgtatagtttcttcaactgtcccagccatgttgtacatagatatgtcatgttattatatatataaatatatatataattttg

SEQ ID NO: 129783 - DNA, 792 bp, Homo sapiens
  Payload ID: 5386
  Gene Symbol: ENSA
  Gene Name: endosulfine alpha
  Uniprot ID: O43768
  ENST ID: ENST00000361532
  CDS Start-End: 36-389
ggcgggtggttggaaagacggtgaatggaaaggggatggctggtggtcttgggtgtgatgtgtgttattggtttgtagaggacacgcaggagaaagaaggtattctgcctgagagagctgaagaggcaaagctaaaggccaaatacccaagcctaggacaaaagcctggaggctccgacttcctcatgaagagactccagaaagggcaaaagtactttgactcaggagactacaacatggccaaagccaagatgaagaataagcagctgccaagtgcaggaccagacaagaacctggtgactggtgatcacatccccaccccacaggatctgccccagagaaagtcctcgctcgtcaccagcaagcttgcgggtggccaagttgaatgatgctgcccggggctctgccagatcctgagacgcttcccctccctgccccacccgggtcctgtgctggctcctgccccttcctgcttttgcagccaggggtcaggaggtggctcgggtgtgggctggagaggcagaagccctttcctgttggtgtcccagcacatggagccccttgggctgagcaccaagaccttgaaccttttttgttttaccttttttccaaataacagttgggagaaatatcaatgaaattctgggggtgggggtggggttgaaagggtggggtgggagatatggaggagtatgaattagggcttggagttggtaaaaacattcctgactatccttcttaaccacgtggctgatgtggggtaggtatgaggggaaggaagtggagtagcct

SEQ ID NO: 129784 - DNA, 703 bp, Homo sapiens
  Payload ID: 5386
  Gene Symbol: ENSA
  Gene Name: endosulfine alpha
  Uniprot ID: O43768
  ENST ID: ENST00000362052
  CDS Start-End: 108-425
agtgacaggagccgaagcagcagcgcaggttgtccccgtttcccctcccccttcccttctccggttgccttcccgggccccttacactccacagtcccggtcccgccatgtcccagaaacaagaagaagagaaccctgcggaggagaccggcgaggagaagcaggacacgcaggagaaagaaggtattctgcctgagagagctgaagaggcaaagctaaaggccaaatacccaagcctaggacaaaagcctggaggctccgacttcctcatgaagagactccagaaaggggtatggggcatagtctcttaccctctttctttggagctaaaggaggttcttcgaatgaagtctgtagaggttctactggatccttttctggaggttttgttgttgaacagaagtagaggcgaatttgaaatttgaaaagagcaagtcaaattaatgtaaatccctgatgtggtatcaattccctcctgatttcccatgtaggaaattaaggcctaaattggagcatttgggtgtgtggggaaatgagggaaagatgttagaaactgaaatgcagactgcccccaggcatttgcctgtttgaatgttggaggttttaggattgtgcactttttaagcattagagataaattttgggatgcatcatttcagaagaagatcaaaccatctctcctacagaaataaatcctcaactt

SEQ ID NO: 129785 - DNA, 725 bp, Homo sapiens
  Payload ID: 5386
  Gene Symbol: ENSA
  Gene Name: endosulfine alpha
  Uniprot ID: O43768
  ENST ID: ENST00000361631
  CDS Start-End: 24-425
gaaagacggtgaatggaaaggggatggctggtggtcttgggtgtgatgtgtgttattggtttgtagaggacacgcaggagaaagaaggtattctgcctgagagagctgaagaggcaaagctaaaggccaaatacccaagcctaggacaaaagcctggaggctccgacttcctcatgaagagactccagaaaggggattataaatcattacattggagtgtgcttctctgtgcggatgaaatgcaaaagtactttgactcaggagactacaacatggccaaagccaagatgaagaataagcagctgccaagtgcaggaccagacaagaacctggtgactggtgatcacatccccaccccacaggatctgccccagagaaagtcctcgctcgtcaccagcaagcttgcgggtggccaagttgaatgatgctgcccggggctctgccagatcctgagacgcttcccctccctgccccacccgggtcctgtgctggctcctgccccttcctgcttttgcagccaggggtcaggaggtggctcgggtgtgggctggagaggcagaagccctttcctgttggtgtcccagcacatggagccccttgggctgagcaccaagaccttgaaccttttttgttttaccttttttccaaataacagttgggagaaatatcaatgaaattctgggggtgggggtggggttgaaagggtggggtgggagatatggagg

SEQ ID NO: 129786 - DNA, 2085 bp, Homo sapiens
  Payload ID: 5386
  Gene Symbol: ENSA
  Gene Name: endosulfine alpha
  Uniprot ID: O43768
  ENST ID: ENST00000369014
  CDS Start-End: 127-492
attttgactgagcaaccctagtgacaggagccgaagcagcagcgcaggttgtccccgtttcccctcccccttcccttctccggttgccttcccgggccccttacactccacagtcccggtcccgccatgtcccagaaacaagaagaagagaaccctgcggaggagaccggcgaggagaagcaggacacgcaggagaaagaaggtattctgcctgagagagctgaagaggcaaagctaaaggccaaatacccaagcctaggacaaaagcctggaggctccgacttcctcatgaagagactccagaaagggcaaaagtactttgactcaggagactacaacatggccaaagccaagatgaagaataagcagctgccaagtgcaggaccagacaagaacctggtgactggtgatcacatccccaccccacaggatctgccccagagaaagtcctcgctcgtcaccagcaagcttgcgggtggccaagttgaatgatgctgcccggggctctgccagatcctgagacgcttcccctccctgccccacccgggtcctgtgctggctcctgccccttcctgcttttgcagccaggggtcaggaggtggctcgggtgtgggctggagaggcagaagccctttcctgttggtgtcccagcacatggagccccttgggctgagcaccaagaccttgaaccttttttgttttaccttttttccaaataacagttgggagaaatatcaatgaaattctgggggtgggggtggggttgaaagggtggggtgggagatatggaggagtatgaattagggcttggagttggtaaaaacattcctgactatccttcttaaccacgtggctgatgtggggtaggtatgaggggaaggaagtggagtagcctaatgaaaaggggttctagttgagctctgtagataaatgccttgtttcagtgtggttggagacctggtgtcagataaaagaaactccatccgcacagacagatgcaaacagctcctctagttctgcagagctagttgagaactcaacattaatcattttaaaaagtactgtccttgaaatagatttgctgtgggaagaagggcagtgagtgtgggagaaaggagccgtgagcgtggggaaccccacagagcccaaaggactttttcagtattcgaaataaacaaaacaaaaacccatgaaaaaacccaacccagaaatattctgaagcagttggtgtgttttattggggtttgggagggggaagaaaacaatactgaagacattgttaatgtgagatgcggctgagttccccaataccatcacttaggaaagggagcaggaatgttggcataaaccttgcccatccctttgtttctgtaaccaatgtagaaggtgcatcaacctcagtttgtggctcacaaaatgaggcatttaagatatttgatctaaatggtttcttgacacctaagcctagtccaggtttagcagaaaaggaggcccagtctccttttccctctgtcttccattccttttcaagttcccatgtttgtgagggagaaatgtgacaaaccaaaagaaatatattatttctttgtaataagccaaaagaaactcaagtctttctgctggtggccagcaggaggcagagtgatttctttcctcatgatgtgccaatctgcattgctggaaacctgctactgaaagaagttaaaagctgcctgtgaatgtaacgtacaaaagaaaggttaccaaaggagaaaaaactccagcgggtgtacggtggctcacgcctataattccagcactttgggaggccaaggtgggtggatcacttgaggtcaggagtttgagaccagcctagccaacatggtgaaaccccatctctactaaaaatacaaaaattagccgggcgtggcggcacatgcctataatcccacttacttgggaggctgaggtaggagaatcgcttgaacccaggaggcagagtttgcagtgagccgagattgtgccattgcactccagcctgggcgacagagcgagactccatctaaaaaaaataaatgaataaaataaaacaagtacaaatttaaa

SEQ ID NO: 129787 - DNA, 923 bp, Homo sapiens
  Payload ID: 5386
  Gene Symbol: ENSA
  Gene Name: endosulfine alpha
  ENST ID: ENST00000369016
  CDS Start-End: 97-660
ccgaagcagcagcgcaggttgtccccgtttcccctcccccttcccttctccggttgccttcccgggccccttacactccacagtcccggtcccgccatgtcccagaaacaagaagaagagaaccctgcggaggagaccggcgaggagaagcaggacacgcaggagaaagaaggtattctgcctgagagagctgaagaggcaaagctaaaggccaaatacccaagcctaggacaaaagcctggaggctccgacttcctcatgaagagactccagaaaggggattataaatcattacattggagtgtgcttctctgtgcggatgaaatgcaaaagtactttgactcaggagactacaacatggccaaagccaagatgaagaataagcagctgccaagtgcaggaccagacaagaacctggtgactggtgatcacatccccaccccacaggatctgccccagagaaagtcctcgctcgtcaccagcaagcttgcgggacaaagttttgctcttgtcgcccaggctggagtgcaatggcatgatctctgcttactgcaacctctgcctcctgggttcaagcgattctcctgcctcagcctcctgagtagctgggattacaggcatgcaacaccacgcccggctaattttgtaatttttttgtagagacggggtttcatcacgttagccaggctggtctcaaactcctgacctcaggtaatccacccacctcggcctcccaaagtgctgggattacaggcatgagccactgcacctggcctctctacggtaaatattgaaagttgctgggtcacagggtatgcacatttaaattttttttttctttttaaagggacagagtcttgctctgttgcccaggctggagtacagtgacgcaatcttggctcaatgcaacctccgcctcccgg

SEQ ID NO: 129788 - DNA, 793 bp, Homo sapiens
  Payload ID: 5386
  Gene Symbol: ENSA
  Gene Name: endosulfine alpha
  Uniprot ID: O43768
  ENST ID: ENST00000503345
  CDS Start-End: 112-429
ccctagtgacaggagccgaagcagcagcgcaggttgtccccgtttcccctcccccttcccttctccggttgccttcccgggccccttacactccacagtcccggtcccgccatgtcccagaaacaagaagaagagaaccctgcggaggagaccggcgaggagaagcaggacacgcaggagaaagaaggtattctgcctgagagagctgaagaggcaaagctaaaggccaaatacccaagcctaggacaaaagcctggaggctccgacttcctcatgaagagactccagaaaggggtatggggcatagtctcttaccctctttctttggagctaaaggaggttcttcgaatgaagtctgtagaggttctactggatccttttctggaggttttgttgttgaacagaagtagaggcgaatttgaaatttgaaaagagcaagtcaaattaatcaaaagtactttgactcaggagactacaacatggccaaagccaagatgaagaataagcagctgccaagtgcaggaccagacaagaacctggtgactggtgatcacatccccaccccacaggatctgccccagagaaagtcctcgctcgtcaccagcaagcttgcggggtaacctgagcccccctctcctccccttcctcaaccactggacgtttatatattataggcagggatgaaatgggcacctagtcagatcttctcagcttgctagccagaaatgactgtgattctgctgggggctgctgagaaggtaatgtaggttgaaaaggggctctaagtttattt

SEQ ID NO: 129789 - DNA, 1369 bp, Homo sapiens
  Payload ID: 5386
  Gene Symbol: ENSA
  Gene Name: endosulfine alpha
  Uniprot ID: O43768
  ENST ID: ENST00000513281
  CDS Start-End: 12-353
atggaaaggggatggctggtggtcttgggtgtgatgtgtgttattggtttgtagaggacacgcaggagaaagaaggtattctgcctgagagagctgaagaggcaaagctaaaggccaaatacccaagcctaggacaaaagcctggaggctccgacttcctcatgaagagactccagaaagggcaaaagtactttgactcaggagactacaacatggccaaagccaagatgaagaataagcagctgccaagtgcaggaccagacaagaacctggtgactggtgatcacatccccaccccacaggatctgccccagagaaagtcctcgctcgtcaccagcaagcttgcggggtaacctgagcccccctctcctccccttcctcaaccactggacgtttatatattataggcagggatgaaatgggcacctagtcagatcttctcagcttgctagccagaaatgactgtgattctgctgggggctgctgagaaggtaatgtaggttgaaaaggggctctaagtttatttatttcgttagattgacacttccacacactccctgtagtccaggtagggcccagaaataggaaaggctaggattggataatgctgcaaatgctttttttgtgtgagaaactggagagatgtgatttctccttttgggagagaatgtcccaaaattgattaggctgagccttgggaatagtttggcaggtttaacatcccaaggctaacctaacgtagttgggaaaggtagattgaatgagacatgttttctgtgcttctaagtgttctgtcccttaggctgctattgcttcatgtttccattatggcaggtttagagaatccttaaaaagaaaaattgacttgcttgcctaaaactacagtgcccccttagcctccattacttagtatctcttacagtttgctctggctctcaaataatataaagattgatgaacattattcacagaaaatgggcaccttctctctctcttccagcatgttgcttttgaaagtatcatgggatagtgggacgagcactggtttaggagtcaagatatctgggttctcactctactcagtcccagcagagctgttgtataaccttgattaagtcatttagcctctctggatttctatttcctcatctgtaaaatagagttaaatgtatgtaagattgattctgattctgaagtcttaactgccagcagaaaaactccatactgttcattgtaaaactaaaagtgaggaaggctcgtgggtggtgaacctctgctctgtaatactgggaaagtactacagaggggaaccatttgagggatacatgaggagagagtaaattgaggtttggggattataaattcaggc

SEQ ID NO: 129790 - DNA, 574 bp, Homo sapiens
  Payload ID: 5386
  Gene Symbol: ENSA
  Gene Name: endosulfine alpha
  Uniprot ID: O43768
  ENST ID: ENST00000503241
  CDS Start-End: 90-491
agcagcgcaggttgtccccgtttcccctcccccttcccttctccggttgccttcccgggccccttacactccacagtcccggtcccgccatgtcccagaaacaagaagaagagaaccctgcggaggagaccggcgaggagaagcaggacacgcaggagaaagaaggtattctgcctgagagagctgaagaggcaaagctaaaggccaaatacccaagcctaggacaaaagcctggaggctccgacttcctcatgaagagactccagaaaggggattataaatcattacattggagtgtgcttctctgtgcggatgaaatgcaaaagtactttgactcaggagactacaacatggccaaagccaagatgaagaataagcagctgccaagtgcaggaccagacaagaacctggtgactggtgatcacatccccaccccacaggatctgccccagagaaagtcctcgctcgtcaccagcaagcttgcggggtaacctgagcccccctctcctccccttcctcaaccactggacgtttatatattataggcagggatgaaatgggcacctagtcagat

SEQ ID NO: 129791 - DNA, 716 bp, Homo sapiens
  Payload ID: 5386
  Gene Symbol: ENSA
  Gene Name: endosulfine alpha
  Uniprot ID: O43768
  ENST ID: ENST00000509582
  CDS Start-End: 33-350
ggccccttacactccacagtcccggtcccgccatgtcccagaaacaagaagaagagaaccctgcggaggagaccggcgaggagaagcaggacacgcaggagaaagaaggtattctgcctgagagagctgaagaggcaaagctaaaggccaaatacccaagcctaggacaaaagcctggaggctccgacttcctcatgaagagactccagaaaggggtatggggcatagtctcttaccctctttctttggagctaaaggaggttcttcgaatgaagtctgtagaggttctactggatccttttctggaggttttgttgttgaacagaagtagaggcgaatttgaaatttgaaaagagcaagtcaaattaatgattataaatcattacattggagtgtgcttctctgtgcggatgaaatgcaaaagtactttgactcaggagactacaacatggccaaagccaagatgaagaataagcagctgccaagtgcaggaccagacaagaacctggtgactggtgatcacatccccaccccacaggatctgccccagagaaagtcctcgctcgtcaccagcaagcttgcgggtggccaagttgaatgatgctgcccggggctctgccagatcctgagacgcttcccctccctgccccacccgggtcctgtgctggctcctgccccttcctgcttttgcagccaggggtcaggaggtggctcgg

SEQ ID NO: 129792 - DNA, 1826 bp, Homo sapiens
  Payload ID: 5387
  Gene Symbol: ESAM
  Gene Name: endothelial cell adhesion molecule
  Uniprot ID: Q96AP7
  ENST ID: ENST00000278927
  CDS Start-End: 131-1303
gggctggagccgccctgggtgtcagcggctcggctcccgcgcacgctccggccgtcgcgcagcctcggcacctgcaggtccgtgcgtcccgcggctggcgcccctgactccgtcccggccagggagggccatgatttccctcccggggcccctggtgaccaacttgctgcggtttttgttcctggggctgagtgccctcgcgcccccctcgcgggcccagctgcaactgcacttgcccgccaaccggttgcaggcggtggagggaggggaagtggtgcttccagcgtggtacaccttgcacggggaggtgtcttcatcccagccatgggaggtgccctttgtgatgtggttcttcaaacagaaagaaaaggaggatcaggtgttgtcctacatcaatggggtcacaacaagcaaacctggagtatccttggtctactccatgccctcccggaacctgtccctgcggctggagggtctccaggagaaagactctggcccctacagctgctccgtgaatgtgcaagacaaacaaggcaaatctaggggccacagcatcaaaaccttagaactcaatgtactggttcctccagctcctccatcctgccgtctccagggtgtgccccatgtgggggcaaacgtgaccctgagctgccagtctccaaggagtaagcccgctgtccaataccagtgggatcggcagcttccatccttccagactttctttgcaccagcattagatgtcatccgtgggtctttaagcctcaccaacctttcgtcttccatggctggagtctatgtctgcaaggcccacaatgaggtgggcactgcccaatgtaatgtgacgctggaagtgagcacagggcctggagctgcagtggttgctggagctgttgtgggtaccctggttggactggggttgctggctgggctggtcctcttgtaccaccgccggggcaaggccctggaggagccagccaatgatatcaaggaggatgccattgctccccggaccctgccctggcccaagagctcagacacaatctccaagaatgggaccctttcctctgtcacctccgcacgagccctccggccaccccatggccctcccaggcctggtgcattgacccccacgcccagtctctccagccaggccctgccctcaccaagactgcccacgacagatggggcccaccctcaaccaatatcccccatccctggtggggtttcttcctctggcttgagccgcatgggtgctgtgcctgtgatggtgcctgcccagagtcaagctggctctctggtatgatgaccccaccactcattggctaaaggatttggggtctctccttcctataagggtcacctctagcacagaggcctgagtcatgggaaagagtcacactcctgacccttagtactctgcccccacctctctttactgtgggaaaaccatctcagtaagacctaagtgtccaggagacagaaggagaagaggaagtggatctggaattgggaggagcctccacccacccctgactcctccttatgaagccagctgctgaaattagctactcaccaagagtgaggggcagagacttccagtcactgagtctcccaggcccccttgatctgtaccccacccctatctaacaccacccttggctcccactccagctccctgtattgatataacctgtcaggctggcttggttaggttttactggggcagaggatagggaatctcttattaaaactaacatgaaatatgtgttgttttcatttgcaaatttaaataaagatacataatgtttgtatgagataagaaacaa

SEQ ID NO: 129793 - DNA, 1833 bp, Homo sapiens
  Payload ID: 5387
  Gene Symbol: ESAM
  Gene Name: endothelial cell adhesion molecule
  ENST ID: ENST00000417453
  CDS Start-End: 127-864
tggagccgccctgggtgtcagcggctcggctcccgcgcacgctccggccgtcgcgcagcctcggcacctgcaggtccgtgcgtcccgcggctggcgcccctgactccgtcccggccagggagggccatgatttccctcccggggcccctggtgaccaacttgctgcggtttttgttcctggggctgagtgccctcgcgcccccctcgcgggcccagctgcaactgcacttgcccgccaaccggttgcaggcggtggagggaggggaagtggtgcttccagcgtggtacaccttgcacggggaggtgtcttcatcccagccatgggaggtgccctttgtgatgtggttcttcaaacagaaagaaaaggaggatcaggtgttgtcctacatcaatggggtcacaacaagcaaacctggagtatccttggtctactccatgccctcccggaacctgtccctgcggctggagggtctccaggagaaagactctggcccctacagctgctccgtgaatgtgcaagacaaacaaggcaaatctaggggccacagcatcaaaaccttagaactcaatgtactggttcctccagctcctccatcctgccgtctccagggtgtgccccatgtgggggcaaacgtgaccctgagctgccagtctccaaggagtaagcccgctgtccaataccagtgggatcggcagcttccatccttccagactttctttgcaccagcattagatgtcatccgtgggtctttaagcctcaccaacctttcgtcttccatggctggagtctatgtctgcaaggcccacaatgaggtgggcactgcccaatgtaatgtgacgctggaagtgagcacaggtcagtgagggggcctggagctgcagtggttgctggagctgttgtgggtaccctggttggactggggttgctggctgggctggtcctcttgtaccaccgccggggcaaggccctggaggagccagccaatgatatcaaggaggatgccattgctccccggaccctgccctggcccaagagctcagacacaatctccaagaatgggaccctttcctctgtcacctccgcacgagccctccggccaccccatggccctcccaggcctggtgcattgacccccacgcccagtctctccagccaggccctgccctcaccaagactgcccacgacagatggggcccaccctcaaccaatatcccccatccctggtggggtttcttcctctggcttgagccgcatgggtgctgtgcctgtgatggtgcctgcccagagtcaagctggctctctggtatgatgaccccaccactcattggctaaaggatttggggtctctccttcctataagggtcacctctagcacagaggcctgagtcatgggaaagagtcacactcctgacccttagtactctgcccccacctctctttactgtgggaaaaccatctcagtaagacctaagtgtccaggagacagaaggagaagaggaagtggatctggaattgggaggagcctccacccacccctgactcctccttatgaagccagctgctgaaattagctactcaccaagagtgaggggcagagacttccagtcactgagtctcccaggcccccttgatctgtaccccacccctatctaacaccacccttggctcccactccagctccctgtattgatataacctgtcaggctggcttggttaggttttactggggcagaggatagggaatctcttattaaaactaacatgaaatatgtgttgttttcatttgcaaatttaaataaagatacataatgtttgtatgagataagaaacaa

SEQ ID NO: 129794 - DNA, 560 bp, Homo sapiens
  Payload ID: 5387
  Gene Symbol: ESAM
  Gene Name: endothelial cell adhesion molecule
  Uniprot ID: Q96AP7
  ENST ID: ENST00000444566
  CDS Start-End: 137-560
agacttgggctggagccgccctgggtgtcagcggctcggctcccgcgcacgctccggccgtcgcgcagcctcggcacctgcaggtccgtgcgtcccgcggctggcgcccctgactccgtcccggccagggagggccatgatttccctcccggggcccctggtgaccaacttgctgcggtttttgttcctggggctgagtgccctcgatgtcatccgtgggtctttaagcctcaccaacctttcgtcttccatggctggagtctatgtctgcaaggcccacaatgaggtgggcactgcccaatgtaatgtgacgctggaagtgagcacagggcctggagctgcagtggttgctggagctgttgtgggtaccctggttggactggggttgctggctgggctggtcctcttgtaccaccgccggggcaaggccctggaggagccagccaatgatatcaaggtgaggtctcctttaggtctcagtttctctgcccctaaaatggagtggctctggaaatggagagatgctcatttctacagagactcctacctcagtaagtggt

SEQ ID NO: 129795 - DNA, 581 bp, Homo sapiens
  Payload ID: 5387
  Gene Symbol: ESAM
  Gene Name: endothelial cell adhesion molecule
  ENST ID: ENST00000435477
  CDS Start-End: 137-581
agacttgggctggagccgccctgggtgtcagcggctcggctcccgcgcacgctccggccgtcgcgcagcctcggcacctgcaggtccgtgcgtcccgcggctggcgcccctgactccgtcccggccagggagggccatgatttccctcccggggcccctggtgaccaacttgctgcggtttttgttcctggggctgagtgccctcgttcctccagctcctccatcctgccgtctccagggtgtgccccatgtgggggcaaacgtgaccctgagctgccagtctccaaggagtaagcccgctgtccaataccagtgggatcggcagcttccatccttccagactttctttgcaccagcattagatgtcatccgtgggtctttaagcctcaccaacctttcgtcttccatggctggagtctatgtctgcaaggcccacaatgaggtgggcactgcccaatgtaatgtgacgctggaagtgagcacagggcctggagctgcagtggttgctggagctgttgtgggtaccctggttggactggggttgctggctgggctggtcctcttgtaccaccgccggggca

SEQ ID NO: 129796 - DNA, 1035 bp, Homo sapiens
  Payload ID: 5388
  Gene Symbol: ECSCR
  Gene Name: endothelial cell surface expressed chemotaxis and apoptosis regulator
  Uniprot ID: Q19T08
  ENST ID: ENST00000618155
  CDS Start-End: 74-691
actccctctctcttctccactatggacagagcctccactgagctgctgcctgcccgccacatacccagctgacatgggcaccgcaggagccatgcagctgtgctgggtgatcctgggcttcctcctgttccgaggccacaactcccagcccacaatgacccagacctctagctctcagggaggccttggcggtctaagtctgaccacagagccagtttcttccaacccaggatacatcccttcctcagaggctaacaggccaagccatctgtccagcactggtaccccaggcgcaggtgtccccagcagtggaagagacggaggcacaagcagagacacatttcaaactgttccccccaattcaaccaccatgagcctgagcatgagggaagatgcgaccatcctgcccagccccacgtcagagactgtgctcactgtggctgcatttggtgttatcagcttcattgtcatcctggtggttgtggtgatcatcctagttggtgtggtcagcctgaggttcaagtgtcggaagagcaaggagtctgaagatccccagaaacctgggagttcagggctgtctgaaagctgctccacagccaatggagagaaagacagcatcacccttatctccatgaagaacatcaacatgaataatggcaaacaaagtctctcagcagagaaggttctttaaaagcaactttgggtccccatgagtccaaggatgatgcagctgccctgtgactacaaggaggaagagatggaattagtagaggcaatgaaccacatgtaaattattttattgtttcatgtctgcttctagatctaaaggacactagcattgccccagatctgggagcaagctaccaacaggggagactctttcctgtatggacagctgctgtggaaatactgcctgcttctcccacctcctcagagccacaggaaagaggaggtgacagagagagagcaaggaaagtgatgaggtggattgatactttctactttgcattaaaattattttctagcctgcagtct

SEQ ID NO: 129797 - DNA, 1002 bp, Homo sapiens
  Payload ID: 5389
  Gene Symbol:
  Gene Name: endothelial cell surface expressed chemotaxis and apoptosis regulator [Source:EntrezGene Acc:641700]
  Uniprot ID: Q19T08
  ENST ID: ENST00000515823
  CDS Start-End: 38-655
actgagctgctgcctgcccgccacatacccagctgacatgggcaccgcaggagccatgcagctgtgctgggtgatcctgggcttcctcctgttccgaggccacaactcccagcccacaatgacccagacctctagctctcagggaggccttggcggtctaagtctgaccacagagccagtttcttccaacccaggatacatcccttcctcagaggctaacaggccaagccatctgtccagcactggtaccccaggcgcaggtgtccccagcagtggaagagacggaggcacaagcagagacacatttcaaactgttccccccaattcaaccaccatgagcctgagcatgagggaagatgcgaccatcctgcccagccccacgtcagagactgtgctcactgtggctgcatttggtgttatcagcttcattgtcatcctggtggttgtggtgatcatcctagttggtgtggtcagcctgaggttcaagtgtcggaagagcaaggagtctgaagatccccagaaacctgggagttcagggctgtctgaaagctgctccacagccaatggagagaaagacagcatcacccttatctccatgaagaacatcaacatgaataatggcaaacaaagtctctcagcagagaaggttctttaaaagcaactttgggtccccatgagtccaaggatgatgcagctgccctgtgactacaaggaggaagagatggaattagtagaggcaatgaaccacatggctggatggggcagcatctcaatcatatagggcacaggacagacctcagtatcaccagcaagaatccattacagttcaacatgtagtacctccagaccttttccctgtgcccctggactccaaggtctatcccaccctcagctgtccatcttctagagcaggcggtctagcctccccaaaccagaagaacttcctttttatattcaaccacctgatggatgtccctgatcagttccctcagctgcagagca

SEQ ID NO: 129798 - DNA, 1326 bp, Homo sapiens
  Payload ID: 5390
  Gene Symbol: ESM1
  Gene Name: endothelial cell-specific molecule 1
  Uniprot ID: Q9NQ30
  ENST ID: ENST00000381403
  CDS Start-End: 77-481
agctaccagtttggacggctgcttcccaccagcaaagaccacgactggagagccgagccggaggcagctgggaaacatgaagagcgtcttgctgctgaccacgctcctcgtgcctgcacacctggtggccgcctggagcaataattatgcggtggactgccctcaacactgtgacagcagtgagtgcaaaagcagcccgcgctgcaagaggacagtgctcgacgactgtggctgctgccgagtgtgcgctgcagggcggggagaaacttgctaccgcacagtctcaggcatggatggcatgaagtgtggcccggggctgaggtgtcagccttctaatggggaggatccttttggtgaagagtttggtatctgcaaagagcatgacatggcatctggagatggcaatattgtgagagaagaagttgtgaaagagaatgctgccgggtctcccgtaatgaggaaatggttaaatccacgctgatcccggctgtgatttctgagagaaggctctattttcgtgattgttcaacacacagccaacattttaggaactttctagattatagcataaggacatgtaatttttgaagaccaaatgtgatgcatggtggatccagaaaacaaaaagtaggatacttacaatccataacatccatatgactgaacacttgtatgtgtttgttaaatattcgaatgcatgtagatttgttaaatgtgtgtgtatagtaacactgaagaactaaaaatgcaatttaggtaatcttacgtggagacaggtcaaccaaagagggagctaggcaaagctgaagaccgcagtgagtcaaattagttctttgactttgatgtacattaatgttgggatatggaatgaagacttaagagcaggagaagatggggagggggtgggagtgggaaataaaatatttagcccttccttggtaggtagcttctctagaatttaattgtgcttttttttttttttttggctttgggaaaagtcaaaataaaacaaccagaaaacccctgaaggaagtaagatgtttgaagcttatggaaatttgagtaacaaacagctttgaactgagagcaatttcaaaaggctgctgatgtagttcccgggttacctgtatctgaaggacggttctggggcataggaaacacatacacttccataaatagctttaacgtatgccacctcagagataaatctaagaagtattttacccactggtggtttgtgtgtgtatgaaggtaaatatttatatatttttataaataaatgtgttagtgcaagtcatcttccctacccatatttatcatcctctt

SEQ ID NO: 129799 - DNA, 2169 bp, Homo sapiens
  Payload ID: 5390
  Gene Symbol: ESM1
  Gene Name: endothelial cell-specific molecule 1
  Uniprot ID: Q9NQ30
  ENST ID: ENST00000381405
  CDS Start-End: 147-701
ggaaattgatgacgggaaagcatgcgggcaacccagtgtataaaactcataaacgtgtaggcagaggctcagctaccagtttggacggctgcttcccaccagcaaagaccacgactggagagccgagccggaggcagctgggaaacatgaagagcgtcttgctgctgaccacgctcctcgtgcctgcacacctggtggccgcctggagcaataattatgcggtggactgccctcaacactgtgacagcagtgagtgcaaaagcagcccgcgctgcaagaggacagtgctcgacgactgtggctgctgccgagtgtgcgctgcagggcggggagaaacttgctaccgcacagtctcaggcatggatggcatgaagtgtggcccggggctgaggtgtcagccttctaatggggaggatccttttggtgaagagtttggtatctgcaaagactgtccctacggcaccttcgggatggattgcagagagacctgcaactgccagtcaggcatctgtgacagggggacgggaaaatgcctgaaattccccttcttccaatattcagtaaccaagtcttccaacagatttgtttctctcacggagcatgacatggcatctggagatggcaatattgtgagagaagaagttgtgaaagagaatgctgccgggtctcccgtaatgaggaaatggttaaatccacgctgatcccggctgtgatttctgagagaaggctctattttcgtgattgttcaacacacagccaacattttaggaactttctagattatagcataaggacatgtaatttttgaagaccaaatgtgatgcatggtggatccagaaaacaaaaagtaggatacttacaatccataacatccatatgactgaacacttgtatgtgtttgttaaatattcgaatgcatgtagatttgttaaatgtgtgtgtatagtaacactgaagaactaaaaatgcaatttaggtaatcttacgtggagacaggtcaaccaaagagggagctaggcaaagctgaagaccgcagtgagtcaaattagttctttgactttgatgtacattaatgttgggatatggaatgaagacttaagagcaggagaagatggggagggggtgggagtgggaaataaaatatttagcccttccttggtaggtagcttctctagaatttaattgtgcttttttttttttttttggctttgggaaaagtcaaaataaaacaaccagaaaacccctgaaggaagtaagatgtttgaagcttatggaaatttgagtaacaaacagctttgaactgagagcaatttcaaaaggctgctgatgtagttcccgggttacctgtatctgaaggacggttctggggcataggaaacacatacacttccataaatagctttaacgtatgccacctcagagataaatctaagaagtattttacccactggtggtttgtgtgtgtatgaaggtaaatatttatatatttttataaataaatgtgttagtgcaagtcatcttccctacccatatttatcatcctcttgaggaaagaaatctagtattatttgttgaaaatggttagaataaaactatgactctataaggttttcaaacatctgaggcatgataaatttattatccataattatagtaataataaccttaataagcataagaaaaacagagtcactctggatttcaaaaatgtcaaaaaatgagcaacagagggtccttatttaaacataagtgctgtgacttaggtgaattttcaatttaaggtagaaaataagtttttaggaggtttgtaaaagaagaatcaattttcagcagaaaacatgtcaactttaaaatatagtttattttcatatttttttcttttaaacttggttgataagtggaattaggagtatatttgaaagaatcttagcacaaacaggactgttgtactagatgttcttaggaaatatctcagaagtattttatttgaagtgaagaacttatttaagaattatttcagtatttacctgtattttattcttgaagttggccaacagagttgtgaatgtgtgtgggaaggcctttgaatgtaaagctgcataagctgttaggttttgttttaaaaggacatgtttattattgttcaataaaaaagaacaagatacagct

SEQ ID NO: 129800 - DNA, 756 bp, Homo sapiens
  Payload ID: 5390
  Gene Symbol: ESM1
  Gene Name: endothelial cell-specific molecule 1
  ENST ID: ENST00000601836
  CDS Start-End: 488-756
gaacaaaaccaacgcagagcagtgacttcctgtcagagcagaagaggctctgagacaaagctacacctcaagtgatatgccagggtcagaacaattcccgtcctgaaggagggtgtgcaaccttctttatccctccttcacagacgtccttgagcccttgagacggatgtgagtgagtttttcagtcctcatgcaaaacaaccatctaaacataacagatgacatcagcttgggcttttcaattcctggatggcagcagcgtgttaatccagccttcatcctggatttcataaaccaaaacaagagagcctggcaggaggacagcgctgctgctgggttgaggaaattgatgacgggaaagcatgcgggcaacccagtgtataaaactcataaacgtgtaggcagaggctcagctaccagtttggacggctgcttcccaccagcaaagaccacgactggagagccgagccggaggcagctgggaaacatgaagagcgtcttgctgctgaccacgctcctcgtgcctgcacacctggtggccgcctggagcaataattatgcggtggactgccctcaacactgtgacagcagtgagtgcaaaagcagcccgcgctgcaagaggacagtgctcgacgactgtggctgctgccgagtgtgcgctgcagggcggggagaaacttgctaccgcacagtctcaggcatggatggcatgaagtgtggcccggggctgaggtgtcagccttctaatggggagga

SEQ ID NO: 129801 - DNA, 640 bp, Homo sapiens
  Payload ID: 5391
  Gene Symbol: EDF1
  Gene Name: endothelial differentiation-related factor 1
  Uniprot ID: O60869
  ENST ID: ENST00000224073
  CDS Start-End: 29-475
gccggacggacgctcgtcttcgcccgccatggccgagagcgactgggacacggtgacggtgctgcgcaagaagggccctacggccgcccaggccaaatccaagcaggctatcttagcggcacagagacgaggagaagatgtggagacttccaagaaatgggctgctggccagaacaaacaacattctattaccaagaacacggccaagctggaccgggagacagaggagctgcaccatgacagggtgaccctggaggtgggcaaggtgatccagcaaggtcggcagagcaaggggcttacgcagaaggacctggccacgaaaatcaatgagaagccacaggtgatcgcggactatgagagcggacgggccatacccaataaccaggtgcttggcaaaatcgagcgggccattggcctcaagctccggggaaaggacattggaaagcccatcgagaaggggcctagggcgaaatgaacacaaagcctcgaaatcagtgcgctccagctgatctcgttccgccggttccccttggccgccagttccgttctcctcacgggccgaacggaacaaggggtccagcttgcgggggaccctccccagcccattcctgctgtcaaacaaacaaaaccttgcaaagcg

SEQ ID NO: 129802 - DNA, 809 bp, Homo sapiens
  Payload ID: 5391
  Gene Symbol: EDF1
  Gene Name: endothelial differentiation-related factor 1
  Uniprot ID: O60869
  ENST ID: ENST00000371648
  CDS Start-End: 9-428
cgcccgccatggccgagagcgactgggacacggtgacggtgctgcgcaagaagggccctacggccgcccaggccaaatccaagcaggctatcttagcggcacagagacgaggagaagatgtggagacttccaagaaatgggctgctggccagaacaaacaacattctattaccaagaacacggccaagctggaccgggagacagaggagctgcaccatgacagggtgaccctggaggtgggcaaggtgatccagcaaggtcggcagagcaaggggcttacgcagaaggacctggccacgaaaatcaatgagaagccacaggtgatcgcggactatgagagcggacgggccatacccaataaccaggtgcttggcaaaatcgagcgggccattggtgagtgtccctccacccttcgccgggtccgctgaacagggaggctacccgctcccagctggggttggtgagagtgggactcgggggaagaagatggccctgggggtcccctgttctctgaattctggagctttgcttctccaggtagtacagactgagggatggtggggtctctgcaggcctcaggaaacccctaagagcaagtggagtccgagtcccttccccttgccagttcccgtcagcctgtgctgttggcgatggttctctgagcctgagcacagcgggtccgggccctgtcagcatggggccggaagccagttccacagaggaccccggctccggttcttccggagaggggtgttcatgctctgctgtctaaggtgatcagactcatcctcttcaaaattagatgtggg

SEQ ID NO: 129803 - DNA, 790 bp, Homo sapiens
  Payload ID: 5391
  Gene Symbol: EDF1
  Gene Name: endothelial differentiation-related factor 1
  Uniprot ID: O60869
  ENST ID: ENST00000371649
  CDS Start-End: 28-453
ccggacggacgctcgtcttcgcccgccatggccgagagcgactgggacacggtgacggtgctgcgcaagaagggccctacggccgcccaggccaaatccaagcaggctatcttagcggcacagagacgaggagaagatgtggagacttccaagaaatgggctgctggccagaacaaacaacattctattaccaagaacacggccaagctggaccgggagacagaggagctgcaccatgacagggtgaccctggaggtgggcaaggtgatccagcaaggtcggcagagcaaggggcttacgcagaaggacctggccacgaaaatcaatgagaagccacaggtgatcgcggactatgagagcggacgggccatacccaataaccaggtgcttggcaaaatcgagcgggccattgatgtgggaaccaggagtgctcgtgtgctgagagcccagtgaggcacgggagcggcgtggccccccttccctgggaagatgttgaagaggggcagcgttggggggaggagggagctggtgctgcagtggccagtggctgtggctcatttcaggcctcaagctccggggaaaggacattggaaagcccatcgagaaggggcctagggcgaaatgaacacaaagcctcgaaatcagtgcgctccagctgatctcgttccgccggttccccttggccgccagttccgttctcctcacgggccgaacggaacaaggggtccagcttgcgggggaccctccccagcccattcctgctgtcaaacaaacaaaaccttgcaaagcg

SEQ ID NO: 129804 - DNA, 5166 bp, Homo sapiens
  Payload ID: 5392
  Gene Symbol: EPAS1
  Gene Name: endothelial PAS domain protein 1
  Uniprot ID: Q99814
  ENST ID: ENST00000263734
  CDS Start-End: 511-3123
gctttacactcgcgagcggaccgccacacgggtccggtgcccgctgcgcttccgccccagcgctcctgaggcggccgtacaatcctcggcagtgtcctgagactgtatggtcagctcagcccggcctccgactccttccgactcccagcattcgagccacttttttttttctttgaaaactcagaaaagtgactccttttccagggaaaaaggaacttgggttcccttctctccgtcctcttttcgggtctgacagcctccacccactccttccccggaccccgcctccgcgcgcaggttcctcccagtcacctttctccacccccgcccccgcacctagcccgccgcgcgccaccttccacctgactgcgcggggcgctcgggacctgcgcgcacctcggaccttcaccacccgcccgggccgcggggagcggacgagggccacagccccccacccgccagggagcccaggtgctcggcgtctgaacgtctcaaagggccacagcgacaatgacagctgacaaggagaagaaaaggagtagctcggagaggaggaaggagaagtcccgggatgctgcgcggtgccggcggagcaaggagacggaggtgttctatgagctggcccatgagctgcctctgccccacagtgtgagctcccatctggacaaggcctccatcatgcgactggcaatcagcttcctgcgaacacacaagctcctctcctcagtttgctctgaaaacgagtccgaagccgaagctgaccagcagatggacaacttgtacctgaaagccttggagggtttcattgccgtggtgacccaagatggcgacatgatctttctgtcagaaaacatcagcaagttcatgggacttacacaggtggagctaacaggacatagtatctttgacttcactcatccctgcgaccatgaggagattcgtgagaacctgagtctcaaaaatggctctggttttgggaaaaaaagcaaagacatgtccacagagcgggacttcttcatgaggatgaagtgcacggtcaccaacagaggccgtactgtcaacctcaagtcagccacctggaaggtcttgcactgcacgggccaggtgaaagtctacaacaactgccctcctcacaatagtctgtgtggctacaaggagcccctgctgtcctgcctcatcatcatgtgtgaaccaatccagcacccatcccacatggacatccccctggatagcaagaccttcctgagccgccacagcatggacatgaagttcacctactgtgatgacagaatcacagaactgattggttaccaccctgaggagctgcttggccgctcagcctatgaattctaccatgcgctagactccgagaacatgaccaagagtcaccagaacttgtgcaccaagggtcaggtagtaagtggccagtaccggatgctcgcaaagcatgggggctacgtgtggctggagacccaggggacggtcatctacaaccctcgcaacctgcagccccagtgcatcatgtgtgtcaactacgtcctgagtgagattgagaagaatgacgtggtgttctccatggaccagactgaatccctgttcaagccccacctgatggccatgaacagcatctttgatagcagtggcaagggggctgtgtctgagaagagtaacttcctattcaccaagctaaaggaggagcccgaggagctggcccagctggctcccaccccaggagacgccatcatctctctggatttcgggaatcagaacttcgaggagtcctcagcctatggcaaggccatcctgcccccgagccagccatgggccacggagttgaggagccacagcacccagagcgaggctgggagcctgcctgccttcaccgtgccccaggcagctgccccgggcagcaccacccccagtgccaccagcagcagcagcagctgctccacgcccaatagccctgaagactattacacatctttggataacgacctgaagattgaagtgattgagaagctcttcgccatggacacagaggccaaggaccaatgcagtacccagacggatttcaatgagctggacttggagacactggcaccctatatccccatggacggggaagacttccagctaagccccatctgccccgaggagcggctcttggcggagaacccacagtccaccccccagcactgcttcagtgccatgacaaacatcttccagccactggcccctgtagccccgcacagtcccttcctcctggacaagtttcagcagcagctggagagcaagaagacagagcccgagcaccggcccatgtcctccatcttctttgatgccggaagcaaagcatccctgccaccgtgctgtggccaggccagcacccctctctcttccatggggggcagatccaatacccagtggcccccagatccaccattacattttgggcccacaaagtgggccgtcggggatcagcgcacagagttcttgggagcagcgccgttggggccccctgtctctccaccccatgtctccaccttcaagacaaggtctgcaaagggttttggggctcgaggcccagacgtgctgagtccggccatggtagccctctccaacaagctgaagctgaagcgacagctggagtatgaagagcaagccttccaggacctgagcgggggggacccacctggtggcagcacctcacatttgatgtggaaacggatgaagaacctcaggggtgggagctgccctttgatgccggacaagccactgagcgcaaatgtacccaatgataagttcacccaaaaccccatgaggggcctgggccatcccctgagacatctgccgctgccacagcctccatctgccatcagtcccggggagaacagcaagagcaggttccccccacagtgctacgccacccagtaccaggactacagcctgtcgtcagcccacaaggtgtcaggcatggcaagccggctgctcgggccctcatttgagtcctacctgctgcccgaactgaccagatatgactgtgaggtgaacgtgcccgtgctgggaagctccacgctcctgcaaggaggggacctcctcagagccctggaccaggccacctgagccaggccttctacctgggcagcacctctgccgacgccgtcccaccagcttcactctctccgtctgtttttgcaactaggtatttctaacgccagcacactatttacaagatggacttacctggcagacttgcccaggtcaccaagcagtggcctttttctgagatgctcactttattatccctatttttaaagtacacaattgttttacctgttctgaaatgttcttaaattttgtaggatttttttcctccccaccttcaatgacttctaatttatattatccataggtttctctccctccttctccttctcacacacaactgtccatactaacaagtttggtgcatgtctgttcttctgtagggagaagctttagcttcattttactaaaaagattcctcgttattgttgttgccaaagagaaacaaaaatgattttgctttccaagcttggtttgtggcgtctccctcgcagagcccttctcgtttcttttttaaactaatcaccatattgtaaatttcagggtttttttttttttgtttaagctgactctttgctctaattttggaaaaaaagaaatgtgaagggtcaactccaacgtatgtggttatctgtgaaagttgcacagcgtggcttttcctaaactggtgtttttcccccgcatttggtggattttttattattattcaaaaacataactgagttttttaaaagaggagaaaatttatatctgggttaagtgtttatcatatatatgggtactttgtaatatctaaaaacttagaaacggaaatggaatcctgctcacaaaatcactttaagatcttttcgaagctgttaatttttcttagtgttgtggacactgcagacttgtccagtgctcccacggcctgtacggacactgtggaaggcctccctctgtcggctttttgccatctgtgatatgccataggtgtgacaatccgagcagtggagtcattcagcgggagcactgcgcgctatcccctcacattctctatgtactatgtatgtatgtattattattattgctgccaagagggtctgatggcacgttgtggggtcggggggtggggcggggaagtgctctaacttttcttaaggttttgttgctagcccttcaagtgcactgagctatgtgactcggatggtctttcacacggcacatttggacatttccagaactaccatgagatggtttagacgggaattcatgcaaatgaggggtcaaaaatggtatagtgaccccgtccacgtcctccaagctcacgaccttggagccccgtggagctggactgaggaggaggctgcacagcgggagagcagctggtccagaccagccctgcagcccccactcagccggcagccagatggccccgcaaggcctccagggatggcccctagccacaggccctggctgaggtctctgggtcggtcagtgacatgtaggtaggaagcactgaaaatagtgttcccagagcactttgcaactccctgggtaagagggacgacacctctggtttttcaataccaattacatggaacttttctgtaatgggtacaatgaagaagtttctaaaaacacacacaaagcacattgggccaactatttagtaagcccggatagacttattgccaaaaacaaaaaatagctttcaaaagaaatttaagttctatgagaaattccttagtcatggtgttgcgtaaatcatattttagctgcacggcattaccccacacagggtggcagaacttgaagggttactgacgtgtaaatgctggtatttgatttcctgtgtgtgttgccctggcattaagggcattttacccttgcagttttactaaaacactgaaaaatattccaagcttcatattaaccctacctgtcaacgtaacgatttcatgaacgttattatattgtcgaattcctactgacaacattataactgtatgggagcttaactttataaggaaatgtattttgacactggtatcttattaaagtattctgatcctaccactg

SEQ ID NO: 129805 - DNA, 1067 bp, Homo sapiens
  Payload ID: 5392
  Gene Symbol: EPAS1
  Gene Name: endothelial PAS domain protein 1
  ENST ID: ENST00000449347
  CDS Start-End: 289-1067
agatcacactggggaaccagactgacttctccaattctgaactcgccccggcctcgggcggctcaaagggcctcctctgccgcatccccgccaaaaccaaaccgcctggcacaagccgcccgccgcgcgccaccttccacctgactgcgcggggcgctcgggacctgcgcgcacctcggaccttcaccacccgcccgggccgcggggagcggacgagggccacagccccccacccgccagggagcccaggtgctcggcgtctgaacgtctcaaagggccacagcgacaatgacagctgacaaggagaagaaaaggagtagctcggagaggaggaaggagaagtcccgggatgctgcgcggtgccggcggagcaaggagacggaggtgttctatgagctggcccatgagctgcctctgccccacagtgtgagctcccatctggacaaggcctccatcatgcgactggcaatcagcttcctgcgaacacacaagctcctctcctcagtttgctctgaaaacgagtccgaagccgaagctgaccagcagatggacaacttgtacctgaaagccttggagggtttcattgccgtggtgacccaagatggcgacatgatctttctgtcagaaaacatcagcaagttcatgggacttacacaggtggagctaacaggacatagtatctttgacttcactcatccctgcgaccatgaggagattcgtgagaacctgagtctcaaaaatggctctggttttgggaaaaaaagcaaagacatgtccacagagcgggacttcttcatgaggatgaagtgcacggtcaccaacagaggccgtactgtcaacctcaagtcagccacctggaaggtcttgcactgcacgggccaggtgaaagtctacaacaactgccctcctcacaatagtctgtgtggctacaaggagcccctgctgtcctgcctcatcatcatgtgtgaaccaatccagcacccatcccacatggacatccccctggatagcaagaccttcctgagccgccacagcatggacatgaagttcacctactgtgatgacag

SEQ ID NO: 129806 - DNA, 2033 bp, Homo sapiens
  Payload ID: 5393
  Gene Symbol: EDN1
  Gene Name: endothelin 1
  Uniprot ID: P05305
  ENST ID: ENST00000379375
  CDS Start-End: 268-906
acgcgcctctgcatctgcgccaggcgaacgggtcctgcgcctcctgcagtcccagctctccaccgccgcgtgcgcctgcagacgctccgctcgctgccttctctcctggcaggcgctgccttttctccccgttaaaagggcacttgggctgaaggatcgctttgagatctgaggaacccgcagcgctttgagggacctgaagctgtttttcttcgttttcctttgggttcagtttgaacgggaggtttttgatccctttttttcagaatggattatttgctcatgattttctctctgctgtttgtggcttgccaaggagctccagaaacagcagtcttaggcgctgagctcagcgcggtgggtgagaacggcggggagaaacccactcccagtccaccctggcggctccgccggtccaagcgctgctcctgctcgtccctgatggataaagagtgtgtctacttctgccacctggacatcatttgggtcaacactcccgagcacgttgttccgtatggacttggaagccctaggtccaagagagccttggagaatttacttcccacaaaggcaacagaccgtgaaaatagatgccaatgtgctagccaaaaagacaagaagtgctggaatttttgccaagcaggaaaagaactcagggctgaagacattatggagaaagactggaataatcataagaaaggaaaagactgttccaagcttgggaaaaagtgtatttatcagcagttagtgagaggaagaaaaatcagaagaagttcagaggaacacctaagacaaaccaggtcggagaccatgagaaacagcgtcaaatcatcttttcatgatcccaagctgaaaggcaagccctccagagagcgttatgtgacccacaaccgagcacattggtgacagaccttcggggcctgtctgaagccatagcctccacggagagccctgtggccgactctgcactctccaccctggctgggatcagagcaggagcatcctctgctggttcctgactggcaaaggaccagcgtcctcgttcaaaacattccaagaaaggttaaggagttcccccaaccatcttcactggcttccatcagtggtaactgctttggtctcttctttcatctggggatgacaatggacctctcagcagaaacacacagtcacattcgaattcgggtggcatcctccggagagagagagaggaaggagattccacacaggggtggagtttctgacgaaggtcctaagggagtgtttgtgtctgactcaggcgcctggcacatttcagggagaaactccaaagtccacacaaagattttctaaggaatgcacaaattgaaaacacactcaaaagacaaacatgcaagtaaagaaaaaaaaaagaaagacttttgtttaaatttgtaaaatgcaaaactgaatgaaactgttactaccataaatcaggatatgtttcatgaatatgagtctacctcacctatattgcactctggcagaagtatttcccacatttaattattgcctccccaaactcttcccacccctgctgccccttcctccatcccccatactaaatcctagcctcgtagaagtctggtctaatgtgtcagcagtagatataatattttcatggtaatctactagctctgatccataagaaaaaaaagatcattaaatcaggagattccctgtccttgatttttggagacacaatggtatagggttgtttatgaaatatattgaaaagtaagtgtttgttacgctttaaagcagtaaaattattttcctttatataaccggctaatgaaagaggttggattgaattttgatgtacttatttttttatagatatttatattcaaacaatttattccttatatttaccatgttaaatatctgtttgggcaggccatattggtctatgtatttttaaaatatgtatttctaaatgaaattgagaacatgctttgttttgcctgtcaaggtaatgactttagaaaataaatatttttttccttactgta

SEQ ID NO: 129807 - DNA, 1241 bp, Homo sapiens
  Payload ID: 5394
  Gene Symbol: EDN2
  Gene Name: endothelin 2
  Uniprot ID: P20800
  ENST ID: ENST00000372587
  CDS Start-End: 71-607
cagcttaatagcaggacgctggcaacaggcactccctgctccagtccagcctgcgcgctccaccgccgctatggtctccgtgcctaccacctggtgctccgttgcgctagccctgctcgtggccctgcatgaagggaagggccaggctgctgccaccctggagcagccagcgtcctcatctcatgcccaaggcacccaccttcggcttcgccgttgctcctgcagctcctggctcgacaaggagtgcgtctacttctgccacttggacatcatctgggtgaacactcctgaacagacagctccttacggcctgggaaacccgccaagacgccggcgccgctccctgccaaggcgctgtcagtgctccagtgccagggaccccgcctgtgccaccttctgccttcgaaggccctggactgaagccggggcagtcccaagccggaagtcccctgcagacgtgttccagactggcaagacaggggccactacaggagagcttctccaaaggctgagggacatttccacagtcaagagcctctttgccaagcgacaacaggaggccatgcgggagcctcggtccacacattccaggtggaggaagagatagtgtcgtgagctggaggaacattgggaaggaagcccgcggggagagaggaggagagaagtggccagggcttgtggactctctgcctgcttcctggaccggggccttggtcccagacagctggacccatttgccaggattggcacaagctccctggtgagggagcctcgtccaaggcagttctgtgtcctcgcactgcccagggaagccctcggcctccagactgcggagcagcctccagtgctggctgctggcccacagctctgctggaagaactgcatggggagtacattcatctggaggctgcgtcctgaggagtgtcctgtctgctgggctacaaaccaggagcaaccgtgcagccacgaacacgcatgcctcagccagccctggaggctggatggctcccctgaggctggcatcctggctggctgtgtcctctccagctttccctccccagagttcttgcaccctcattccctcgggaccctcccagtgagaagggcctgctctgcttttcctgtctgtatataacttatttgccctaagaactttgagaatcccaattatttattttaatgtattttttagaccctctatttacctgcgaacttgtgtttataataaatgaggaaacata

SEQ ID NO: 129808 - DNA, 2655 bp, Homo sapiens
  Payload ID: 5395
  Gene Symbol: EDN3
  Gene Name: endothelin 3
  Uniprot ID: P14138
  ENST ID: ENST00000311585
  CDS Start-End: 371-1030
cctcgggccgctgcgctcctggccagctccccccagcgcctgggaggcgacccccagtgcgcccgggttcaaaggcccggcgaggcagttccagcccctctggggggcggggaggcgacgggggtggtgcagaagccagaaaagcccgagccacagccggccagctccgcgcagggatgggcagcgcgctctgaaagtttatgaccgccgcagccaactcctggccggagctggagacgcagcgagcgatcggccggcctcgaacccccacagctggagggcgaggccagctgtacccggccccagtgccctttcgcggccacaagcggccgtcctcctggtccggtgctccggcgcctgatctaggttcatggagccggggctgtggctccttttcgggctcacagtgacctccgccgcaggattcgtgccttgctcccagtctggggatgctggcaggcgcggcgtgtcccaggcccccactgcagccagatctgagggggactgtgaagagactgtggctggccctggcgaggagactgtggctggccctggcgaggggactgtggccccgacagcactgcagggtccaagccctggaagccctgggcaggagcaggcggccgagggggcccctgagcaccaccgatccaggcgctgcacgtgcttcacctacaaggacaaggagtgtgtctactattgccacctggacatcatttggatcaacactcccgaacagacggtgccctatggactgtccaactacagaggaagcttccggggcaagaggtctgcggggccacttccagggaatctgcagctctcacatcggccacacttgcgctgcgcttgtgtggggagatatgacaaggcctgcctgcacttttgcacccaaactctggacgtcagcagtaattcaaggacggcagaaaaaacagacaaagaagaggaagggaaggtgagaggtgccaacagaggcctgtgtcaaaggaggttgaagtcaaggaccaacaaagcaagcaggctttagacctccaccatccaaagctcatgcccggcagtggactcgccctcgctccatctacctgcccccgctgcctctttcaggaaggagccccttaggaggacaggcctgcagcatcctggtctcgggaggcttctgtcattgctcacacacagttcagatttccacctctttatagacaagaagtgaatttgcctggggcagaacacccacccaaagagtccccacttaacaataccccccccccacggcaagaatgcccaaatccgaatgaccccagttttcctaatgagtaaaatgatcccagatgtgccccagagcatgacgcctgcagctccggtttcatgcaggaaattggttttggagagttttggcaagttggaaagccacttactggcttttgacatgacttctcttggagaataagtggactccaagctaactctttgcaaatgtaaacacatgtccatcttgtaataaatgcaaaatgcccgtgcagcagaagcatgcgactttcatatccttgcctagaataggctgcatggtgtatgtcagtgagggccacgaggcgtcggctttagacacagatcatagctctacaggagtttatgaatttgaagcttatgggattttggcagagaaattttcagctgtgcttgatacccaccaaaagaatgtatctcgaaagaatgaaggaagaagaaaaaaggatccttgatgtttgtgacaagaaaatgagaaagttagtatctgcaatacagagcttgttcctgttcagtgactgaccctctgtattctgtatagacaccaggccgatacacagtggagttcccaggccttgtttgcaggaagccgactgtaaagacagccccagctcaaggctattaggttgaatatttgctttcatgagtaaatgtggatctttggggaatggcttcaaaataagtcacgaacacaaattctttgtaaattatgtaaattcctgtttatataaattggcaacaacttataccgtctgacagttcaaaatctctttcagctgcgctcttcccaccgagccgagcttactgtgagtgtggagatgttatcccaccatgtaaagtcgcctgcgcaggggagggctgcccatctccccaacccagtcacagagagataggaaacggcatttgagtgggtgtccagggccccgtagagagacatttaagatggtgtatgacagagcattggccttgaccaaatgttaaatcctctgtgtgtatttcataagttattacaggtataaaagtgatgacctatcatgaggaaatgaaagtggctgatttgctggtaggattttgtacagtttagagaagcgattatttattgtgaaactgttctccactccaactcctttatgtggatctgttcaaagtagtcactgtatatacgtatagagaggtagataggtaggtagattttaaattgcattctgaatacaaactcatactccttagagcttgaattacatttttaaaatgcatatgtgctgtttggcaccgtggcaagatggtatcagagagaaacccatcaattgctcaaatactcagaaagtactgtcaaaagcctaataaaaaacctaaagtttgctctga

SEQ ID NO: 129809 - DNA, 2636 bp, Homo sapiens
  Payload ID: 5395
  Gene Symbol: EDN3
  Gene Name: endothelin 3
  Uniprot ID: P14138
  ENST ID: ENST00000337938
  CDS Start-End: 387-1103
cgctgtcctgggtgcgcctcgggccgctgcgctcctggccagctccccccagcgcctgggaggcgacccccagtgcgcccgggttcaaaggcccggcgaggcagttccagcccctctggggggcggggaggcgacgggggtggtgcagaagccagaaaagcccgagccacagccggccagctccgcgcagggatgggcagcgcgctctgaaagtttatgaccgccgcagccaactcctggccggagctggagacgcagcgagcgatcggccggcctcgaacccccacagctggagggcgaggccagctgtacccggccccagtgccctttcgcggccacaagcggccgtcctcctggtccggtgctccggcgcctgatctaggttcatggagccggggctgtggctccttttcgggctcacagtgacctccgccgcaggattcgtgccttgctcccagtctggggatgctggcaggcgcggcgtgtcccaggcccccactgcagccagatctgagggggactgtgaagagactgtggctggccctggcgaggagactgtggctggccctggcgaggggactgtggccccgacagcactgcagggtccaagccctggaagccctgggcaggagcaggcggccgagggggcccctgagcaccaccgatccaggcgctgcacgtgcttcacctacaaggacaaggagtgtgtctactattgccacctggacatcatttggatcaacactcccgaacagacggtgccctatggactgtccaactacagaggaagcttccggggcaagaggtctgcggggccacttccagggaatctgcagctctcacatcggccacacttgcgctgcgcttgtgtggggagatatgacaaggcctgcctgcacttttgcacccaaactctggacgtcagcagtaattcaaggacggcagaaaaaacagacaaagaagaggaagggaaggttgaagtcaaggaccaacaaagcaagcaggctttagacctccaccatccaaagctcatgcccggcagtggactcgccctcgctccatctacctgcccccgctgcctctttcaggaaggagccccttaggaggacaggcctgcagcatcctggtctcgggaggcttctgtcattgctcacacacagttcagatttccacctctttatagacaagaagtgaatttgcctggggcagaacacccacccaaagagtccccacttaacaataccccccccccacggcaagaatgcccaaatccgaatgaccccagttttcctaatgagtaaaatgatcccagatgtgccccagagcatgacgcctgcagctccggtttcatgcaggaaattggttttggagagttttggcaagttggaaagccacttactggcttttgacatgacttctcttggagaataagtggactccaagctaactctttgcaaatgtaaacacatgtccatcttgtaataaatgcaaaatgcccgtgcagcagaagcatgcgactttcatatccttgcctagaataggctgcatggtgtatgtcagtgagggccacgaggcgtcggctttagacacagatcatagctctacaggagtttatgaatttgaagcttatgggattttggcagagaaattttcagctgtgcttgatacccaccaaaagaatgtatctcgaaagaatgaaggaagaagaaaaaaggatccttgatgtttgtgacaagaaaatgagaaagttagtatctgcaatacagagcttgttcctgttcagtgactgaccctctgtattctgtatagacaccaggccgatacacagtggagttcccaggccttgtttgcaggaagccgactgtaaagacagccccagctcaaggctattaggttgaatatttgctttcatgagtaaatgtggatctttggggaatggcttcaaaataagtcacgaacacaaattctttgtaaattatgtaaattcctgtttatataaattggcaacaacttataccgtctgacagttcaaaatctctttcagctgcgctcttcccaccgagccgagcttactgtgagtgtggagatgttatcccaccatgtaaagtcgcctgcgcaggggagggctgcccatctccccaacccagtcacagagagataggaaacggcatttgagtgggtgtccagggccccgtagagagacatttaagatggtgtatgacagagcattggccttgaccaaatgttaaatcctctgtgtgtatttcataagttattacaggtataaaagtgatgacctatcatgaggaaatgaaagtggctgatttgctggtaggattttgtacagtttagagaagcgattatttattgtgaaactgttctccactccaactcctttatgtggatctgttcaaagtagtcactgtatatacgtatagagaggtagataggtaggtagattttaaattgcattctgaatacaaactcatactccttagagcttgaattacatttttaaaatgcatatgtgctgtttggcaccgtggcaagatggtatcagagagaaacccatcaattgctcaaatactcagaaagtactgtcaaaagcctaataaaaaacctaaagtttgctctga

SEQ ID NO: 129810 - DNA, 1153 bp, Homo sapiens
  Payload ID: 5395
  Gene Symbol: EDN3
  Gene Name: endothelin 3
  ENST ID: ENST00000371025
  CDS Start-End: 196-774
gatgggcagcgcgctctgaaagtttatgaccgccgcagccaactcctggccggagctggagacgcagcgagcgatcggccggcctcgaacccccacagctggagggcgaggccagctgtacccggccccagtgccctttcgcggccacaagcggccgtcctcctggtccggtgctccggcgcctgatctaggttcatggagccggggctgtggctccttttcgggctcacagtgacctccgccgcaggattcgtgccttgctcccagtctggggatgctggcaggcgcggcgtgtcccaggcccccactgcagccagatctgagggggactgtgaagagactgtggctggccctggcgaggagactgtggctggccctggcgaggggactgtggccccgacagcactgcagggtccaagccctggaagccctgggcaggagcaggcggccgagggggcccctgagcaccaccgatccaggcgctgcacgtgcttcacctacaaggacaaggagtgtgtctactattgccacctggacatcatttggatcaacactcccgaacagacggtgccctatggactgtccaactacagaggaagcttccggggcaagaggtctgcggggccacttccagggaatctgcagctctcacatcggccacacttgcgctgcgcttgtgtggggagatatgacaaggcctgcctgcacttttgcacccaaactctggacgtcagcaggttgaagtcaaggaccaacaaagcaagcaggctttagacctccaccatccaaagctcatgcccggcagtggactcgccctcgctccatctacctgcccccgctgcctctttcaggaaggagccccttaggaggacaggcctgcagcatcctggtctcgggaggcttctgtcattgctcacacacagttcagatttccacctctttatagacaagaagtgaatttgcctggggcagaacacccacccaaagagtccccacttaacaataccccccccccacggcaagaatgcccaaatccgaatgaccccagttttcctaatgagtaaaatgatcccagatgtgccccagagcatgacgcctgcagctccggtttcatgcaggaaattggttttggagagttttggcaagttggaaa

SEQ ID NO: 129811 - DNA, 2397 bp, Homo sapiens
  Payload ID: 5395
  Gene Symbol: EDN3
  Gene Name: endothelin 3
  Uniprot ID: P14138
  ENST ID: ENST00000371028
  CDS Start-End: 370-1086
ctcgggccgctgcgctcctggccagctccccccagcgcctgggaggcgacccccagtgcgcccgggttcaaaggcccggcgaggcagttccagcccctctggggggcggggaggcgacgggggtggtgcagaagccagaaaagcccgagccacagccggccagctccgcgcagggatgggcagcgcgctctgaaagtttatgaccgccgcagccaactcctggccggagctggagacgcagcgagcgatcggccggcctcgaacccccacagctggagggcgaggccagctgtacccggccccagtgccctttcgcggccacaagcggccgtcctcctggtccggtgctccggcgcctgatctaggttcatggagccggggctgtggctccttttcgggctcacagtgacctccgccgcaggattcgtgccttgctcccagtctggggatgctggcaggcgcggcgtgtcccaggcccccactgcagccagatctgagggggactgtgaagagactgtggctggccctggcgaggagactgtggctggccctggcgaggggactgtggccccgacagcactgcagggtccaagccctggaagccctgggcaggagcaggcggccgagggggcccctgagcaccaccgatccaggcgctgcacgtgcttcacctacaaggacaaggagtgtgtctactattgccacctggacatcatttggatcaacactcccgaacagacggtgccctatggactgtccaactacagaggaagcttccggggcaagaggtctgcggggccacttccagggaatctgcagctctcacatcggccacacttgcgctgcgcttgtgtggggagatatgacaaggcctgcctgcacttttgcacccaaactctggacgtcagcagtaattcaaggacggcagaaaaaacagacaaagaagaggaagggaaggttgaagtcaaggaccaacaaagcaagcaggctttagacctccaccatccaaagctcatgcccggcagtggactcgccctcgctccatctacctgcccccgctgcctctttcaggaaggagccccttaggaggacaggcctgcactccggtttcatgcaggaaattggttttggagagttttggcaagttggaaagccacttactggcttttgacatgacttctcttggagaataagtggactccaagctaactctttgcaaatgtaaacacatgtccatcttgtaataaatgcaaaatgcccgtgcagcagaagcatgcgactttcatatccttgcctagaataggctgcatggtgtatgtcagtgagggccacgaggcgtcggctttagacacagatcatagctctacaggagtttatgaatttgaagcttatgggattttggcagagaaattttcagctgtgcttgatacccaccaaaagaatgtatctcgaaagaatgaaggaagaagaaaaaaggatccttgatgtttgtgacaagaaaatgagaaagttagtatctgcaatacagagcttgttcctgttcagtgactgaccctctgtattctgtatagacaccaggccgatacacagtggagttcccaggccttgtttgcaggaagccgactgtaaagacagccccagctcaaggctattaggttgaatatttgctttcatgagtaaatgtggatctttggggaatggcttcaaaataagtcacgaacacaaattctttgtaaattatgtaaattcctgtttatataaattggcaacaacttataccgtctgacagttcaaaatctctttcagctgcgctcttcccaccgagccgagcttactgtgagtgtggagatgttatcccaccatgtaaagtcgcctgcgcaggggagggctgcccatctccccaacccagtcacagagagataggaaacggcatttgagtgggtgtccagggccccgtagagagacatttaagatggtgtatgacagagcattggccttgaccaaatgttaaatcctctgtgtgtatttcataagttattacaggtataaaagtgatgacctatcatgaggaaatgaaagtggctgatttgctggtaggattttgtacagtttagagaagcgattatttattgtgaaactgttctccactccaactcctttatgtggatctgttcaaagtagtcactgtatatacgtatagagaggtagataggtaggtagattttaaattgcattctgaatacaaactcatactccttagagcttgaattacatttttaaaatgcatatgtgctgtttggcaccgtggcaagatggtatcagagagaaacccatcaattgctcaaatactcagaaagtactgtcaaaagcctaataaaaaacctaaagtttgctctg

SEQ ID NO: 129812 - DNA, 2318 bp, Homo sapiens
  Payload ID: 5395
  Gene Symbol: EDN3
  Gene Name: endothelin 3
  Uniprot ID: P14138
  ENST ID: ENST00000395654
  CDS Start-End: 111-785
cgaacccccacagctggagggcgaggccagctgtacccggccccagtgccctttcgcggccacaagcggccgtcctcctggtccggtgctccggcgcctgatctaggttcatggagccggggctgtggctccttttcgggctcacagtgacctccgccgcaggattcgtgccttgctcccagtctggggatgctggcaggcgcggcgtgtcccaggcccccactgcagccagatctgagggggactgtgaagagactgtggctggccctggcgaggagactgtggctggccctggcgaggggactgtggccccgacagcactgcagggtccaagccctggaagccctgggcaggagcaggcggccgagggggcccctgagcaccaccgatccaggcgctgcacgtgcttcacctacaaggacaaggagtgtgtctactattgccacctggacatcatttggatcaacactcccgaacagacggtgccctatggactgtccaactacagaggaagcttccggggcaagaggtctgcggggccacttccagggaatctgcagctctcacatcggccacacttgcgctgcgcttgtgtggggagatatgacaaggcctgcctgcacttttgcacccaaactctggacgtcagcagacaggttgaagtcaaggaccaacaaagcaagcaggctttagacctccaccatccaaagctcatgcccggcagtggactcgccctcgctccatctacctgcccccgctgcctctttcaggaaggagccccttaggaggacaggcctgcagcatcctggtctcgggaggcttctgtcattgctcacacacagttcagatttccacctctttatagacaagaagtgaatttgcctggggcagaacacccacccaaagagtccccacttaacaataccccccccccacggcaagaatgcccaaatccgaatgaccccagttttcctaatgagtaaaatgatcccagatgtgccccagagcatgacgcctgcagctccggtttcatgcaggaaattggttttggagagttttggcaagttggaaagccacttactggcttttgacatgacttctcttggagaataagtggactccaagctaactctttgcaaatgtaaacacatgtccatcttgtaataaatgcaaaatgcccgtgcagcagaagcatgcgactttcatatccttgcctagaataggctgcatggtgtatgtcagtgagggccacgaggcgtcggctttagacacagatcatagctctacaggagtttatgaatttgaagcttatgggattttggcagagaaattttcagctgtgcttgatacccaccaaaagaatgtatctcgaaagaatgaaggaagaagaaaaaaggatccttgatgtttgtgacaagaaaatgagaaagttagtatctgcaatacagagcttgttcctgttcagtgactgaccctctgtattctgtatagacaccaggccgatacacagtggagttcccaggccttgtttgcaggaagccgactgtaaagacagccccagctcaaggctattaggttgaatatttgctttcatgagtaaatgtggatctttggggaatggcttcaaaataagtcacgaacacaaattctttgtaaattatgtaaattcctgtttatataaattggcaacaacttataccgtctgacagttcaaaatctctttcagctgcgctcttcccaccgagccgagcttactgtgagtgtggagatgttatcccaccatgtaaagtcgcctgcgcaggggagggctgcccatctccccaacccagtcacagagagataggaaacggcatttgagtgggtgtccagggccccgtagagagacatttaagatggtgtatgacagagcattggccttgaccaaatgttaaatcctctgtgtgtatttcataagttattacaggtataaaagtgatgacctatcatgaggaaatgaaagtggctgatttgctggtaggattttgtacagtttagagaagcgattatttattgtgaaactgttctccactccaactcctttatgtggatctgttcaaagtagtcactgtatatacgtatagagaggtagataggtaggtagattttaaattgcattctgaatacaaactcatactccttagagcttgaattacatttttaaaatgcatatgtgctgtttggcaccgtggcaagatggtatcagagagaaacccatcaattgctcaaatactcagaaagtactgtcaaaagcctaataaaaaacctaaagtttgctctga

SEQ ID NO: 129813 - DNA, 2381 bp, Homo sapiens
  Payload ID: 5396
  Gene Symbol: ECE1
  Gene Name: endothelin converting enzyme 1
  Uniprot ID: P42892
  ENST ID: ENST00000264205
  CDS Start-End: 60-2363
ggggcgcggcggcggcggcgccagggtcggggccgcttccccattcgggcgcgagagccatggaggcgctgagggagtccgtgctgcatttggccttgcagatgtcgacgtacaagcgggccacgctggacgaggaggacctggtggactcgctctccgagggcgacgcataccccaacggcctgcaggtgaacttccacagcccccggagtggccagaggtgctgggctgcacggacccaggtggagaagcggctggtggtgttggtggtacttctggcggcaggactggtggcctgcttggcagcactgggcatccagtaccagacaagatccccctctgtgtgcctgagcgaagcttgtgtctcagtgaccagctccatcttgagctccatggaccccacagtggacccctgccatgacttcttcagctacgcctgtgggggctggatcaaggccaacccagtccctgatggccactcacgctgggggaccttcagcaacctctgggaacacaaccaagcaatcatcaagcacctcctcgaaaactccacggccagcgtgagcgaggcagagagaaaggcgcaagtatactaccgtgcgtgcatgaacgagaccaggatcgaggagctcagggccaaacctctaatggagttgattgagaggctcgggggctggaacatcacaggtccctgggccaaggacaacttccaggacaccctgcaggtggtcaccgcccactaccgcacctcacccttcttctctgtctatgtcagtgccgattccaagaactccaacagcaacgtgatccaggtggaccagtctggcctgggcttgccctcgagagactattacctgaacaaaactgaaaacgagaaggtgctgaccggatatctgaactacatggtccagctggggaagctgctgggcggcggggacgaggaggccatccggccccagatgcagcagatcttggactttgagacggcactggccaacatcaccatcccacaggagaagcgccgtgatgaggagctcatctaccacaaagtgacggcagccgagctgcagaccttggcacccgccatcaactggttgccttttctcaacaccatcttctaccccgtggagatcaatgaatccgagcctattgtggtctatgacaaggaataccttgagcagatctccactctcatcaacaccaccgacagatgcctgctcaacaactacatgatctggaacctggtgcggaaaacaagctccttccttgaccagcgctttcaggacgccgatgagaagttcatggaagtcatgtacgggaccaagaagacctgtcttcctcgctggaagttttgcgtgagtgacacagaaaacaacctgggctttgcgttgggccccatgtttgtcaaagcaaccttcgccgaggacagcaagagcatagccaccgagatcatcctggagattaagaaggcatttgaggaaagcctgagcaccctgaagtggatggatgaggaaacccgaaaatcagccaaggaaaaggccgatgccatctacaacatgataggataccccaacttcatcatggatcccaaggagctggacaaagtgtttaatgactacactgcagttccagacctctactttgaaaatgccatgcggtttttcaacttctcatggagggtcactgccgatcagctcaggaaagcccccaacagagatcagtggagcatgaccccgcccatggtgaacgcctactactcgcccaccaagaatgagattgtgtttccggccgggatcctgcaggcaccattctacacacgctcctcacccaaggccttaaactttggtggcataggtgtcgtcgtgggccatgagctgactcatgcttttgatgatcaaggacgggagtatgacaaggacgggaacctccggccatggtggaagaactcatccgtggaggccttcaagcgtcagaccgagtgcatggtagagcagtacagcaactacagcgtgaacggggagccggtgaacgggcggcacaccctgggggagaacatcgccgacaacgggggtctcaaggcggcctatcgggcttaccagaactgggtgaagaagaacggggctgagcactcgctccccaccctgggcctcaccaataaccagctcttcttcctgggctttgcacaggtctggtgctccgtccgcacacctgagagctcccacgaaggcctcatcaccgatccccacagcccctctcgcttccgggtcatcggctccctctccaattccaaggagttctcagaacacttccgctgcccacctggctcacccatgaacccgcctcacaagtgcgaagtctggtaaggacgaagcggagagagc

SEQ ID NO: 129814 - DNA, 3763 bp, Homo sapiens
  Payload ID: 5396
  Gene Symbol: ECE1
  Gene Name: endothelin converting enzyme 1
  Uniprot ID: P42892
  ENST ID: ENST00000357071
  CDS Start-End: 116-2392
gactctctgatgtttgggagcagatccgagcagctgagcagggtggctgttcctttcctggattagggctgaatctgtgggaaccagaccacccctgagacaggaggcagccctgatgcctctccagggcctgggcctgcagcggaaccccttcctccaagggaagcggggcccggggctcacgtcttccccgcccctcctgcctccttccctgcaggtgaacttccacagcccccggagtggccagaggtgctgggctgcacggacccaggtggagaagcggctggtggtgttggtggtacttctggcggcaggactggtggcctgcttggcagcactgggcatccagtaccagacaagatccccctctgtgtgcctgagcgaagcttgtgtctcagtgaccagctccatcttgagctccatggaccccacagtggacccctgccatgacttcttcagctacgcctgtgggggctggatcaaggccaacccagtccctgatggccactcacgctgggggaccttcagcaacctctgggaacacaaccaagcaatcatcaagcacctcctcgaaaactccacggccagcgtgagcgaggcagagagaaaggcgcaagtatactaccgtgcgtgcatgaacgagaccaggatcgaggagctcagggccaaacctctaatggagttgattgagaggctcgggggctggaacatcacaggtccctgggccaaggacaacttccaggacaccctgcaggtggtcaccgcccactaccgcacctcacccttcttctctgtctatgtcagtgccgattccaagaactccaacagcaacgtgatccaggtggaccagtctggcctgggcttgccctcgagagactattacctgaacaaaactgaaaacgagaaggtgctgaccggatatctgaactacatggtccagctggggaagctgctgggcggcggggacgaggaggccatccggccccagatgcagcagatcttggactttgagacggcactggccaacatcaccatcccacaggagaagcgccgtgatgaggagctcatctaccacaaagtgacggcagccgagctgcagaccttggcacccgccatcaactggttgccttttctcaacaccatcttctaccccgtggagatcaatgaatccgagcctattgtggtctatgacaaggaataccttgagcagatctccactctcatcaacaccaccgacagatgcctgctcaacaactacatgatctggaacctggtgcggaaaacaagctccttccttgaccagcgctttcaggacgccgatgagaagttcatggaagtcatgtacgggaccaagaagacctgtcttcctcgctggaagttttgcgtgagtgacacagaaaacaacctgggctttgcgttgggccccatgtttgtcaaagcaaccttcgccgaggacagcaagagcatagccaccgagatcatcctggagattaagaaggcatttgaggaaagcctgagcaccctgaagtggatggatgaggaaacccgaaaatcagccaaggaaaaggccgatgccatctacaacatgataggataccccaacttcatcatggatcccaaggagctggacaaagtgtttaatgactacactgcagttccagacctctactttgaaaatgccatgcggtttttcaacttctcatggagggtcactgccgatcagctcaggaaagcccccaacagagatcagtggagcatgaccccgcccatggtgaacgcctactactcgcccaccaagaatgagattgtgtttccggccgggatcctgcaggcaccattctacacacgctcctcacccaaggccttaaactttggtggcataggtgtcgtcgtgggccatgagctgactcatgcttttgatgatcaaggacgggagtatgacaaggacgggaacctccggccatggtggaagaactcatccgtggaggccttcaagcgtcagaccgagtgcatggtagagcagtacagcaactacagcgtgaacggggagccggtgaacgggcggcacaccctgggggagaacatcgccgacaacgggggtctcaaggcggcctatcgggcttaccagaactgggtgaagaagaacggggctgagcactcgctccccaccctgggcctcaccaataaccagctcttcttcctgggctttgcacaggtctggtgctccgtccgcacacctgagagctcccacgaaggcctcatcaccgatccccacagcccctctcgcttccgggtcatcggctccctctccaattccaaggagttctcagaacacttccgctgcccacctggctcacccatgaacccgcctcacaagtgcgaagtctggtaaggacgaagcggagagagccaagacggaggaggggaaggggctgaggacgagacccccatccagcctccagggcattgctcagcccgcttggccacccggggccctgcttcctcacactggcgggttttcagccggaaccgagcccatggtgttggctctcaacgtgacccgcagtctgatcccctgtgaagagccggacatcccaggcacacgtgtgcgccaccttcagcaggcattcgggtgctgggctggtggctcatcaggcctgggccccacactgacaagcgccagatacgccacaaataccactgtgtcaaatgctttcaagatatatttttggggaaactattttttaaacactgtggaatacactggaaatcttcagggaaaaacacatttaaacacttttttttttaaggaaagaattggtatatttattatgttctgtttttctaaataacctgtggacaagggaagccccactgatttactccctctcttccccactccctgtgaggctgggctgaggcacggatccctgggccacagagcaagtctccaaatcagacagctgcctcagcccctgggatgtgtgatttcagctcctgtcacctcatgcaagggcgtggagaccagtagaggtgtggaggccaggcagagagaggagcctgctctgcggggggcccagctcatgggcactgccccttcagctagcctgcctccgtcccctgagtccaacagtgggagccctagctgggaagttctgatccccaaagccacagcaggggactgatggctatagcagaatgaggtcgggtcaggaccctcaaacaccatctgggaacaccaagcaccctgaatcgagactgcaggagccctgcggggtgagactgtgtcagagatacactgctggccacaagtgtcccctctcagtcccaccttttcgggctgtcccatgtctatctcaggggcccgttacctctctgcagcagtcccccatcccagccacaccagggtctgtccggccaaccctcttccccagggaaaggagaaaagagaaaacaggctgggcccggtggctcactcctgtaatcccagcactttgggaggttgaggtgggcggatcacctgaggtcaggagtttgagaccagcctggccaacgtggtgaaaccccatctctactaaaaaaaattacaaaaattagccgggagtggtggtgggcacctgtaatcccagttactcgggaggctgaggcaagagaatctcttgagctcaggaggcagaggttgcagtgagctgagattgcgccactgcactccagcctgggtgacagagggagactccgtcccaaaaaaaagaaaagagaaaca

SEQ ID NO: 129815 - DNA, 2484 bp, Homo sapiens
  Payload ID: 5396
  Gene Symbol: ECE1
  Gene Name: endothelin converting enzyme 1
  Uniprot ID: P42892
  ENST ID: ENST00000374893
  CDS Start-End: 76-2388
aggtggtgcaacgcctggcccggcccatcccatcccggccacccgggcagcgggaccaggcgtctggggcacagcatgcggggcgtgtggccgcccccggtgtccgccctgctgtcggcgctggggatgtcgacgtacaagcgggccacgctggacgaggaggacctggtggactcgctctccgagggcgacgcataccccaacggcctgcaggtgaacttccacagcccccggagtggccagaggtgctgggctgcacggacccaggtggagaagcggctggtggtgttggtggtacttctggcggcaggactggtggcctgcttggcagcactgggcatccagtaccagacaagatccccctctgtgtgcctgagcgaagcttgtgtctcagtgaccagctccatcttgagctccatggaccccacagtggacccctgccatgacttcttcagctacgcctgtgggggctggatcaaggccaacccagtccctgatggccactcacgctgggggaccttcagcaacctctgggaacacaaccaagcaatcatcaagcacctcctcgaaaactccacggccagcgtgagcgaggcagagagaaaggcgcaagtatactaccgtgcgtgcatgaacgagaccaggatcgaggagctcagggccaaacctctaatggagttgattgagaggctcgggggctggaacatcacaggtccctgggccaaggacaacttccaggacaccctgcaggtggtcaccgcccactaccgcacctcacccttcttctctgtctatgtcagtgccgattccaagaactccaacagcaacgtgatccaggtggaccagtctggcctgggcttgccctcgagagactattacctgaacaaaactgaaaacgagaaggtgctgaccggatatctgaactacatggtccagctggggaagctgctgggcggcggggacgaggaggccatccggccccagatgcagcagatcttggactttgagacggcactggccaacatcaccatcccacaggagaagcgccgtgatgaggagctcatctaccacaaagtgacggcagccgagctgcagaccttggcacccgccatcaactggttgccttttctcaacaccatcttctaccccgtggagatcaatgaatccgagcctattgtggtctatgacaaggaataccttgagcagatctccactctcatcaacaccaccgacagatgcctgctcaacaactacatgatctggaacctggtgcggaaaacaagctccttccttgaccagcgctttcaggacgccgatgagaagttcatggaagtcatgtacgggaccaagaagacctgtcttcctcgctggaagttttgcgtgagtgacacagaaaacaacctgggctttgcgttgggccccatgtttgtcaaagcaaccttcgccgaggacagcaagagcatagccaccgagatcatcctggagattaagaaggcatttgaggaaagcctgagcaccctgaagtggatggatgaggaaacccgaaaatcagccaaggaaaaggccgatgccatctacaacatgataggataccccaacttcatcatggatcccaaggagctggacaaagtgtttaatgactacactgcagttccagacctctactttgaaaatgccatgcggtttttcaacttctcatggagggtcactgccgatcagctcaggaaagcccccaacagagatcagtggagcatgaccccgcccatggtgaacgcctactactcgcccaccaagaatgagattgtgtttccggccgggatcctgcaggcaccattctacacacgctcctcacccaaggccttaaactttggtggcataggtgtcgtcgtgggccatgagctgactcatgcttttgatgatcaaggacgggagtatgacaaggacgggaacctccggccatggtggaagaactcatccgtggaggccttcaagcgtcagaccgagtgcatggtagagcagtacagcaactacagcgtgaacggggagccggtgaacgggcggcacaccctgggggagaacatcgccgacaacgggggtctcaaggcggcctatcgggcttaccagaactgggtgaagaagaacggggctgagcactcgctccccaccctgggcctcaccaataaccagctcttcttcctgggctttgcacaggtctggtgctccgtccgcacacctgagagctcccacgaaggcctcatcaccgatccccacagcccctctcgcttccgggtcatcggctccctctccaattccaaggagttctcagaacacttccgctgcccacctggctcacccatgaacccgcctcacaagtgcgaagtctggtaaggacgaagcggagagagccaagacggaggaggggaaggggctgaggacgagacccccatccagcctccagggcattgctcagcccgcttggccacc

SEQ ID NO: 129816 - DNA, 2328 bp, Homo sapiens
  Payload ID: 5396
  Gene Symbol: ECE1
  Gene Name: endothelin converting enzyme 1
  ENST ID: ENST00000436918
  CDS Start-End: 51-2267
catcccatcccggccacccgggcagcgggaccaggcgtctggggcacagcatgcggggcgtgtggccgcccccggtgtccgccctgctgtcggcgctggggatgtcgacgtacaagcgggccacgctggacgaggaggacctggtggactcgctctccgagggcgacgcataccccaacggcctgcaggtgaacttccacagcccccggagtggccagaggtgctgggctgcacggacccaggtggagaagcggctggtggtgttggtggtacttctggcggcaggactggtggcctgcttggcagcactgggcatccagtaccagacaagatccccctctgtgtgcctgagcgaagcttgtgtctcagtgaccagctccatcttgagctccatggaccccacagtggacccctgccatgacttcttcagctacgcctgtgggggctggatcaaggccaacccagtccctgatggccactcacgctgggggaccttcagcaacctctgggaacacaaccaagcaatcatcaagcacctcctcgaaaactccacggccagcgtgagcgaggcagagagaaaggcgcaagtatactaccgtgcgtgcatgaacgagaccaggatcgaggagctcagggccaaacctctaatggagttgattgagaggctcgggggctggaacatcacaggtccctgggccaaggacaacttccaggacaccctgcaggtggtcaccgcccactaccgcacctcacccttcttctctgtctatgtcagtgccgattccaagaactccaacagcaacgtgatccaggtggaccagtctggcctgggcttgccctcgagagactattacctgaacaaaactgaaaacgagaaggtgctgaccggatatctgaactacatggtccagctggggaagctgctgggcggcggggacgaggaggccatccggccccagatgcagcagatcttggactttgagacggcactggccaacatcaccatcccacaggagaagcgccgtgatgaggagctcatctaccacaaagtgacggcagccgagctgcagaccttggcacccgccatcaactggttgccttttctcaacaccatcttctaccccgtggagatcaatgaatccgagcctattgtggtctatgacaaggaataccttgagcagatctccactctcatcaacaccaccgacagatgcctgctcaacaactacatgatctggaacctggtgcggaaaacaagctccttccttgaccagcgctttcaggacgccgatgagaagttcatggaagtcatgtacgggaccaagaagacctgtcttcctcgctggaagttttgcgtgagtgacacagaaaacaacctgggctttgcgttgggccccatgtttgtcaaagcaaccttcgccgaggacagcaagagcatagccaccgagatcatcctggagattaagaaggcatttgaggaaagcctgagcaccctgaagtggatggatgaggaaacccgaaaatcagccaaggaaaaggccgatgccatctacaacatgataggataccccaacttcatcatggatcccaaggagctggacaaagtgtttaatgactacactgcagttccagacctctactttgaaaatgccatgcggtttttcaacttctcatggagggtcactgccgatcagctcaggaaagcccccaacagagatcagtggagcatgaccccgcccatggtgaacgcctactactcgcccaccaagaatgagattgtgtttccggccgggatcctgcaggcaccattctacacacgctcctcacccaaggccttaaactttggtggcataggtgtcgtcgtgggccatgagctgactcatgcttttgatgatcaaggacgggagtatgacaaggacgggaacctccggccatggtggaagaactcatccgtggaggccttcaagcgtcagaccgagtgcatggtagagcagtacagcaactacagcgtgaacggggagccggtgaacgggcggcacaccctgggggagaacatcgccgacaacgggggtctcaaggcggcctatcgggtctggtgctccgtccgcacacctgagagctcccacgaaggcctcatcaccgatccccacagcccctctcgcttccgggtcatcggctccctctccaattccaaggagttctcagaacacttccgctgcccacctggctcacccatgaacccgcctcacaagtgcgaagtctggtaaggacgaagcggagagagccaagacggaggaggggaaggggctgaggacgagacccccatcc

SEQ ID NO: 129817 - DNA, 5099 bp, Homo sapiens
  Payload ID: 5396
  Gene Symbol: ECE1
  Gene Name: endothelin converting enzyme 1
  Uniprot ID: P42892
  ENST ID: ENST00000415912
  CDS Start-End: 127-2391
gagcgcgccgcctgggccaggcagccgagccgtccgagcagctgggctgggagcagggaacccggagctgggaatcgggagccgggcgcggggagctgcgcgaagccggggcggagcacgcgagctatgatgtcgacgtacaagcgggccacgctggacgaggaggacctggtggactcgctctccgagggcgacgcataccccaacggcctgcaggtgaacttccacagcccccggagtggccagaggtgctgggctgcacggacccaggtggagaagcggctggtggtgttggtggtacttctggcggcaggactggtggcctgcttggcagcactgggcatccagtaccagacaagatccccctctgtgtgcctgagcgaagcttgtgtctcagtgaccagctccatcttgagctccatggaccccacagtggacccctgccatgacttcttcagctacgcctgtgggggctggatcaaggccaacccagtccctgatggccactcacgctgggggaccttcagcaacctctgggaacacaaccaagcaatcatcaagcacctcctcgaaaactccacggccagcgtgagcgaggcagagagaaaggcgcaagtatactaccgtgcgtgcatgaacgagaccaggatcgaggagctcagggccaaacctctaatggagttgattgagaggctcgggggctggaacatcacaggtccctgggccaaggacaacttccaggacaccctgcaggtggtcaccgcccactaccgcacctcacccttcttctctgtctatgtcagtgccgattccaagaactccaacagcaacgtgatccaggtggaccagtctggcctgggcttgccctcgagagactattacctgaacaaaactgaaaacgagaaggtgctgaccggatatctgaactacatggtccagctggggaagctgctgggcggcggggacgaggaggccatccggccccagatgcagcagatcttggactttgagacggcactggccaacatcaccatcccacaggagaagcgccgtgatgaggagctcatctaccacaaagtgacggcagccgagctgcagaccttggcacccgccatcaactggttgccttttctcaacaccatcttctaccccgtggagatcaatgaatccgagcctattgtggtctatgacaaggaataccttgagcagatctccactctcatcaacaccaccgacagatgcctgctcaacaactacatgatctggaacctggtgcggaaaacaagctccttccttgaccagcgctttcaggacgccgatgagaagttcatggaagtcatgtacgggaccaagaagacctgtcttcctcgctggaagttttgcgtgagtgacacagaaaacaacctgggctttgcgttgggccccatgtttgtcaaagcaaccttcgccgaggacagcaagagcatagccaccgagatcatcctggagattaagaaggcatttgaggaaagcctgagcaccctgaagtggatggatgaggaaacccgaaaatcagccaaggaaaaggccgatgccatctacaacatgataggataccccaacttcatcatggatcccaaggagctggacaaagtgtttaatgactacactgcagttccagacctctactttgaaaatgccatgcggtttttcaacttctcatggagggtcactgccgatcagctcaggaaagcccccaacagagatcagtggagcatgaccccgcccatggtgaacgcctactactcgcccaccaagaatgagattgtgtttccggccgggatcctgcaggcaccattctacacacgctcctcacccaaggccttaaactttggtggcataggtgtcgtcgtgggccatgagctgactcatgcttttgatgatcaaggacgggagtatgacaaggacgggaacctccggccatggtggaagaactcatccgtggaggccttcaagcgtcagaccgagtgcatggtagagcagtacagcaactacagcgtgaacggggagccggtgaacgggcggcacaccctgggggagaacatcgccgacaacgggggtctcaaggcggcctatcgggcttaccagaactgggtgaagaagaacggggctgagcactcgctccccaccctgggcctcaccaataaccagctcttcttcctgggctttgcacaggtctggtgctccgtccgcacacctgagagctcccacgaaggcctcatcaccgatccccacagcccctctcgcttccgggtcatcggctccctctccaattccaaggagttctcagaacacttccgctgcccacctggctcacccatgaacccgcctcacaagtgcgaagtctggtaaggacgaagcggagagagccaagacggaggaggggaaggggctgaggacgagacccccatccagcctccagggcattgctcagcccgcttggccacccggggccctgcttcctcacactggcgggttttcagccggaaccgagcccatggtgttggctctcaacgtgacccgcagtctgatcccctgtgaagagccggacatcccaggcacacgtgtgcgccaccttcagcaggcattcgggtgctgggctggtggctcatcaggcctgggccccacactgacaagcgccagatacgccacaaataccactgtgtcaaatgctttcaagatatatttttggggaaactattttttaaacactgtggaatacactggaaatcttcagggaaaaacacatttaaacacttttttttttaaggaaagaattggtatatttattatgttctgtttttctaaataacctgtggacaagggaagccccactgatttactccctctcttccccactccctgtgaggctgggctgaggcacggatccctgggccacagagcaagtctccaaatcagacagctgcctcagcccctgggatgtgtgatttcagctcctgtcacctcatgcaagggcgtggagaccagtagaggtgtggaggccaggcagagagaggagcctgctctgcggggggcccagctcatgggcactgccccttcagctagcctgcctccgtcccctgagtccaacagtgggagccctagctgggaagttctgatccccaaagccacagcaggggactgatggctatagcagaatgaggtcgggtcaggaccctcaaacaccatctgggaacaccaagcaccctgaatcgagactgcaggagccctgcggggtgagactgtgtcagagatacactgctggccacaagtgtcccctctcagtcccaccttttcgggctgtcccatgtctatctcaggggcccgttacctctctgcagcagtcccccatcccagccacaccagggtctgtccggccaaccctcttccccagggaaaggagaaaagagaaaacaggctgggcccggtggctcactcctgtaatcccagcactttgggaggttgaggtgggcggatcacctgaggtcaggagtttgagaccagcctggccaacgtggtgaaaccccatctctactaaaaaaaattacaaaaattagccgggagtggtggtgggcacctgtaatcccagttactcgggaggctgaggcaagagaatctcttgagctcaggaggcagaggttgcagtgagctgagattgcgccactgcactccagcctgggtgacagagggagactccgtcccaaaaaaaagaaaagagaaacagctgtcacctcccgcaggacccaaatcctctctctgagcaccgtcatccaccacatggctgggcctggctcccaggaccagtccagtcctctagtgccttatctgaggctgcagccgccagtctccaccccaaggagacagcccctgctcctagatgcccttggcctccgcagtgcagcccccaggtgtcctgactgaagcacaggccatagccccatttccccggtgcctgcagggctaacctccacgggagcccaggagctctggccggcaggtccatggcacagggcatcggaagactgcaaaactgctggacttaccctgggctgcagtccattgtcggcccctgggttgaatcaagatagtacttgcagctagatggatgcttttagccaggggacattgtgaggggaagattcctccacccagtctggcctgtggtgtctgtctcctccctgagaccacagcttctccagtagcagactcatgggcgccaccaagtggaagcacctggagcggcctctgccatccagtggggaagccaggccccgagacggaggtgggggcagcacgtgccctccacagccaccgctttcccgcctcagcagcccaggcctcctggcccagccctgcctggacagtgctctcccctcacccgggaagctggaatcctcctgcccgagaggaagcagacggcacagggacacccctgccaccttgggatctgcctccaagctggtgcagggtatcgagagtggattccagatggaggtcctggtcccagcacgcagcagtcctggtagctctgcagaggagacaggaacccgagaagtagctgaagcagaagccagccgcagtccccttgccacatagaggcgggcttctcccagccatggtgtcccctctgcctcccctcccccgaccctcctgccttccgcgtggagggtggtggtcctgtagtgtcagcaccagcaccatgggcttggaccccctccctggacacaggcaggtgtcctagggctgggggtgcagcccgagggaatggagaccacactcatggctcaggtctgccggggccggcagggggttggggaagaagagggctcaggcccagcaggggtggaagcccctgccactgccactacccgctccagagctttaaggaaaatgaagtgagacccctccccttaggcctggggagccatagggctggcttctctgtgggtgcgtggacgtggggttgggagctgggaatctattttttgtattatgttttgagctactgtagttttggcgtggcactattgtaatggaaataaaatacttgtacggagggc

SEQ ID NO: 129818 - DNA, 674 bp, Homo sapiens
  Payload ID: 5396
  Gene Symbol: ECE1
  Gene Name: endothelin converting enzyme 1
  ENST ID: ENST00000473505
  CDS Start-End: 444-674
gtttagctagactgttaggctggagggatttttcctccctttcaggacctgaatggagctatttctccttgcatctctgccaacatctcccaggatccacctctgatccactggtgggctcgggcatcaacagctttgggttccaatcccagctgtccccattcagctgggtggtgagaagccagggtctcacctctctggacctcagtttcctcacttgtaaaaagaaaaataacaaggtgaacttccacagcccccggagtggccagaggtgctgggctgcacggacccaggtggagaagcggctggtggtgttggtggtacttctggcggcaggactggtggcctgcttggcagcactgggcatccagtaccagacaagatccccctctgtgtgcctgagcgaagcttgtgtctcagtgaccagctccatcttgagctccatggaccccacagtggacccctgccatgacttcttcagctacgcctgtgggggctggatcaaggccaacccagtccctgatggccactcacgctgggggaccttcagcaacctctgggaacacaaccaagcaatcatcaagcacctcctcgaaaactccacggccagcgtgagcgaggcagagagaaaggcgcaagtatactaccgtgcgtgcatgaacgagaccaggatc

SEQ ID NO: 129819 - DNA, 580 bp, Homo sapiens
  Payload ID: 5396
  Gene Symbol: ECE1
  Gene Name: endothelin converting enzyme 1
  ENST ID: ENST00000527991
  CDS Start-End: 272-580
agattcaacccagatttctcctccacggctgcacagtgccaggaagggaactgagaagaccaaagtggaggttctttaccttccccaacacactcggggccaggcgtggcacccacaactgcaaatgagacaattagggagaataagtgctggctgccctgtcagcccagagcctcagtctgcccagggcacccagactctgtgaggttcccacctgaagaagcagttccatcttccacaaggagcacaggaccaagagtccaggacccagatgtcgacgtacaagcgggccacgctggacgaggaggacctggtggactcgctctccgagggcgacgcataccccaacggcctgcaggtgaacttccacagcccccggagtggccagaggtgctgggctgcacggacccaggtggagaagcggctggtggtgttggtggtacttctggcggcaggactggtggcctgcttggcagcactgggcatccagtaccagacaagatccccctctgtgtgcctgagcgaagcttgtgtctcagtgaccagctccatcttgagctccatggaccccacagtggac

SEQ ID NO: 129820 - DNA, 578 bp, Homo sapiens
  Payload ID: 5396
  Gene Symbol: ECE1
  Gene Name: endothelin converting enzyme 1
  ENST ID: ENST00000481130
  CDS Start-End: 175-578
aggacatcacacaggagcacaggagcatgaggaggtgcaggggcatctgtgggtagccctggagtcaggaccagctgctttctggtctgctttgcagtttgtgcttggagaagatcagagtggacaactcagccccttaaacccagctgggaggtgacacctgaagtcgtaaggatggagcagatgtcgacgtacaagcgggccacgctggacgaggaggacctggtggactcgctctccgagggcgacgcataccccaacggcctgcaggtgaacttccacagcccccggagtggccagaggtgctgggctgcacggacccaggtggagaagcggctggtggtgttggtggtacttctggcggcaggactggtggcctgcttggcagcactgggcatccagtaccagacaagatccccctctgtgtgcctgagcgaagcttgtgtctcagtgaccagctccatcttgagctccatggaccccacagtggacccctgccatgacttcttcagctacgcctgtgggggctggatcaaggccaacccagtccctgatggccactcacgctgggggacctt

SEQ ID NO: 129821 - DNA, 1823 bp, Homo sapiens
  Payload ID: 5397
  Gene Symbol: ECE2
  Gene Name: endothelin converting enzyme 2
  Uniprot ID: O60344
  ENST ID: ENST00000324557
  CDS Start-End: 46-813
attggctgaagggccggcggctctggctgcccggcggttgagagcatggcctctccaggggcaggtagggcgcctccggagttaccggagcggaactgcgggtaccgcgaagtcgagtactgggatcagcgctaccaaggcgcagccgattctgccccctacgattggttcggggacttctcctccttccgtgccctcctagagccggagctgcggcccgaggaccgtatccttgtgctaggttgcgggaacagtgccctgagctacgagctgttcctcggaggcttccctaatgtgaccagtgtggactactcatcagtcgtggtggctgccatgcaggctcgccatgcccatgtgccgcagctgcgctgggagaccatggatgtgcggaagctggacttccccagtgcttcttttgatgtggtgctcgagaagggcacgctggatgccctgctggctggggaacgagatccctggaccgtgtcctctgaaggtgtccacactgtggaccaggtgttgagtgaggtgagccgcgtgcttgtccctggaggccggtttatctcaatgacttctgctgccccccactttcggaccagacactatgcccaagcctattatggctggtccctgaggcatgctacctatggcagcggtttccacttccatctctacctcatgcacaagggcgggaagctcagtgtggcccagctggctctgggggcccaaatcctctcaccccccagacctcccacctcaccttgcttccttcaggactcagatcatgaggacttccttagtgccattcagctctgaggccagagcatggtcctccacccttcctgccattctgccctgggctcctcaggtagttggaattcctgacttaggacttggggttgggtccaaggtgcttacatcccaggggcctcatgcctaagatagagggtgggagcgaacccacatgaaccaatacagcccagctccaactagatccagattccaggtttcttgcttctttcttgggttcctcagttctctcctgggttccccaacctcctctgccaccacaccaaaccaccagtgatgcatcccctggggcaaagctcatcataacccctctgcacaccagccagcctggagaccgttgttcctggggcctgttactgatcctcatctagccttgatttatccacaggagactgcaggctttgaacctagattgctttatgtttctcaccctagctccatccccaacactggtgaccagtcacgcctgggttgtatctctacccaaggaggccacatcataatgaggttcccaggccagcctggcctgtctgtcttacttggcaaccgtccctcaccagcaacatgcacctgagattcccaagtacctgccccccctcccattttggcctggctcctgagacctaagcagcggccacacacacacagagggggtctgtgtttattcacacactcctggtacagtgaggatggaggaacatttacgaagggcacccctgggttgagaacatctccggggccacagatgtcatccaaaggttcagagcagtccccatttgggttcccaggggcaagacgcaggggtccaaggtaaaatcggatctgggcccttggaaggtgatgataccttggggagaaggggtctgccagaaagcctcctggggtcaggcctgggcagactggccatgtggttggtaaccgtgtcgggggcttgtctcatcccagcctcaacacccatcctatctgccaggcgcagaagagcgtggccgagactgaggggagggcaggaaccatga

SEQ ID NO: 129822 - DNA, 2667 bp, Homo sapiens
  Payload ID: 5397
  Gene Symbol: ECE2
  Gene Name: endothelin converting enzyme 2
  Uniprot ID: O60344
  ENST ID: ENST00000357474
  CDS Start-End: 120-2555
ggtgctgcgcggcggccgtgatggctggtgacggcggggccgggcaggggaccggggccgcggcccgggagcgggccagctgccgggagccctgaatcaccgcctggcccgactccaccatgaacgtcgcgctgcaggagctgggagctggcagcaacatggtggagtacaaacgggccacgcttcgggatgaagacgcacccgagacccccgtagagggcggggcctccccggacgccatggaggtgggcaagggggcttcccctttctcaccaggccccagccctggcatgacgcctggcacacccaggagctctgggctgttctggagggtcacctgcccccacctccgctccatctctggcctctgctctaggactatggtgggattccagaaggggacaagacagctgttaggctcacgcacgcagctggagctggtcttagcaggtgcctctctactgctggctgcactgcttctgggctgccttgtggccctaggggtccagtaccacagagacccatcccacagcacctgccttacagaggcctgcattcgagtggctggaaaaatcctggagtccctggaccgaggggtgagcccctgtgaggacttttaccagttctcctgtgggggctggattcggaggaaccccctgcccgatgggcgttctcgctggaacaccttcaacagcctctgggaccaaaaccaggccatactgaagcacctgcttgaaaacaccaccttcaactccagcagtgaagctgagcagaagacacagcgcttctacctatcttgcctacaggtggagcgcattgaggagctgggagcccagccactgagagacctcattgagaagattggtggttggaacattacggggccctgggaccaggacaactttatggaggtgttgaaggcagtagcagggacctacagggccaccccattcttcaccgtctacatcagtgccgactctaagagttccaacagcaatgttatccaggtggaccagtctgggctctttctgccctctcgggattactacttaaacagaactgccaatgagaaagtgctcactgcctatctggattacatggaggaactggggatgctgctgggtgggcggcccacctccacgagggagcagatgcagcaggtgctggagttggagatacagctggccaacatcacagtgccccaggaccagcggcgcgacgaggagaagatctaccacaagatgagcatttcggagctgcaggctctggcgccctccatggactggcttgagttcctgtctttcttgctgtcaccattggagttgagtgactctgagcctgtggtggtgtatgggatggattatttgcagcaggtgtcagagctcatcaaccgcacggaaccaagcatcctgaacaattacctgatctggaacctggtgcaaaagacaacctcaagcctggaccgacgctttgagtctgcacaagagaagctgctggagaccctctatggcactaagaagtcctgtgtgccgaggtggcagacctgcatctccaacacggatgacgcccttggctttgctttggggtccctcttcgtgaaggccacgtttgaccggcaaagcaaagaaattgcagaggggatgatcagcgaaatccggaccgcatttgaggaggccctgggacagctggtttggatggatgagaagacccgccaggcagccaaggagaaagcagatgccatctatgatatgattggtttcccagactttatcctggagcccaaagagctggatgatgtttatgacgggtacgaaatttctgaagattctttcttccaaaacatgttgaatttgtacaacttctctgccaaggttatggctgaccagctccgcaagcctcccagccgagaccagtggagcatgaccccccagacagtgaatgcctactaccttccaactaagaatgagatcgtcttccccgctggcatcctgcaggcccccttctatgcccgcaaccaccccaaggccctgaacttcggtggcatcggtgtggtcatgggccatgagttgacgcatgcctttgatgaccaagggcgcgagtatgacaaagaagggaacctgcggccctggtggcagaatgagtccctggcagccttccggaaccacacggcctgcatggaggaacagtacaatcaataccaggtcaatggggagaggctcaacggccgccagacgctgggggagaacattgctgacaacggggggctgaaggctgcctacaatgcttacaaagcatggctgagaaagcatggggaggagcagcaactgccagccgtggggctcaccaaccaccagctcttcttcgtgggatttgcccaggtgtggtgctcggtccgcacaccagagagctctcacgaggggctggtgaccgacccccacagccctgcccgcttccgcgtgctgggcactctctccaactcccgtgacttcctgcggcacttcggctgccctgtcggctcccccatgaacccagggcagctgtgtgaggtgtggtagacctggatcaggggagaaatggccagctgtcaccagacctggggcagctctcctgacaaagctgtttgctcttgggttgggaggaagcaaatgcaagctgggctgggtctag

SEQ ID NO: 129823 - DNA, 3147 bp, Homo sapiens
  Payload ID: 5397
  Gene Symbol: ECE2
  Gene Name: endothelin converting enzyme 2
  Uniprot ID: O60344
  ENST ID: ENST00000359140
  CDS Start-End: 144-2354
ggggggcggccgcggccgagcgggggtgctgcgcggcggccgtgatggctggtgacggcggggccgggcaggggaccggggccgcggcccgggagcgggccagctgccgggagccctgaatcaccgcctggcccgactccaccatgaacgtcgcgctgcaggagctgggagctggcagcaacgtgggattccagaaggggacaagacagctgttaggctcacgcacgcagctggagctggtcttagcaggtgcctctctactgctggctgcactgcttctgggctgccttgtggccctaggggtccagtaccacagagacccatcccacagcacctgccttacagaggcctgcattcgagtggctggaaaaatcctggagtccctggaccgaggggtgagcccctgtgaggacttttaccagttctcctgtgggggctggattcggaggaaccccctgcccgatgggcgttctcgctggaacaccttcaacagcctctgggaccaaaaccaggccatactgaagcacctgcttgaaaacaccaccttcaactccagcagtgaagctgagcagaagacacagcgcttctacctatcttgcctacaggtggagcgcattgaggagctgggagcccagccactgagagacctcattgagaagattggtggttggaacattacggggccctgggaccaggacaactttatggaggtgttgaaggcagtagcagggacctacagggccaccccattcttcaccgtctacatcagtgccgactctaagagttccaacagcaatgttatccaggtggaccagtctgggctctttctgccctctcgggattactacttaaacagaactgccaatgagaaagtgctcactgcctatctggattacatggaggaactggggatgctgctgggtgggcggcccacctccacgagggagcagatgcagcaggtgctggagttggagatacagctggccaacatcacagtgccccaggaccagcggcgcgacgaggagaagatctaccacaagatgagcatttcggagctgcaggctctggcgccctccatggactggcttgagttcctgtctttcttgctgtcaccattggagttgagtgactctgagcctgtggtggtgtatgggatggattatttgcagcaggtgtcagagctcatcaaccgcacggaaccaagcatcctgaacaattacctgatctggaacctggtgcaaaagacaacctcaagcctggaccgacgctttgagtctgcacaagagaagctgctggagaccctctatggcactaagaagtcctgtgtgccgaggtggcagacctgcatctccaacacggatgacgcccttggctttgctttggggtccctcttcgtgaaggccacgtttgaccggcaaagcaaagaaattgcagaggggatgatcagcgaaatccggaccgcatttgaggaggccctgggacagctggtttggatggatgagaagacccgccaggcagccaaggagaaagcagatgccatctatgatatgattggtttcccagactttatcctggagcccaaagagctggatgatgtttatgacgggtacgaaatttctgaagattctttcttccaaaacatgttgaatttgtacaacttctctgccaaggttatggctgaccagctccgcaagcctcccagccgagaccagtggagcatgaccccccagacagtgaatgcctactaccttccaactaagaatgagatcgtcttccccgctggcatcctgcaggcccccttctatgcccgcaaccaccccaaggccctgaacttcggtggcatcggtgtggtcatgggccatgagttgacgcatgcctttgatgaccaagggcgcgagtatgacaaagaagggaacctgcggccctggtggcagaatgagtccctggcagccttccggaaccacacggcctgcatggaggaacagtacaatcaataccaggtcaatggggagaggctcaacggccgccagacgctgggggagaacattgctgacaacggggggctgaaggctgcctacaatgcttacaaagcatggctgagaaagcatggggaggagcagcaactgccagccgtggggctcaccaaccaccagctcttcttcgtgggatttgcccaggtgtggtgctcggtccgcacaccagagagctctcacgaggggctggtgaccgacccccacagccctgcccgcttccgcgtgctgggcactctctccaactcccgtgacttcctgcggcacttcggctgccctgtcggctcccccatgaacccagggcagctgtgtgaggtgtggtagacctggatcaggggagaaatggccagctgtcaccagacctggggcagctctcctgacaaagctgtttgctcttgggttgggaggaagcaaatgcaagctgggctgggtctagtccctcccccccacaggtgacatgagtacagaccctcctcaatcaccacattgtgcctctgctttgggggtgcccctgcctccagcagagcccccaccattcactgtgacatctttccgtgtcaccctgcctggaagaggtctgggtggggaggccagttcccataggaaggagtctgcctcttctgtccccaggctcactcagcctggcggccatggggcctgccgtgcctgccccactgtgacccacaggcctgggtggtgtacctcctggacttctccccaggctcactcagtgcgcacttaggggtggactcagctctgtctggctcaccctcacgggctacccccacctcaccctgtgctccttgtgccactgctcccagtgctgctgctgaccttcactgacagctcctagtggaagcccaagggcctctgaaagcctcctgctgcccactgtttccctgggctgagaggggaagtgcatatgtgtagcgggtactggttcctgtgtcttagggcacaagccttagcaaatgattgattctccctggacaaagcaggaaagcagatagagcagggaaaaggaagaacagagtttatttttacagaaaagagggtgggagggtgtggtcttggcccttataggaccctgtgccaataaacagacatgcatccgtca

SEQ ID NO: 129824 - DNA, 3445 bp, Homo sapiens
  Payload ID: 5397
  Gene Symbol: ECE2
  Gene Name: endothelin converting enzyme 2
  Uniprot ID: O60344
  ENST ID: ENST00000402825
  CDS Start-End: 1-2652
atggcctctccaggggcaggtagggcgcctccggagttaccggagcggaactgcgggtaccgcgaagtcgagtactgggatcagcgctaccaaggcgcagccgattctgccccctacgattggttcggggacttctcctccttccgtgccctcctagagccggagctgcggcccgaggaccgtatccttgtgctaggttgcgggaacagtgccctgagctacgagctgttcctcggaggcttccctaatgtgaccagtgtggactactcatcagtcgtggtggctgccatgcaggctcgccatgcccatgtgccgcagctgcgctgggagaccatggatgtgcggaagctggacttccccagtgcttcttttgatgtggtgctcgagaagggcacgctggatgccctgctggctggggaacgagatccctggaccgtgtcctctgaaggtgtccacactgtggaccaggtgttgagtgaggtgggattccagaaggggacaagacagctgttaggctcacgcacgcagctggagctggtcttagcaggtgcctctctactgctggctgcactgcttctgggctgccttgtggccctaggggtccagtaccacagagacccatcccacagcacctgccttacagaggcctgcattcgagtggctggaaaaatcctggagtccctggaccgaggggtgagcccctgtgaggacttttaccagttctcctgtgggggctggattcggaggaaccccctgcccgatgggcgttctcgctggaacaccttcaacagcctctgggaccaaaaccaggccatactgaagcacctgcttgaaaacaccaccttcaactccagcagtgaagctgagcagaagacacagcgcttctacctatcttgcctacaggtggagcgcattgaggagctgggagcccagccactgagagacctcattgagaagattggtggttggaacattacggggccctgggaccaggacaactttatggaggtgttgaaggcagtagcagggacctacagggccaccccattcttcaccgtctacatcagtgccgactctaagagttccaacagcaatgttatccaggtggaccagtctgggctctttctgccctctcgggattactacttaaacagaactgccaatgagaaagtgctcactgcctatctggattacatggaggaactggggatgctgctgggtgggcggcccacctccacgagggagcagatgcagcaggtgctggagttggagatacagctggccaacatcacagtgccccaggaccagcggcgcgacgaggagaagatctaccacaagatgagcatttcggagctgcaggctctggcgccctccatggactggcttgagttcctgtctttcttgctgtcaccattggagttgagtgactctgagcctgtggtggtgtatgggatggattatttgcagcaggtgtcagagctcatcaaccgcacggaaccaagcatcctgaacaattacctgatctggaacctggtgcaaaagacaacctcaagcctggaccgacgctttgagtctgcacaagagaagctgctggagaccctctatggcactaagaagtcctgtgtgccgaggtggcagacctgcatctccaacacggatgacgcccttggctttgctttggggtccctcttcgtgaaggccacgtttgaccggcaaagcaaagaaattgcagaggggatgatcagcgaaatccggaccgcatttgaggaggccctgggacagctggtttggatggatgagaagacccgccaggcagccaaggagaaagcagatgccatctatgatatgattggtttcccagactttatcctggagcccaaagagctggatgatgtttatgacgggtacgaaatttctgaagattctttcttccaaaacatgttgaatttgtacaacttctctgccaaggttatggctgaccagctccgcaagcctcccagccgagaccagtggagcatgaccccccagacagtgaatgcctactaccttccaactaagaatgagatcgtcttccccgctggcatcctgcaggcccccttctatgcccgcaaccaccccaaggccctgaacttcggtggcatcggtgtggtcatgggccatgagttgacgcatgcctttgatgaccaagggcgcgagtatgacaaagaagggaacctgcggccctggtggcagaatgagtccctggcagccttccggaaccacacggcctgcatggaggaacagtacaatcaataccaggtcaatggggagaggctcaacggccgccagacgctgggggagaacattgctgacaacggggggctgaaggctgcctacaatgcttacaaagcatggctgagaaagcatggggaggagcagcaactgccagccgtggggctcaccaaccaccagctcttcttcgtgggatttgcccaggtgtggtgctcggtccgcacaccagagagctctcacgaggggctggtgaccgacccccacagccctgcccgcttccgcgtgctgggcactctctccaactcccgtgacttcctgcggcacttcggctgccctgtcggctcccccatgaacccagggcagctgtgtgaggtgtggtagacctggatcaggggagaaatggccagctgtcaccagacctggggcagctctcctgacaaagctgtttgctcttgggttgggaggaagcaaatgcaagctgggctgggtctagtccctcccccccacaggtgacatgagtacagaccctcctcaatcaccacattgtgcctctgctttgggggtgcccctgcctccagcagagcccccaccattcactgtgacatctttccgtgtcaccctgcctggaagaggtctgggtggggaggccagttcccataggaaggagtctgcctcttctgtccccaggctcactcagcctggcggccatggggcctgccgtgcctgccccactgtgacccacaggcctgggtggtgtacctcctggacttctccccaggctcactcagtgcgcacttaggggtggactcagctctgtctggctcaccctcacgggctacccccacctcaccctgtgctccttgtgccactgctcccagtgctgctgctgaccttcactgacagctcctagtggaagcccaagggcctctgaaagcctcctgctgcccactgtttccctgggctgagaggggaagtgcatatgtgtagcgggtactggttcctgtgtcttagggcacaagccttagcaaatgattgattctccctggacaaagcaggaaagcagatagagcagggaaaaggaagaacagagtttatttttacagaaaagagggtgggagggtgtggtcttggcccttataggaccctgtgccaataaacagacatgcatccgtca

SEQ ID NO: 129825 - DNA, 3229 bp, Homo sapiens
  Payload ID: 5397
  Gene Symbol: ECE2
  Gene Name: endothelin converting enzyme 2
  Uniprot ID: O60344
  ENST ID: ENST00000404464
  CDS Start-End: 139-2436
gcggccgcggccgagcgggggtgctgcgcggcggccgtgatggctggtgacggcggggccgggcaggggaccggggccgcggcccgggagcgggccagctgccgggagccctgaatcaccgcctggcccgactccaccatgaacgtcgcgctgcaggagctgggagctggcagcaacatggtggagtacaaacgggccacgcttcgggatgaagacgcacccgagacccccgtagagggcggggcctccccggacgccatggaggtgggattccagaaggggacaagacagctgttaggctcacgcacgcagctggagctggtcttagcaggtgcctctctactgctggctgcactgcttctgggctgccttgtggccctaggggtccagtaccacagagacccatcccacagcacctgccttacagaggcctgcattcgagtggctggaaaaatcctggagtccctggaccgaggggtgagcccctgtgaggacttttaccagttctcctgtgggggctggattcggaggaaccccctgcccgatgggcgttctcgctggaacaccttcaacagcctctgggaccaaaaccaggccatactgaagcacctgcttgaaaacaccaccttcaactccagcagtgaagctgagcagaagacacagcgcttctacctatcttgcctacaggtggagcgcattgaggagctgggagcccagccactgagagacctcattgagaagattggtggttggaacattacggggccctgggaccaggacaactttatggaggtgttgaaggcagtagcagggacctacagggccaccccattcttcaccgtctacatcagtgccgactctaagagttccaacagcaatgttatccaggtggaccagtctgggctctttctgccctctcgggattactacttaaacagaactgccaatgagaaagtgctcactgcctatctggattacatggaggaactggggatgctgctgggtgggcggcccacctccacgagggagcagatgcagcaggtgctggagttggagatacagctggccaacatcacagtgccccaggaccagcggcgcgacgaggagaagatctaccacaagatgagcatttcggagctgcaggctctggcgccctccatggactggcttgagttcctgtctttcttgctgtcaccattggagttgagtgactctgagcctgtggtggtgtatgggatggattatttgcagcaggtgtcagagctcatcaaccgcacggaaccaagcatcctgaacaattacctgatctggaacctggtgcaaaagacaacctcaagcctggaccgacgctttgagtctgcacaagagaagctgctggagaccctctatggcactaagaagtcctgtgtgccgaggtggcagacctgcatctccaacacggatgacgcccttggctttgctttggggtccctcttcgtgaaggccacgtttgaccggcaaagcaaagaaattgcagaggggatgatcagcgaaatccggaccgcatttgaggaggccctgggacagctggtttggatggatgagaagacccgccaggcagccaaggagaaagcagatgccatctatgatatgattggtttcccagactttatcctggagcccaaagagctggatgatgtttatgacgggtacgaaatttctgaagattctttcttccaaaacatgttgaatttgtacaacttctctgccaaggttatggctgaccagctccgcaagcctcccagccgagaccagtggagcatgaccccccagacagtgaatgcctactaccttccaactaagaatgagatcgtcttccccgctggcatcctgcaggcccccttctatgcccgcaaccaccccaaggccctgaacttcggtggcatcggtgtggtcatgggccatgagttgacgcatgcctttgatgaccaagggcgcgagtatgacaaagaagggaacctgcggccctggtggcagaatgagtccctggcagccttccggaaccacacggcctgcatggaggaacagtacaatcaataccaggtcaatggggagaggctcaacggccgccagacgctgggggagaacattgctgacaacggggggctgaaggctgcctacaatgcttacaaagcatggctgagaaagcatggggaggagcagcaactgccagccgtggggctcaccaaccaccagctcttcttcgtgggatttgcccaggtgtggtgctcggtccgcacaccagagagctctcacgaggggctggtgaccgacccccacagccctgcccgcttccgcgtgctgggcactctctccaactcccgtgacttcctgcggcacttcggctgccctgtcggctcccccatgaacccagggcagctgtgtgaggtgtggtagacctggatcaggggagaaatggccagctgtcaccagacctggggcagctctcctgacaaagctgtttgctcttgggttgggaggaagcaaatgcaagctgggctgggtctagtccctcccccccacaggtgacatgagtacagaccctcctcaatcaccacattgtgcctctgctttgggggtgcccctgcctccagcagagcccccaccattcactgtgacatctttccgtgtcaccctgcctggaagaggtctgggtggggaggccagttcccataggaaggagtctgcctcttctgtccccaggctcactcagcctggcggccatggggcctgccgtgcctgccccactgtgacccacaggcctgggtggtgtacctcctggacttctccccaggctcactcagtgcgcacttaggggtggactcagctctgtctggctcaccctcacgggctacccccacctcaccctgtgctccttgtgccactgctcccagtgctgctgctgaccttcactgacagctcctagtggaagcccaagggcctctgaaagcctcctgctgcccactgtttccctgggctgagaggggaagtgcatatgtgtagcgggtactggttcctgtgtcttagggcacaagccttagcaaatgattgattctccctggacaaagcaggaaagcagatagagcagggaaaaggaagaacagagtttatttttacagaaaagagggtgggagggtgtggtcttggcccttataggaccctgtgccaataaacagacatgcatccgtca

SEQ ID NO: 129826 - DNA, 588 bp, Homo sapiens
  Payload ID: 5397
  Gene Symbol: ECE2
  Gene Name: endothelin converting enzyme 2
  ENST ID: ENST00000422932
  CDS Start-End: 1-204
atgaacgtcgcgctgcaggagctgggagctggcagcaacgtgggattccagaaggggacaagacagctgttaggctcacgcacgcagctggagctggtcttagcaggtgcctctctactgctggctgcactgcttctgggctgccttgtggccctaggggtccagtaccacagagagtttgcctcttccagacagacagactgacagtctcctaccctccggccatgttccctaccacagacccatcccacagcacctgccttacagaggcctgcattcgagtggctggaaaaatcctggagtccctggaccgaggggtgagcccctgtgaggacttttaccagttctcctgtgggggctggattcggaggaaccccctgcccgatgggcgttctcgctggaacaccttcaacagcctctgggaccaaaaccaggccatactgaagcacctgcttgaaaacaccaccttcaactccagcagtgaagctgagcagaagacacagcgcttctacctatcttgcctacaggtggagcgcattgaggagctgggagcccagccactgagagacctcattgagaagattggtg

SEQ ID NO: 129827 - DNA, 2588 bp, Homo sapiens
  Payload ID: 5397
  Gene Symbol: ECE2
  Gene Name: endothelin converting enzyme 2
  ENST ID: ENST00000430587
  CDS Start-End: 1-2151
agccctggcatgacgcctggcacacccaggagctctgggctgttctggagggtcacctgcccccacctccgctccatctctggcctctgctctaggactatggtgggattccagaaggggacaagacagctgttaggctcacgcacgcagctggagctggtcttagcaggtgcctctctactgctggctgcactgcttctgggctgccttgtggccctaggggtccagtaccacagagacccatcccacagcacctgccttacagaggcctgcattcgagtggctggaaaaatcctggagtccctggaccgaggggtgagcccctgtgaggacttttaccagttctcctgtgggggctggattcggaggaaccccctgcccgatgggcgttctcgctggaacaccttcaacagcctctgggaccaaaaccaggccatactgaagcacctgcttgaaaacaccaccttcaactccagcagtgaagctgagcagaagacacagcgcttctacctatcttgcctacaggtggagcgcattgaggagctgggagcccagccactgagagacctcattgagaagattggtggttggaacattacggggccctgggaccaggacaactttatggaggtgttgaaggcagtagcagggacctacagggccaccccattcttcaccgtctacatcagtgccgactctaagagttccaacagcaatgttatccaggtggaccagtctgggctctttctgccctctcgggattactacttaaacagaactgccaatgagaaagtgctcactgcctatctggattacatggaggaactggggatgctgctgggtgggcggcccacctccacgagggagcagatgcagcaggtgctggagttggagatacagctggccaacatcacagtgccccaggaccagcggcgcgacgaggagaagatctaccacaagatgagcatttcggagctgcaggctctggcgccctccatggactggcttgagttcctgtctttcttgctgtcaccattggagttgagtgactctgagcctgtggtggtgtatgggatggattatttgcagcaggtgtcagagctcatcaaccgcacggaaccaagcatcctgaacaattacctgatctggaacctggtgcaaaagacaacctcaagcctggaccgacgctttgagtctgcacaagagaagctgctggagaccctctatggcactaagaagtcctgtgtgccgaggtggcagacctgcatctccaacacggatgacgcccttggctttgctttggggtccctcttcgtgaaggccacgtttgaccggcaaagcaaagaaattgcagaggggatgatcagcgaaatccggaccgcatttgaggaggccctgggacagctggtttggatggatgagaagacccgccaggcagccaaggagaaagcagatgccatctatgatatgattggtttcccagactttatcctggagcccaaagagctggatgatgtttatgacgggtacgaaatttctgaagattctttcttccaaaacatgttgaatttgtacaacttctctgccaaggttatggctgaccagctccgcaagcctcccagccgagaccagtggagcatgaccccccagacagtgaatgcctactaccttccaactaagaatgagatcgtcttccccgctggcatcctgcaggcccccttctatgcccgcaaccaccccaaggccctgaacttcggtggcatcggtgtggtcatgggccatgagttgacgcatgcctttgatgaccaagggcgcgagtatgacaaagaagggaacctgcggccctggtggcagaatgagtccctggcagccttccggaaccacacggcctgcatggaggaacagtacaatcaataccaggtcaatggggagaggctcaacggccgccagacgctgggggagaacattgctgacaacggggggctgaaggctgcctacaatgcttacaaagcatggctgagaaagcatggggaggagcagcaactgccagccgtggggctcaccaaccaccagctcttcttcgtgggatttgcccaggtatcaccctctcggaaggcctggggtctgcccctttgtcctgctccctcctgagtatgtcattaggagaactctggggcacgtgtcaaacgggctggtgaatggggctgaggctggggcatgaaaggtgggctgggaaggcccatgcccagagcctccggccagccagggcccacaaaggcagcctgaagaggcctgagcgggagaatgccttggtaggatttcgcatagttcaaagggcaaggttgtcgtgcttgcggggcacagggtggcgaagggggcaaacgttcatcctcacgctgttcctgtgagggagacatgcaggaaacgaaagctcgggacgcagagtggcctgtccagggctgcccaggaatagagtaagtggcagagcaaggacccaggcagagcctccgctgggcagccacagcaggcagcttctggggctccgctttttcccctcgtcatgtccatgctgggcaacccgatgtcca

SEQ ID NO: 129828 - DNA, 2865 bp, Homo sapiens
  Payload ID: 5398
  Gene Symbol: ECEL1
  Gene Name: endothelin converting enzyme-like 1
  Uniprot ID: O95672
  ENST ID: ENST00000304546
  CDS Start-End: 212-2539
ggcggcgggcgctgggagacaccggacgcccgctcggctgcgctgcggctcaggcccccgctcgggcccgacccgctcggtcaccgccggctcgggcgcgcacctgccggctgcggccccagggccatgcggaggcccacgaggaggccggcggccacgcgcatcccgtagcccaggtggcccaggtctgcaccgcggcggcctcggcgccatggagcccccgtattcgctgacggcgcactacgatgagttccaagaggtcaagtacgtgagccgctgcggcgcggggggcgcgcgcggggcctccctgcccccgggcttcccgttgggcgctgcgcgcagcgccaccggggcccggtccgggctgccgcgctggaaccggcgcgaggtgtgcctgctgtcggggctggtgttcgccgccggcctctgcgccattctggcggctatgctggccctcaagtacctgggcccggtcgcggccggcggcggcgcctgtcccgagggctgccctgagcgcaaggccttcgcgcgcgccgctcgcttcctggccgccaacctggacgccagcatcgacccatgccaggacttctactcgttcgcctgcggcggttggctgcggcgccacgccatccccgacgacaagctcacctatggcaccatcgcggccatcggcgagcaaaacgaggagcgcctacggcgcctgctggcgcggcccgggggtgggcctggcggcgcggcccagcgcaaggtgcgcgccttcttccgctcgtgcctcgacatgcgcgagatcgagcgactgggcccgcgacccatgctagaggtcatcgaggactgcgggggctgggacctgggcggcgcggaggagcgtccgggggtcgcggcgcgatgggacctcaaccggctgctgtacaaggcgcagggcgtgtacagcgccgccgcgctcttctcgctcacggtcagcctggacgacaggaactcctcgcgctacgtcatccgcattgaccaggatgggctcaccctgccagagaggaccctgtacctcgctcaggatgaggacagtgagaagatcctggcagcatacagggtgttcatggagcgagtgctcagcctcctgggtgcagacgctgtggaacagaaggcccaagagatcctgcaagtggagcagcagctggccaacatcactgtgtcagagcatgacgacctacggcgagatgtcagctccatgtacaacaaggtgacgctggggcagctgcagaagatcaccccccacttgcggtggaagtggctgctagaccagatcttccaggaggacttctcagaggaagaggaggtggtgctgctggcgacagactacatgcagcaggtgtcgcagctcatccgctccacaccccaccgggtcctgcacaactacctggtgtggcgcgtggtggtggtcctgagtgaacacctgtccccgccattccgtgaggcactgcacgagctggcacaggagatggagggcagcgacaagccacaggagctggcccgggtctgcttgggccaggccaatcgccactttggcatggcgcttggcgccctctttgtacatgagcacttctcagctgccagcaaagccaaggtgcagcagctagtggaagacatcaagtacatcctgggccagcgcctggaggagctggactggatggacgccgagaccagggctgctgctcgggccaagctccagtacatgatggtgatggtcggctacccggacttcctgctgaaacccgatgctgtggacaaggagtatgagtttgaggtccatgagaagacctacttcaagaacatcttgaacagcatccgcttcagcatccagctctcagttaagaagattcggcaggaggtggacaagtccacgtggctgctccccccacaggcgctcaatgcctactatctacccaacaagaaccagatggtgttccccgcgggcatcctgcagcccaccctgtacgaccctgacttcccacagtctctcaactacgggggcatcggcaccatcattggacatgagctgacccacggctacgacgactgggggggccagtatgaccgctcagggaacctgctgcactggtggacggaggcctcctacagccgcttcctgcgaaaggctgagtgcatcgtccgtctctatgacaacttcactgtctacaaccagcgggtgaacgggaaacacacgcttggggagaacatcgcagatatgggcggcctcaagctggcctaccacgcctatcagaagtgggtgcgggagcacggcccagagcacccacttccccggctcaagtacacacatgaccagctcttcttcattgcctttgcccagaactggtgcatcaagcggcggtcgcagtccatctacctgcaggtgctgactgacaagcatgcccctgagcactacagggtgctgggcagtgtgtcccagtttgaggagtttggccgggctttccactgtcccaaggactcacccatgaaccctgcccacaagtgttccgtgtggtgagcctggctgcccgcctgcacgcccccactgcccccgcacgaatcacctcctgctggctaccggggcaggcatgcacccggtgccagccccgctctgggcaccacctgccttccagcccctccaggacccggtccccctgctgcccctcacttcaggaggggcctggagcagggtgaggctggactttggggggctgtgagggaaatatactggggtccccagattctgctctaagggggccagaccctctgccaggctggattgtacgggccccaccttcgctgtgttcttgctgcaaagtctggtcaataaatcactgcactgtt

SEQ ID NO: 129829 - DNA, 2322 bp, Homo sapiens
  Payload ID: 5398
  Gene Symbol: ECEL1
  Gene Name: endothelin converting enzyme-like 1
  Uniprot ID: O95672
  ENST ID: ENST00000409941
  CDS Start-End: 1-2322
atggagcccccgtattcgctgacggcgcactacgatgagttccaagaggtcaagtacgtgagccgctgcggcgcggggggcgcgcgcggggcctccctgcccccgggcttcccgttgggcgctgcgcgcagcgccaccggggcccggtccgggctgccgcgctggaaccggcgcgaggtgtgcctgctgtcggggctggtgttcgccgccggcctctgcgccattctggcggctatgctggccctcaagtacctgggcccggtcgcggccggcggcggcgcctgtcccgagggctgccctgagcgcaaggccttcgcgcgcgccgctcgcttcctggccgccaacctggacgccagcatcgacccatgccaggacttctactcgttcgcctgcggcggttggctgcggcgccacgccatccccgacgacaagctcacctatggcaccatcgcggccatcggcgagcaaaacgaggagcgcctacggcgcctgctggcgcggcccgggggtgggcctggcggcgcggcccagcgcaaggtgcgcgccttcttccgctcgtgcctcgacatgcgcgagatcgagcgactgggcccgcgacccatgctagaggtcatcgaggactgcgggggctgggacctgggcggcgcggaggagcgtccgggggtcgcggcgcgatgggacctcaaccggctgctgtacaaggcgcagggcgtgtacagcgccgccgcgctcttctcgctcacggtcagcctggacgacaggaactcctcgcgctacgtcatccgcattgaccaggatgggctcaccctgccagagaggaccctgtacctcgctcaggatgaggacagtgagaagatcctggcagcatacagggtgttcatggagcgagtgctcagcctcctgggtgcagacgctgtggaacagaaggcccaagagatcctgcaagtggagcagcagctggccaacatcactgtgtcagagcatgacgacctacggcgagatgtcagctccatgtacaacaaggtgacgctggggcagctgcagaagatcaccccccacttgcggtggaagtggctgctagaccagatcttccaggaggacttctcagaggaagaggaggtggtgctgctggcgacagactacatgcagcaggtgtcgcagctcatccgctccacaccccaccgggtcctgcacaactacctggtgtggcgcgtggtggtggtcctgagtgaacacctgtccccgccattccgtgaggcactgcacgagctggcacaggagatggagggcagcgacaagccacaggagctggcccgggtctgcttgggccaggccaatcgccactttggcatggcgcttggcgccctctttgtacatgagcacttctcagctgccagcaaagccaaggtgcagcagctagtggaagacatcaagtacatcctgggccagcgcctggaggagctggactggatggacgccgagaccagggctgctgctcgggccaagctccagtacatgatggtgatggtcggctacccggacttcctgctgaaacccgatgctgtggacaaggagtatgagtttgaggtccatgagaagacctacttcaagaacatcttgaacagcatccgcttcagcatccagctctcagttaagaagattcggcaggaggtggacaagtggctgctccccccacaggcgctcaatgcctactatctacccaacaagaaccagatggtgttccccgcgggcatcctgcagcccaccctgtacgaccctgacttcccacagtctctcaactacgggggcatcggcaccatcattggacatgagctgacccacggctacgacgactgggggggccagtatgaccgctcagggaacctgctgcactggtggacggaggcctcctacagccgcttcctgcgaaaggctgagtgcatcgtccgtctctatgacaacttcactgtctacaaccagcgggtgaacgggaaacacacgcttggggagaacatcgcagatatgggcggcctcaagctggcctaccacgcctatcagaagtgggtgcgggagcacggcccagagcacccacttccccggctcaagtacacacatgaccagctcttcttcattgcctttgcccagaactggtgcatcaagcggcggtcgcagtccatctacctgcaggtgctgactgacaagcatgcccctgagcactacagggtgctgggcagtgtgtcccagtttgaggagtttggccgggctttccactgtcccaaggactcacccatgaaccctgcccacaagtgttccgtgtggtga

SEQ ID NO: 129830 - DNA, 833 bp, Homo sapiens
  Payload ID: 5398
  Gene Symbol: ECEL1
  Gene Name: endothelin converting enzyme-like 1
  ENST ID: ENST00000411860
  CDS Start-End: 1-507
ggcatcctgcagcccaccctgtacgaccctgacttcccacagtctctcaactacgggggcatcggcaccatcattggacatgagctgacccacggctacgacgactgggggggccagtatgaccgctcagggaacctgctgcactggtggacggaggcctcctacagccgcttcctgcgaaaggctgagtgcatcgtccgtctctatgacaacttcactgtctacaaccagcgggcctatcagaagtgggtgcgggagcacggcccagagcacccacttccccggctcaagtacacacatgaccagctcttcttcattgcctttgcccagaactggtgcatcaagcggcggtcgcagtccatctacctgcaggtgctgactgacaagcatgcccctgagcactacagggtgctgggcagtgtgtcccagtttgaggagtttggccgggctttccactgtcccaaggactcacccatgaaccctgcccacaagtgttccgtgtggtgagcctggctgcccgcctgcacgcccccactgcccccgcacgaatcacctcctgctggctaccggggcaggcatgcacccggtgccagccccgctctgggcaccacctgccttccagcccctccaggacccggtccccctgctgcccctcacttcaggaggggcctggagcagggtgaggctggactttggggggctgtgagggaaatatactggggtccccagattctgctctaagggggccagaccctctgccaggctggattgtacgggccccaccttcgctgtgttcttgctgcaaagtctggtcaataaatcactgcactgtt

SEQ ID NO: 129831 - DNA, 4135 bp, Homo sapiens
  Payload ID: 5399
  Gene Symbol: EDNRA
  Gene Name: endothelin receptor type A
  Uniprot ID: P25101
  ENST ID: ENST00000324300
  CDS Start-End: 516-1799
gtgctttttagtggccgcgtcccaggatagctggaaggttaggacgctcttgcggtcccagagtggagtggaaggtctggagctttgggaggagacggggaggacagactggaggcgtgttcctccggagttttctttttcgtgcgagccctcgcgcgcgcgtacagtcatcccgctggtctgacgattgtggagaggcggtggagaggcttcatccatcccacccggtcgtcgccggggattggggtcccagcgagacctccccgggagaagcagtgcccaggaggttttctgaagccggggaagctgtgcagccgaagccgccgccgcgccggagcccgggacaccggccaccctccgcgccacccaccctcgccggctccggcttcctctggcccaggcgccgcgcggacccggcagctgtctgcgcacgccgagctccacggtgaaaaaaaagtgaaggtgtaaaagcagcacaagtgcaataagagatatttcctcaaatttgcctcaagatggaaaccctttgcctcagggcatccttttggctggcactggttggatgtgtaatcagtgataatcctgagagatacagcacaaatctaagcaatcatgtggatgatttcaccacttttcgtggcacagagctcagcttcctggttaccactcatcaacccactaatttggtcctacccagcaatggctcaatgcacaactattgcccacagcagactaaaattacttcagctttcaaatacattaacactgtgatatcttgtactattttcatcgtgggaatggtggggaatgcaactctgctcaggatcatttaccagaacaaatgtatgaggaatggccccaacgcgctgatagccagtcttgcccttggagaccttatctatgtggtcattgatctccctatcaatgtatttaagctgctggctgggcgctggccttttgatcacaatgactttggcgtatttctttgcaagctgttcccctttttgcagaagtcctcggtggggatcaccgtcctcaacctctgcgctcttagtgttgacaggtacagagcagttgcctcctggagtcgtgttcagggaattgggattcctttggtaactgccattgaaattgtctccatctggatcctgtcctttatcctggccattcctgaagcgattggcttcgtcatggtaccctttgaatataggggtgaacagcataaaacctgtatgctcaatgccacatcaaaattcatggagttctaccaagatgtaaaggactggtggctcttcgggttctatttctgtatgcccttggtgtgcactgcgatcttctacaccctcatgacttgtgagatgttgaacagaaggaatggcagcttgagaattgccctcagtgaacatcttaagcagcgtcgagaagtggcaaaaacagttttctgcttggttgtaatttttgctctttgctggttccctcttcatttaagccgtatattgaagaaaactgtgtataacgagatggacaagaaccgatgtgaattacttagtttcttactgctcatggattacatcggtattaacttggcaaccatgaattcatgtataaaccccatagctctgtattttgtgagcaagaaatttaaaaattgtttccagtcatgcctctgctgctgctgttaccagtccaaaagtctgatgacctcggtccccatgaacggaacaagcatccagtggaagaaccacgatcaaaacaaccacaacacagaccggagcagccataaggacagcatgaactgaccacccttagaagcactcctcggtactcccataatcctctcggagaaaaaaatcacaaggcaactgtgagtccgggaatctcttctctgatccttcttccttaattcactcccacacccaagaagaaatgctttccaaaaccgcaagggtagactggtttatccacccacaacatctacgaatcgtacttctttaattgatctaatttacatattctgcgtgttgtattcagcactaaaaaatggtgggagctgggggagaatgaagactgttaaatgaaaccagaaggatatttactacttttgcatgaaaatagagctttcaagtacatggctagcttttatggcagttctggtgaatgttcaatgggaactggtcaccatgaaactttagagattaacgacaagattttctactttttttaagtgatttttttgtccttcagccaaacacaatatgggctcaagtcacttttatttgaaatgtcatttggtgccagtattttttaactgcataatagcctaacatgattatttgaacttatttacacatagtttgaaaaaaaaaagacaaaaatagtattcaggtgagcaattagattagtattttccacgtcactgtttatttttttaaaacacaaattctaaagctacaacaaatactacaggcccttaaagcacagtctgatgacacatttggcagtttaatagatgttactcaaagaattttttaagaactgtattttattttttaaatggtgttttattacaagggaccttgaacatgttttgtatgttaaattcaaaagtaatgcttcaatcagatagttctttttcacaagttcaatctgtttttcatgtaaattttgtatgaaaaatcaatgtcaagtaccaaaatgttaatgtatgtgtcatttaactctgcctgagactttcagtgcactgtatatagaagtctaaaacacacctaagagaaaaagatcgaatttttcagatgattcagaaattttcattcaggtatttgtaatagtgacatatatatgtatatacatatcacctcctattctcttaatttttcttaaaatgttaactggcagtaagtcttttttgatcattcccttttccatataggaaacataattttgaagtggccagatgagtttatcatgtcagtgaaaaataattacccacaaatgccaccagaacttacgattcttcacttcttggggttttcagtatgaacctaactccccaccccaacatctccctcccacattgtcaccatttcaaagggcccacagtgacttttgctgggcattttcccagatgtttacagactgtgagtacagcagaaaatcttttactagtgtgtgtgtgtatatatataaacaattgtaaatttcttttagcccatttttctagactgtctctgtggaatatatttgtgtgtgtgatatatgcatgtgtgtgatggtatgtatggatttaatctaatctaataattgtgccccgcagttgtgccaaagtgcatagtctgagtaaaatctaggtgattgttcatcatgacaacctgcctcagtccattttaacctgtagcaaccttctgcattcataaatcttgtaatcatgttaccattacaaatgggatataagaggcagcgtgaaagcagatgagctgtggactagcaatatagggttttgtttggttggttggtttgataaagcagtatttggggtcatattgtttcctgtgctggagcaaaagtcattacactttgaagtattatattgttcttatcctcaattcaatgtggtgatgaaattgccaggttgtctgatatttctttcagacttcgccagacagattgctgataataaattaggtaagataatttgttgggccatattttaggacaggtaaaataacatcaggttccagttgcttgaattgcaaggctaagaagtactgcccttttgtgtgttagcagtcaaatctattattccactggcgcatcatatgcagtgatatatgcctataatataagccataggttcacaccattttgtttagacaattgtctttttttcaagatgctttgtttctttcatatgaaaaaaatgcattttataaattcagaaagtcatagatttctgaaggcgtcaacgtgcattttatttatggactggtaagtaactgtggtttactagcaggaatatttccaatttctacctttactacatcttttcaacaagtaactttgtagaaatgagccagaagccaaggccctgagttggcagtggcccataagtgtaaaataaaagtttacagaaaccttg

SEQ ID NO: 129832 - DNA, 3823 bp, Homo sapiens
  Payload ID: 5399
  Gene Symbol: EDNRA
  Gene Name: endothelin receptor type A
  Uniprot ID: P25101
  ENST ID: ENST00000358556
  CDS Start-End: 531-1487
gggggcggcagctttgtgctttttagtggccgcgtcccaggatagctggaaggttaggacgctcttgcggtcccagagtggagtggaaggtctggagctttgggaggagacggggaggacagactggaggcgtgttcctccggagttttctttttcgtgcgagccctcgcgcgcgcgtacagtcatcccgctggtctgacgattgtggagaggcggtggagaggcttcatccatcccacccggtcgtcgccggggattggggtcccagcgagacctccccgggagaagcagtgcccaggaggttttctgaagccggggaagctgtgcagccgaagccgccgccgcgccggagcccgggacaccggccaccctccgcgccacccaccctcgccggctccggcttcctctggcccaggcgccgcgcggacccggcagctgtctgcgcacgccgagctccacggtgaaaaaaaagtgaaggtgtaaaagcagcacaagtgcaataagagatatttcctcaaatttgcctcaagatggaaaccctttgcctcagggcatccttttggctggcactggttggatgtgtaatcagtgataatcctgagagatacagcacaaatctaagcaatcatgtggatgatttcaccacttttcgtggcacagagctcagcttcctggttaccactcatcaacccactaatttggtcctacccagcaatggctcaatgcacaactattgcccacagcagactaaaattacttcagctttcaaatacattaacactgtgatatcttgtactattttcatcgtgggaatggtggggaatgcaactctgctcaggatcatttaccagaacaaatgtatgaggaatggccccaacgcgctgatagccagtcttgcccttggagaccttatctatgtggtcattgatctccctatcaatgtatttaagttctaccaagatgtaaaggactggtggctcttcgggttctatttctgtatgcccttggtgtgcactgcgatcttctacaccctcatgacttgtgagatgttgaacagaaggaatggcagcttgagaattgccctcagtgaacatcttaagcagcgtcgagaagtggcaaaaacagttttctgcttggttgtaatttttgctctttgctggttccctcttcatttaagccgtatattgaagaaaactgtgtataacgagatggacaagaaccgatgtgaattacttagtttcttactgctcatggattacatcggtattaacttggcaaccatgaattcatgtataaaccccatagctctgtattttgtgagcaagaaatttaaaaattgtttccagtcatgcctctgctgctgctgttaccagtccaaaagtctgatgacctcggtccccatgaacggaacaagcatccagtggaagaaccacgatcaaaacaaccacaacacagaccggagcagccataaggacagcatgaactgaccacccttagaagcactcctcggtactcccataatcctctcggagaaaaaaatcacaaggcaactgtgagtccgggaatctcttctctgatccttcttccttaattcactcccacacccaagaagaaatgctttccaaaaccgcaagggtagactggtttatccacccacaacatctacgaatcgtacttctttaattgatctaatttacatattctgcgtgttgtattcagcactaaaaaatggtgggagctgggggagaatgaagactgttaaatgaaaccagaaggatatttactacttttgcatgaaaatagagctttcaagtacatggctagcttttatggcagttctggtgaatgttcaatgggaactggtcaccatgaaactttagagattaacgacaagattttctactttttttaagtgatttttttgtccttcagccaaacacaatatgggctcaagtcacttttatttgaaatgtcatttggtgccagtattttttaactgcataatagcctaacatgattatttgaacttatttacacatagtttgaaaaaaaaaagacaaaaatagtattcaggtgagcaattagattagtattttccacgtcactgtttatttttttaaaacacaaattctaaagctacaacaaatactacaggcccttaaagcacagtctgatgacacatttggcagtttaatagatgttactcaaagaattttttaagaactgtattttattttttaaatggtgttttattacaagggaccttgaacatgttttgtatgttaaattcaaaagtaatgcttcaatcagatagttctttttcacaagttcaatctgtttttcatgtaaattttgtatgaaaaatcaatgtcaagtaccaaaatgttaatgtatgtgtcatttaactctgcctgagactttcagtgcactgtatatagaagtctaaaacacacctaagagaaaaagatcgaatttttcagatgattcagaaattttcattcaggtatttgtaatagtgacatatatatgtatatacatatcacctcctattctcttaatttttcttaaaatgttaactggcagtaagtcttttttgatcattcccttttccatataggaaacataattttgaagtggccagatgagtttatcatgtcagtgaaaaataattacccacaaatgccaccagaacttacgattcttcacttcttggggttttcagtatgaacctaactccccaccccaacatctccctcccacattgtcaccatttcaaagggcccacagtgacttttgctgggcattttcccagatgtttacagactgtgagtacagcagaaaatcttttactagtgtgtgtgtgtatatatataaacaattgtaaatttcttttagcccatttttctagactgtctctgtggaatatatttgtgtgtgtgatatatgcatgtgtgtgatggtatgtatggatttaatctaatctaataattgtgccccgcagttgtgccaaagtgcatagtctgagtaaaatctaggtgattgttcatcatgacaacctgcctcagtccattttaacctgtagcaaccttctgcattcataaatcttgtaatcatgttaccattacaaatgggatataagaggcagcgtgaaagcagatgagctgtggactagcaatatagggttttgtttggttggttggtttgataaagcagtatttggggtcatattgtttcctgtgctggagcaaaagtcattacactttgaagtattatattgttcttatcctcaattcaatgtggtgatgaaattgccaggttgtctgatatttctttcagacttcgccagacagattgctgataataaattaggtaagataatttgttgggccatattttaggacaggtaaaataacatcaggttccagttgcttgaattgcaaggctaagaagtactgcccttttgtgtgttagcagtcaaatctattattccactggcgcatcatatgcagtgatatatgcctataatataagccataggttcacaccattttgtttagacaattgtctttttttcaagatgctttgtttctttcatatgaaaaaaatgcattttataaattcagaaagtcatagatttctgaaggcgtcaacgtgcattttatttatggactggtaagtaactgtggtttactagcaggaatatttccaatttctacctttactacatcttttcaacaagtaactttgtagaaatgagccagaagccaaggccctgagttggcagtggcccataagtgtaaaataaaagtttacagaaaccttg

SEQ ID NO: 129833 - DNA, 1032 bp, Homo sapiens
  Payload ID: 5399
  Gene Symbol: EDNRA
  Gene Name: endothelin receptor type A
  Uniprot ID: P25101
  ENST ID: ENST00000506066
  CDS Start-End: 1-957
atggaaaccctttgcctcagggcatccttttggctggcactggttggatgtgtaatcagtgataatcctgagagatacagcacaaatctaagcaatcatgtggatgatttcaccacttttcgtggcacagagctcagcttcctggttaccactcatcaacccactaatttggtcctacccagcaatggctcaatgcacaactattgcccacagcagactaaaattacttcagctttcaaatacattaacactgtgatatcttgtactattttcatcgtgggaatggtggggaatgcaactctgctcaggatcatttaccagaacaaatgtatgaggaatggccccaacgcgctgatagccagtcttgcccttggagaccttatctatgtggtcattgatctccctatcaatgtatttaagttctaccaagatgtaaaggactggtggctcttcgggttctatttctgtatgcccttggtgtgcactgcgatcttctacaccctcatgacttgtgagatgttgaacagaaggaatggcagcttgagaattgccctcagtgaacatcttaagcagcgtcgagaagtggcaaaaacagttttctgcttggttgtaatttttgctctttgctggttccctcttcatttaagccgtatattgaagaaaactgtgtataacgagatggacaagaaccgatgtgaattacttagtttcttactgctcatggattacatcggtattaacttggcaaccatgaattcatgtataaaccccatagctctgtattttgtgagcaagaaatttaaaaattgtttccagtcatgcctctgctgctgctgttaccagtccaaaagtctgatgacctcggtccccatgaacggaacaagcatccagtggaagaaccacgatcaaaacaaccacaacacagaccggagcagccataaggacagcatgaactgaccacccttagaagcactcctcggtactcccataatcctctcggagaaaaaaatcacaaggcaactgtgagtccgg

SEQ ID NO: 129834 - DNA, 1569 bp, Homo sapiens
  Payload ID: 5399
  Gene Symbol: EDNRA
  Gene Name: endothelin receptor type A
  Uniprot ID: P25101
  ENST ID: ENST00000511804
  CDS Start-End: 701-1309
gtgctttttagtggccgcgtcccaggatagctggaaggttaggacgctcttgcggtcccagagtggagtggaaggtctggagctttgggaggagacggggaggacagactggaggcgtgttcctccggagttttctttttcgtgcgagccctcgcgcgcgcgtacagtcatcccgctggtctgacgattgtggagaggcggtggagaggcttcatccatcccacccggtcgtcgccggggattggggtcccagcgagacctccccgggagaagcagtgcccaggaggttttctgaagccggggaagctgtgcagccgaagccgccgccgcgccggagcccgggacaccggccaccctccgcgccacccaccctcgccggctccggcttcctctggcccaggcgccgcgcggacccggcagctgtctgcgcacgccgagctccacgctgctggctgggcgctggccttttgatcacaatgactttggcgtatttctttgcaagctgttcccctttttgcagaagtcctcggtggggatcaccgtcctcaacctctgcgctcttagtgttgacaggtacagagcagttgcctcctggagtcgtgttcagggaattgggattcctttggtaactgccattgaaattgtctccatctggatcctgtcctttatcctggccattcctgaagcgattggcttcgtcatggtaccctttgaatataggggtgaacagcataaaacctgtatgctcaatgccacatcaaaattcatggagttctaccaagatgtaaaggactggtggctcttcgggttctatttctgtatgcccttggtgtgcactgcgatcttctacaccctcatgacttgtgagatgttgaacagaaggaatggcagcttgagaattgccctcagtgaacatcttaagcagcgtcgagaagtggcaaaaacagttttctgcttggttgtaatttttgctctttgctggttccctcttcatttaagccgtatattgaagaaaactgtgtataacgagatggacaagaaccgatgtgaattacttagtttcttactgctcatggattacatcggtattaacttggcaaccatgaattcatgtataaaccccatagctctgtattttgtgagcaagaaatttaaaaattgtttccagtcatgcctctgctgctgctgttaccagtccaaaagtctgatgacctcggtccccatgaacggaacaagcatccagtggaagaaccacgatcaaaacaaccacaacacagaccggagcagccataaggacagcatgaactgaccacccttagaagcactcctcggtactcccataatcctctcggagaaaaaaatcacaaggcaactgtgagtccgggaatctcttctctgatccttcttccttaattcactcccacacccaagaagaaatgctttccaaaaccgcaagggtagactggtttatccacccacaacatctacgaatcgtacttctttaattgatctaatttacatattctgcgtgttgtattcagcactaaaaaatggtgggagctgggggag

SEQ ID NO: 129835 - DNA, 1160 bp, Homo sapiens
  Payload ID: 5399
  Gene Symbol: EDNRA
  Gene Name: endothelin receptor type A
  Uniprot ID: P25101
  ENST ID: ENST00000510697
  CDS Start-End: 1-564
atggaaaccctttgcctcagggcatccttttggctggcactggttggatgtgtaatcagtgataatcctgagagatacagcacaaatctaagcaatcatgtggatgatttcaccacttttcgtggcacagagctcagcttcctggttaccactcatcaacccactaatttggtcctacccagcaatggctcaatgcacaactattgcccacagcagactaaaattacttcagctttcaaatacattaacactgtgatatcttgtactattttcatcgtgggaatggtggggaatgcaactctgctcaggatcatttaccagaacaaatgtatgaggaatggccccaacgcgctgatagccagtcttgcccttggagaccttatctatgtggtcattgatctccctatcaatgtatttaagctgctggctgggcgctggccttttgatcacaatgactttggcgtatttctttgcaagctgttcccctttttgcagaagtcctcggtggggatcaccgtcctcaacctctgcgctcttagtgttgacagttctaccaagatgtaaaggactggtggctcttcgggttctatttctgtatgcccttggtgtgcactgcgatcttctacaccctcatgacttgtgagatgttgaacagaaggaatggcagcttgagaattgccctcagtgaacatcttaagcagcgtcgagaagtggcaaaaacagttttctgcttggttgtaatttttgctctttgctggttccctcttcatttaagccgtatattgaagaaaactgtgtataacgagatggacaagaaccgatgtgaattacttagtttcttactgctcatggattacatcggtattaacttggcaaccatgaattcatgtataaaccccatagctctgtattttgtgagcaagaaatttaaaaattgtttccagtcatgcctctgctgctgctgttaccagtccaaaagtctgatgacctcggtccccatgaacggaacaagcatccagtggaagaaccacgatcaaaacaaccacaacacagaccggagcagccataaggacagcatgaactgaccacccttagaagcactcctcggtactcccataatcctctcggagaaaaaaatcacaaggcaactgtgagtccgg

SEQ ID NO: 129836 - DNA, 4277 bp, Homo sapiens
  Payload ID: 5400
  Gene Symbol: EDNRB
  Gene Name: endothelin receptor type B
  Uniprot ID: P24530
  ENST ID: ENST00000334286
  CDS Start-End: 238-1566
atcaggaaggagtttcgacccgcgctggcgagtcatgagcgccaagtttcccactggcgcgcaaacttgagttacttttgagcgtggatactggcgaagaggctgcgggcggtattagcgtttgcagcgacttggctcgggcagctgacccaagtgtcctgtcttccttcctctgcttgtctctaggctctgaaactgcggagcggccaccggacgccttctggagcaggtagcagcatgcagccgcctccaagtctgtgcggacgcgccctggttgcgctggttcttgcctgcggcctgtcgcggatctggggagaggagagaggcttcccgcctgacagggccactccgcttttgcaaaccgcagagataatgacgccacccactaagaccttatggcccaagggttccaacgccagtctggcgcggtcgttggcacctgcggaggtgcctaaaggagacaggacggcaggatctccgccacgcaccatctcccctcccccgtgccaaggacccatcgagatcaaggagactttcaaatacatcaacacggttgtgtcctgccttgtgttcgtgctggggatcatcgggaactccacacttctgagaattatctacaagaacaagtgcatgcgaaacggtcccaatatcttgatcgccagcttggctctgggagacctgctgcacatcgtcattgacatccctatcaatgtctacaagctgctggcagaggactggccatttggagctgagatgtgtaagctggtgcctttcatacagaaagcctctgtgggaatcactgtgctgagtctatgtgctctgagtattgacagatatcgagctgttgcttcttggagtagaattaaaggaattggggttccaaaatggacagcagtagaaattgttttgatttgggtggtctctgtggttctggctgtccctgaagccataggttttgatataattacgatggactacaaaggaagttatctgcgaatctgcttgcttcatcccgttcagaagacagctttcatgcagttttacaagacagcaaaagattggtggctattcagtttctatttctgcttgccattggccatcactgcatttttttatacactaatgacctgtgaaatgttgagaaagaaaagtggcatgcagattgctttaaatgatcacctaaagcagagacgggaagtggccaaaaccgtcttttgcctggtccttgtctttgccctctgctggcttccccttcacctcagcaggattctgaagctcactctttataatcagaatgatcccaatagatgtgaacttttgagctttctgttggtattggactatattggtatcaacatggcttcactgaattcctgcattaacccaattgctctgtatttggtgagcaaaagattcaaaaactgctttaagtcatgcttatgctgctggtgccagtcatttgaagaaaaacagtccttggaggaaaagcagtcgtgcttaaagttcaaagctaatgatcacggatatgacaacttccgttccagtaataaatacagctcatcttgaaagaagaactattcactgtatttcattttctttatattggaccgaagtcattaaaacaaaatgaaacatttgccaaaacaaaacaaaaaactatgtatttgcacagcacactattaaaatattaagtgtaattattttaacactcacagctacatatgacattttatgagctgtttacggcatggaaagaaaatcagtgggaattaagaaagcctcgtcgtgaaagcacttaattttttacagttagcacttcaacatagctcttaacaacttccaggatattcacacaacacttaggcttaaaaatgagctcactcagaatttctattctttctaaaaagagatttatttttaaatcaatgggactctgatataaaggaagaataagtcactgtaaaacagaacttttaaatgaagcttaaattactcaatttaaaattttaaaatcctttaaaacaacttttcaattaatattatcacactattatcagattgtaattagatgcaaatgagagagcagtttagttgttgcatttttcggacactggaaacatttaaatgatcaggagggagtaacagaaagagcaaggctgtttttgaaaatcattacactttcactagaagcccaaacctcagcattctgcaatatgtaaccaacatgtcacaaacaagcagcatgtaacagactggcacatgtgccagctgaatttaaaatataatacttttaaaaagaaaattattacatcctttacattcagttaagatcaaacctcacaaagagaaatagaatgtttgaaaggctatcccaaaagacttttttgaatctgtcattcacataccctgtgaagacaatactatctacaattttttcaggattattaaaatcttcttctttcactatcgtagcttaaactctgtttggttttgtcatctgtaaatacttacctacatacactgcatgtagatgattaaatgagggcaggccctgtgctcatagctttacgatggagagatgccagtgacctcataataaagactgtgaactgcctggtgcagtgtccacatgacaaaggggcaggtagcaccctctctcacccatgctgtggttaaaatggtttctagcatatgtataatgctatagttaaaatactatttttcaaaatcatacagattagtacatttaacagctacctgtaaagcttattactaatttttgtattatttttgtaaatagccaatagaaaagtttgcttgacatggtgcttttctttcatctagaggcaaaactgctttttgagaccgtaagaacctcttagctttgtgcgttcctgcctaatttttatatcttctaagcaaagtgccttaggatagcttgggatgagatgtgtgtgaaagtatgtacaagagaaaacggaagagagaggaaatgaggtggggttggaggaaacccatggggacagattcccattcttagcctaacgttcgtcattgcctcgtcacatcaatgcaaaaggtcctgattttgttccagcaaaacacagtgcaatgttctcagagtgactttcgaaataaattgggcccaagagctttaactcggtcttaaaatatgcccaaatttttactttgtttttcttttaataggctgggccacatgttggaaataagctagtaatgttgttttctgtcaatattgaatgtgatggtacagtaaaccaaaacccaacaatgtggccagaaagaaagagcaataataattaattcacacaccatatggattctatttataaatcacccacaaacttgttctttaatttcatcccaatcactttttcagaggcctgttatcatagaagtcattttagactctcaattttaaattaattttgaatcactaatattttcacagtttattaatatatttaatttctatttaaattttagattatttttattaccatgtactgaatttttacatcctgataccttttccttctccatgtcagtatcatgttctctaattatcttgccaaattttgaaactacacacaaaaagcatacttgcattatttataataaaattgcattcagtggctttttaaaaaaatgtttgattcaaaactttaacatactgataagtaagaaacaattataatttctttacatactcaaaaccaagatagaaaaaggtgctatcgttcaacttcaaaacatgtttcctagtattaaggactttaatatagcaacagacaaaattattgttaacatggatgttacagctcaaaagatttataaaagattttaacctattttctcccttattatccactgctaatgtggatgtatgttcaaacaccttttagtattgatagcttacatatggccaaaggaatacagtttatagcaaaacatgggtatgctgtagctaactttataaaagtgtaatataacaatgtaaaaaattatatatctgggaggattttttggttgcctaaagtggctatagttactgattttttattatgtaagcaaaaccaataaaaatttaagtttttttaacaactaccttatttttcactgtacagacactaattcattaaatactaattgattgtttaaaagaaatataaatgtgacaagtggacattatttatgttaaatatacaattatcaagcaagtatgaagttattcaattaaaatgccacatttctgg

SEQ ID NO: 129837 - DNA, 4471 bp, Homo sapiens
  Payload ID: 5400
  Gene Symbol: EDNRB
  Gene Name: endothelin receptor type B
  Uniprot ID: P24530
  ENST ID: ENST00000377211
  CDS Start-End: 154-1752
aaacagccttttgggacctgtccccggacgaggactgcccccctccctcgggcaactactactgatgctgtccaggcatcgcccaaggggaaaggttgcagcggggtcggaaggcgcgggaggagtctggcggtgattgatgggaagggatgaatgaataaaagtacttgtctgatggcagcagagaccccgagcaaacggtggaggctacactgtctggcattctcgcagcgtttcgtcagagccggacccgcctgcagctcaagggaggcgtgctcctctcccagagcaggctggaacccagctgggttccgcctcccgggaaggtggtctccattcgtcgctctgcatctggtttgtcagatccgagaggctctgaaactgcggagcggccaccggacgccttctggagcaggtagcagcatgcagccgcctccaagtctgtgcggacgcgccctggttgcgctggttcttgcctgcggcctgtcgcggatctggggagaggagagaggcttcccgcctgacagggccactccgcttttgcaaaccgcagagataatgacgccacccactaagaccttatggcccaagggttccaacgccagtctggcgcggtcgttggcacctgcggaggtgcctaaaggagacaggacggcaggatctccgccacgcaccatctcccctcccccgtgccaaggacccatcgagatcaaggagactttcaaatacatcaacacggttgtgtcctgccttgtgttcgtgctggggatcatcgggaactccacacttctgagaattatctacaagaacaagtgcatgcgaaacggtcccaatatcttgatcgccagcttggctctgggagacctgctgcacatcgtcattgacatccctatcaatgtctacaagctgctggcagaggactggccatttggagctgagatgtgtaagctggtgcctttcatacagaaagcctctgtgggaatcactgtgctgagtctatgtgctctgagtattgacagatatcgagctgttgcttcttggagtagaattaaaggaattggggttccaaaatggacagcagtagaaattgttttgatttgggtggtctctgtggttctggctgtccctgaagccataggttttgatataattacgatggactacaaaggaagttatctgcgaatctgcttgcttcatcccgttcagaagacagctttcatgcagttttacaagacagcaaaagattggtggctattcagtttctatttctgcttgccattggccatcactgcatttttttatacactaatgacctgtgaaatgttgagaaagaaaagtggcatgcagattgctttaaatgatcacctaaagcagagacgggaagtggccaaaaccgtcttttgcctggtccttgtctttgccctctgctggcttccccttcacctcagcaggattctgaagctcactctttataatcagaatgatcccaatagatgtgaacttttgagctttctgttggtattggactatattggtatcaacatggcttcactgaattcctgcattaacccaattgctctgtatttggtgagcaaaagattcaaaaactgctttaagtcatgcttatgctgctggtgccagtcatttgaagaaaaacagtccttggaggaaaagcagtcgtgcttaaagttcaaagctaatgatcacggatatgacaacttccgttccagtaataaatacagctcatcttgaaagaagaactattcactgtatttcattttctttatattggaccgaagtcattaaaacaaaatgaaacatttgccaaaacaaaacaaaaaactatgtatttgcacagcacactattaaaatattaagtgtaattattttaacactcacagctacatatgacattttatgagctgtttacggcatggaaagaaaatcagtgggaattaagaaagcctcgtcgtgaaagcacttaattttttacagttagcacttcaacatagctcttaacaacttccaggatattcacacaacacttaggcttaaaaatgagctcactcagaatttctattctttctaaaaagagatttatttttaaatcaatgggactctgatataaaggaagaataagtcactgtaaaacagaacttttaaatgaagcttaaattactcaatttaaaattttaaaatcctttaaaacaacttttcaattaatattatcacactattatcagattgtaattagatgcaaatgagagagcagtttagttgttgcatttttcggacactggaaacatttaaatgatcaggagggagtaacagaaagagcaaggctgtttttgaaaatcattacactttcactagaagcccaaacctcagcattctgcaatatgtaaccaacatgtcacaaacaagcagcatgtaacagactggcacatgtgccagctgaatttaaaatataatacttttaaaaagaaaattattacatcctttacattcagttaagatcaaacctcacaaagagaaatagaatgtttgaaaggctatcccaaaagacttttttgaatctgtcattcacataccctgtgaagacaatactatctacaattttttcaggattattaaaatcttcttctttcactatcgtagcttaaactctgtttggttttgtcatctgtaaatacttacctacatacactgcatgtagatgattaaatgagggcaggccctgtgctcatagctttacgatggagagatgccagtgacctcataataaagactgtgaactgcctggtgcagtgtccacatgacaaaggggcaggtagcaccctctctcacccatgctgtggttaaaatggtttctagcatatgtataatgctatagttaaaatactatttttcaaaatcatacagattagtacatttaacagctacctgtaaagcttattactaatttttgtattatttttgtaaatagccaatagaaaagtttgcttgacatggtgcttttctttcatctagaggcaaaactgctttttgagaccgtaagaacctcttagctttgtgcgttcctgcctaatttttatatcttctaagcaaagtgccttaggatagcttgggatgagatgtgtgtgaaagtatgtacaagagaaaacggaagagagaggaaatgaggtggggttggaggaaacccatggggacagattcccattcttagcctaacgttcgtcattgcctcgtcacatcaatgcaaaaggtcctgattttgttccagcaaaacacagtgcaatgttctcagagtgactttcgaaataaattgggcccaagagctttaactcggtcttaaaatatgcccaaatttttactttgtttttcttttaataggctgggccacatgttggaaataagctagtaatgttgttttctgtcaatattgaatgtgatggtacagtaaaccaaaacccaacaatgtggccagaaagaaagagcaataataattaattcacacaccatatggattctatttataaatcacccacaaacttgttctttaatttcatcccaatcactttttcagaggcctgttatcatagaagtcattttagactctcaattttaaattaattttgaatcactaatattttcacagtttattaatatatttaatttctatttaaattttagattatttttattaccatgtactgaatttttacatcctgataccttttccttctccatgtcagtatcatgttctctaattatcttgccaaattttgaaactacacacaaaaagcatacttgcattatttataataaaattgcattcagtggctttttaaaaaaatgtttgattcaaaactttaacatactgataagtaagaaacaattataatttctttacatactcaaaaccaagatagaaaaaggtgctatcgttcaacttcaaaacatgtttcctagtattaaggactttaatatagcaacagacaaaattattgttaacatggatgttacagctcaaaagatttataaaagattttaacctattttctcccttattatccactgctaatgtggatgtatgttcaaacaccttttagtattgatagcttacatatggccaaaggaatacagtttatagcaaaacatgggtatgctgtagctaactttataaaagtgtaatataacaatgtaaaaaattatatatctgggaggattttttggttgcctaaagtggctatagttactgattttttattatgtaagcaaaaccaataaaaatttaagtttttttaacaactaccttatttttcactgtacagacactaattcattaaatactaattgattgtttaaaagaaatataaatgtgacaagtggacattatttatgttaaatatacaattatcaagcaagtatgaagttattcaattaaaatgccacatttctggtctctggg

SEQ ID NO: 129838 - DNA, 1571 bp, Homo sapiens
  Payload ID: 5400
  Gene Symbol: EDNRB
  Gene Name: endothelin receptor type B
  Uniprot ID: P24530
  ENST ID: ENST00000626030
  CDS Start-End: 227-1537
gtttcgacccgcgctggcgagtcatgagcgccaagtttcccactggcgcgcaaacttgagttacttttgagcgtggatactggcgaagaggctgcgggcggtattagcgtttgcagcgacttggctcgggcagctgacccaagtgtcctgtcttccttcctctgcttgtctctaggctctgaaactgcggagcggccaccggacgccttctggagcaggtagcagcatgcagccgcctccaagtctgtgcggacgcgccctggttgcgctggttcttgcctgcggcctgtcgcggatctggggagaggagagaggcttcccgcctgacagggccactccgcttttgcaaaccgcagagataatgacgccacccactaagaccttatggcccaagggttccaacgccagtctggcgcggtcgttggcacctgcggaggtgcctaaaggagacaggacggcaggatctccgccacgcaccatctcccctcccccgtgccaaggacccatcgagatcaaggagactttcaaatacatcaacacggttgtgtcctgccttgtgttcgtgctggggatcatcgggaactccacacttctgagaattatctacaagaacaagtgcatgcgaaacggtcccaatatcttgatcgccagcttggctctgggagacctgctgcacatcgtcattgacatccctatcaatgtctacaagctgctggcagaggactggccatttggagctgagatgtgtaagctggtgcctttcatacagaaagcctctgtgggaatcactgtgctgagtctatgtgctctgagtattgacagatatcgagctgttgcttcttggagtagaattaaaggaattggggttccaaaatggacagcagtagaaattgttttgatttgggtggtctctgtggttctggctgtccctgaagccataggttttgatataattacgatggactacaaaggaagttatctgcgaatctgcttgcttcatcccgttcagaagacagctttcatgcagttttacaagacagcaaaagattggtggctattcagtttctatttctgcttgccattggccatcactgcatttttttatacactaatgacctgtgaaatgttgagaaagaaaagtggcatgcagattgctttaaatgatcacctaaagcagagacgggaagtggccaaaaccgtcttttgcctggtccttgtctttgccctctgctggcttccccttcacctcagcaggattctgaagctcactctttataatcagaatgatcccaatagatgtgaacttttgagctttctgttggtattggactatattggtatcaacatggcttcactgaattcctgcattaacccaattgctctgtatttggtgagcaaaagattcaaaaactgctttaaggctgggccacatgttggaaataagctagtaatgttgttttctgtcaatattgaatgtgatggtacagtaaaccaaaacccaacaatgtggccagaaagaaagagcaataataattaattcacacaccatatggattctatttataaatcac

SEQ ID NO: 129839 - DNA, 643 bp, Homo sapiens
  Payload ID: 5400
  Gene Symbol: EDNRB
  Gene Name: endothelin receptor type B
  ENST ID: ENST00000475537
  CDS Start-End: 409-643
attgattgaaccttattctggggcttcggtttggcttactagtttgggattttaaaaaaataaaaattaagcctatagagagggcaaattaaaattaggttgggtaaaggaaggagcgcgagtgtttgaagccgtttggagggaacagcggtttccaagttcctgctgacttgagaagtctctgcgggtttccgaatctccggcgcactcctgggcgcgctgcgggagctgtagctcagccagccagggagtagcggctttcatccgccgggaggagtctttcgagttcaatcgcggggtatagaggttcccctgcggggcaaaatgcagagcttgacacaagcccttggcctctaggctctgaaactgcggagcggccaccggacgccttctggagcaggtagcagcatgcagccgcctccaagtctgtgcggacgcgccctggttgcgctggttcttgcctgcggcctgtcgcggatctggggagaggagagaggcttcccgcctgacagggccactccgcttttgcaaaccgcagagataatgacgccacccactaagaccttatggcccaagggttccaacgccagtctggcgcggtcgttggcacctgcggaggtgcctaaaggagacaggacggcag

SEQ ID NO: 129840 - DNA, 1082 bp, Homo sapiens
  Payload ID: 5401
  Gene Symbol: ENHO
  Gene Name: energy homeostasis associated
  Uniprot ID: Q6UWT2
  ENST ID: ENST00000399775
  CDS Start-End: 427-657
gcggccgcggaggaggtgcggccccaaggggaggaggtgcccgctcaccgcagaccgcccgcggcagaggccgccccggtcgcgccgcggcgggagcggccggtggaggctgcgcggccgagggggagggccgggggagcggacgtcgcctctgctggtctcccacctcccgccgccccccgcccgcaggctcccaagccttagtcggcgccgagcatcccgctgccccggaccctcccgcgggcgcgcaccaggctcaactcaggctcaggactgcaggtagacatctccactgcccaggaatcactgagcgtgcagacagcacagcctcctctgaaggccggccataccagagtcctgcctcggcatgggcctcaccattgaggcagctccactgtctgtgctggtctgagggtgctgcctgtcatgggggcagccatctcccagggggccctcatcgccatcgtctgcaacggtctcgtgggcttcttgctgctgctgctctgggtcatcctctgctgggcctgccattctcgctctgccgacgttgactctctctctgaatccagtcccaactccagccctggcccctgtcctgagaaggccccaccaccccagaagcccagccatgaaggcagctacctgctgcagccctgaaggcccctggcctagcctggagcccaggacctaagtccacctcacctagagcctggaattaggatcccagagttcagccagcctggggtccagaactcaagagtccgcctgcttggagctggacccagcggcccagagtctagccagcttggctccaataggagctcagtggccctaaggagatgggcctggggtgggggcttatgagttggtgctagagccagggccatctggactatgctccatcccaagggccaagggtcaggggccgggtccactctttccctaggctgagcacctctaggccctctaggctggggaagcaaactggaacccatggcaataataggagggtgtccaggctgggcccctcccctggtcctcccagtgtttgctggataataaatggaactatggctctaccc

SEQ ID NO: 129841 - DNA, 2457 bp, Homo sapiens
  Payload ID: 5402
  Gene Symbol: EN1
  Gene Name: engrailed homeobox 1
  Uniprot ID: Q05925
  ENST ID: ENST00000295206
  CDS Start-End: 512-1690
cgattaaaggcgctgccagcctcacgctctgggcacagctgagcgtgacactcggggaagtcaaacccctcactactgcctaggaagatggctagactttaaatactatttttttccctttaagaaaaaaattattggagctttttttcttgctttctttttccttttctttttctttttttccttcatttttttggccgtggcttactccccatttaaatcaaatcattgaatctggttgcagaaagaaaaaagaaatagccaagtgtctccatatctggatgtctacaaattagagagggagagacagcgagatctatctgctagataagaacgagcgatccaggccagacgcctgagcttttttcctgcacccgccccgtgccttcgctgaggcttcgcctgcctccttcctccgcgcacccccacgggccgctggcaaagtggggtggggagcgaggcggtgggggcgggggccggcgcggcggccggggcggcggggcggccgagcatggaagaacagcagccggaacctaaaagtcagcgcgactcggccctcggcgcggcggcggcggcgactccgggcggcctcagcctgagcctcagtccgggcgccagcggcagcagcggcagcggcagcgatggagacagcgtgccggtgtccccgcagcctgcgcccccctcgccgcccgcggcgccttgcctgccgcccctggcccaccacccgcacctccccccacaccccccgcccccgccgcctcagcatctcgcggcgcctgctcaccagccgcagccagcggcccagctgcaccgcaccaccaactttttcatcgacaacatcctgaggccggacttcggctgcaaaaaggagcagccgccaccgcagcttctggtggctgcggcggccagaggaggcgcaggaggaggaggccgggtcgagcgtgacagaggccagactgccgcaggtagagaccctgtccacccgttgggcacccgggcgccaggcgctgcctcgctcctgtgcgccccggacgcgaactgtggcccacccgacggctcccagccagccgccgccggcgcgggcgcgtctaaagctgggaacccggctgcggcggcggcggcggccgcggcggcagtggcggcggcggcggcggccgcagcagccaagccctcggacaccggtggcggcggcagtggaggcggcgcggggagccccggagcgcagggcaccaaatacccggagcacggcaacccggctatcctacttatgggctcagccaacggcgggcccgtggtcaaaactgactcgcagcagcctctcgtatggcccgcctgggtgtactgcacacgttattcggatcgtccatcctccggtccgcgcaccaggaagctgaagaagaagaagaacgagaaggaggacaagcggccgcggaccgcgttcacggccgagcagctgcagagactcaaggcggagttccaggcaaaccgctacatcacggagcagcggcggcagaccctggcccaggaactcagcctcaacgagtcccagatcaagatctggttccagaacaagcgcgccaagatcaagaaagccacaggcatcaagaacggcctggcgctgcacctcatggcccagggactgtacaaccactccaccaccacggtccaggacaaagacgagagcgagtagccgccacaggccggggccgcgcccgcgccccctcccggcaccgccgccgtcgtctcccggcccctcgctgggggagaaagcatctgctccaaggagggagggagcgcagggaaaagagcgagagagacagaaagagagcctcagaatggacaatgacgttgaaacgcagcatttttgaaaagggagaaagactcggacaggtgctatcgaaaaataagatccattctctattcccagtataagggacgaaactgcgaactccttaaagctctatctagccaaaccgcttacgaccttgtatatatttaatttcaggtaaggaaaacacatacgtgtagcgatctctatttgctggacatttttattaatctcctttattattattgttataattattataattattataattattttatcccctcccccaccgcctcgctgcccccgcccagtttcgttttcgttgcctttttcatttgaatgtcattgcttctccggtgcctcccgacccgcatcgccggccctggtttctctgggacttttctttgtgtgcgagagtgtgtttcctttcgtgtctgcccacctcttctcccccacctcccgggtcccttctgtcggtctgtctgttctgcccccctttcgttttccggagacttgttgagaaatacgaccccacagactgcgagactgaaccgccgctacaagccaaagattttattatgttcagaaacctgtagtctgaaataaagtgtacactgtgctcacga

SEQ ID NO: 129842 - DNA, 3395 bp, Homo sapiens
  Payload ID: 5403
  Gene Symbol: EN2
  Gene Name: engrailed homeobox 2
  Uniprot ID: P19622
  ENST ID: ENST00000297375
  CDS Start-End: 250-1251
tctctcatcgtctgggcgagcggggcggctcgtggtgtttctaacccagttcgtggattcaaaggtggctccgcgccgagcgcggccggcgacttgtaggacctcagccctggccgcggccgccgcgcacgccctcggaagactcggcggggtgggggcgcgggggtctccgtgtgcgccgcgggagggccgaaggctgatttggaagggcgtccccggagaaccagtgtgggatttactgtgaacagcatggaggagaatgaccccaagcctggcgaagcagcggcggcggtggagggacagcggcagccggaatccagccccggcggcggctcgggcggcggcggcggtagcagcccgggcgaagcggacaccgggcgccggcgggctctgatgctgcccgcggtcctgcaggcgcccggcaaccaccagcacccgcaccgcatcaccaacttcttcatcgacaacatcctgcggcccgagttcggccggcgaaaggacgcggggacctgctgtgcgggcgcgggaggaggaaggggcggcggagccggcggcgaaggcggcgcgagcggtgcggagggaggcggcggcgcgggcggctcggagcagctcttgggctcgggctcccgagagccccggcagaacccgccatgtgcgcccggcgcgggcgggccgctcccagccgccggcagcgactctccgggtgacggggaaggcggctccaagacgctctcgctgcacggtggcgccaagaaaggcggcgaccccggcggccccctggacgggtcgctcaaggcccgcggcttgggcggcggcgacctgtcggtgagctcggactcggacagctcgcaagccggcgccaacctgggcgcgcagcccatgctctggccggcgtgggtctactgtacgcgctactcggaccggccttcttcaggtcccaggtctcgaaaaccaaagaagaagaacccgaacaaagaggacaagcggccgcgcacggcctttaccgccgagcagctgcagaggctcaaggccgagttccagaccaacaggtacctgacggagcagcggcgccagagcctggcgcaggagctgagcctcaacgagtcacagatcaagatttggttccagaacaagcgcgccaagatcaagaaggccacgggcaacaagaacacgctggccgtgcacctcatggcacagggcttgtacaaccactccaccacagccaaggagggcaagtcggacagcgagtagggcggggggcatggaggccaggtctcagtccgcgctaaacaatgcaataatttaaaatcataaagggccagtgtataaagattataccagcattaatagtgaaaatattgtgtattagctaaggttctgaaatattctatgtatatatcatttacaggtggtataaaatccaaaatatctgactataaaatatttttttgagttttttgtgtttatgagattatgctaattttatgggtttttttcttttttgcgaagggggctgcttagggtttcacctttttttaatcccctaagctccattatatgacattggacacttttttattattccaaaagaagaaaaaattaaaacaacttgctgaagtccaaagattttttattgctgcatttcacacaactgtgaaccgaataaatagctcctatttggtctatgacttctgccactttgtttgtgttggcttggtgaggacagcaggaggggcccacacctcaagcctggaccagccacctcaaggccttggggagcttaggggacctggtgggagagaggggacttccagggtccttgggccagttctgggatttggccctgggaagcagcccagcgtaccccaggcctgctctgggaagtcggctccatgctcaccagcagccgcccaggcccgcagcctcacccggctccctctcctcaccctcctgcacctaactccctcctccttctcctttttcctcctcttcctccttcctccttcctcctgctcctcctttcttcttctttttcttctcctcctcctccttccttcctcctcctccttctctttcctcctcctcctcaccaagggcccaaccgtgtgcatacatcgtctgcgtctgtggtctgtgtcgctgtccccagtcccaccgcagtcctgccgcaggcctaaccctcctgccctgggcactgcctccatgcagaagcgcttcgaggttctggggctaaaggcctggggtgtgtggcctaaagcccaagagcggtggggcgaccctccttttggcttggccccaggaatttcctgtgactccaccagccatcatgggtgccagccagggtcccagaaatgaggccatggctcactgtttctgggcgggcagaaggctctgtagagggagatggcatcatctatcttcctttcctttttcttttcttccctatttttttctttttttcctttatttttttcttttcttggagtggctgcttctgctatagagaacattcttccaagataaatatgtgtgtttacacatatgtctgcatgcatgtgaacacacacacacacacacacacaccaggcgtgtttgagtccacagttctgaaacatgtggctaccttgtctttcaaaagaactcagaatcctccaggatctagaagaaggaagaaagtgtgtaaataatcatttcttatcatcactttttgtcttttcttgttttttaaaatatacattttatttttgaaggtgtggtacagtgtaaattaaatatattcaatatatttcccaccaagtacctatatatgtatataaacaaacacattatctatatataacgccacactgtcttctgtttagtgtatggggaaagaccaatccaactgtccatctgtggctgggacagcccagggggtgtgcccacggctgacccaggggtgtgcacacggctgagctgggagtcccgctggtctccctgaggactgagggtgaacttcgctctttgccttaaacctctttatttcattgcagtaatagttttacgttgtacataatagtgtaaacctttttaaaaaggaaagtataaaaacaaaagttgtaatttaaaagtctgaataaccatctgctgcttaggaaactcaatgaaatgacatgcctttttagcaggaagcaaagttggtttctgttttttgttttctttgttgttttagtttataaaacatgtgcattttacagttccagtatcaaatatttataatcttatgagaaatgaatgaatgtttctatttacaactgtgcttatcaaaattgtgaacacccccacccccgcatttttgtgtgttgaaattcttgaaggttacattaaataaaacaaaatctctttattataaaata

SEQ ID NO: 129843 - DNA, 4022 bp, Homo sapiens
  Payload ID: 5404
  Gene Symbol: ELMO1
  Gene Name: engulfment and cell motility 1
  Uniprot ID: Q92556
  ENST ID: ENST00000310758
  CDS Start-End: 649-2832
aattagtgcctccaaacgccgtgtgtgagctcatcgaagtcatgctctgcacacatattatttatagcagatctgaggcatgcatggtgtttgacatttctgtcttttaagtagggggacttcaaaaagtcgtgggcatccccctaggcaaagtgcagtgggcagggaccaggcagggtgcgggcgcaaggcgaacgcgcagaccacgagtgtcctggcgcaggtgccgggggcggcggctgcaactccgcagcgtccgctcgggaggagagttcgcggctgatctccggatgccttgcagatgcaaaatgtgtctctggccagcaggaggaaggaagaggaagtgagagcagcggcagccggcggtgcagcagccggccgacccagagtgtaagtgcgtgtgctggggcgagcgggagcgggcgaggatgggcacaggatagaggcagagccacccacgccgccgcggccccacgctgggcgacagagcctccagttccccttcaatggtggcgggtcgccggagctctgatcgccgggaacccttgccgctgctgtcctgcgaccccaagcaggtatagacacgtgtggccgtttacgctgtaggatcctcattcccactggctttgaacattttggggacttacaatgccgccacccgcggacatcgtcaaggtggccatagaatggccgggcgcctaccccaaactcatggaaattgatcagaaaaaaccactgtctgcaataataaaggaagtctgtgatgggtggtctcttgccaaccatgaatattttgcactccagcatgccgatagttcaaacttctatatcacagaaaagaaccgcaatgagataaaaaatggcactatccttcgattaaccacatctccagctcagaacgcccagcagctccatgaacgaatccagtcctcgagtatggatgccaagctggaagccctgaaggacttggccagcctctcccgggatgtcacgtttgcccaggagtttataaacctggacggtatctctctcctcacgcagatggtggagagcggcactgagcgataccagaaattgcagaagatcatgaagccttgctttggagacatgctgtccttcaccctgacggccttcgttgagctgatggaccatggcatagtgtcctgggatacattttcggtggcgttcattaagaagatagcaagttttgtgaacaagtcagccatagacatctcgatcctgcagcggtccttggccattttggagtcgatggtgctcaatagccatgacctctaccagaaagtggcgcaggagatcaccatcggccagctcattccacacctgcaagggtcagatcaagaaatccaaacctatactattgcagtgattaatgcgcttttcctgaaggctcctgatgagaggaggcaggagatggcgaatattttggctcagaagcaactgcgttccatcattttaacacatgtcatccgagcccagcgggccatcaacaatgagatggcgcaccagctgtatgttctacaagtgctcacctttaacctcctggaagacaggatgatgaccaaaatggacccccaggaccaggctcagagggacatcatatttgaacttcgaagaattgcttttgatgctgagtctgaacctaacaacagcagtggcagcatggagaaacgcaagtccatgtacacgcgagattataagaagcttgggttcattaatcatgtcaaccctgccatggacttcacgcagactccacctgggatgttggctctggacaacatgctgtactttgccaagcaccaccaagatgcctacatccggattgtgcttgagaacagtagtcgagaagacaagcatgaatgtccctttggccgcagtagtatagagctgaccaagatgctatgtgagatcttgaaagtgggcgagttgcctagtgagacctgcaacgacttccacccgatgttcttcacccacgacagatcctttgaggagtttttctgcatctgtatccagctcctgaacaagacatggaaggaaatgagggcaacttctgaagacttcaacaaggtaatgcaggtggtgaaggagcaggttatgagagcacttacaaccaagcctagctccctggaccagttcaagagcaaactgcagaacctgagctacactgagatcctgaaaatccgccagtccgagaggatgaaccaggaagatttccagtcccgcccgattttggaactaaaggagaagattcagccagaaatcttagagctgatcaaacagcaacgcctgaaccgccttgtggaagggacctgctttaggaaactcaatgcccggcggaggcaagacaagttttggtattgtcggctttcgccaaatcacaaagtcctgcattacggagacttagaagagagtcctcagggagaagtgccccacgattccttgcaggacaaactgccggtggcagatatcaaagccgtggtgacgggaaaggactgccctcatatgaaagagaaaggtgcccttaaacaaaacaaggaggtgcttgaactcgctttctccatcttgtatgactcaaactgccaactgaacttcatcgctcctgacaagcatgagtactgtatctggacggatggactgaatgcgctactcgggaaggacatgatgagcgacctgacgcggaatgacctggacaccctgctcagcatggaaatcaagctccgcctcctggacctggaaaacatccagatccctgacgcacctccgccgattcccaaggagcccagcaactatgacttcgtctatgactgtaactgaagtggccgggcccagacatgccccttccaaaactggaacacctagctaacaggagagaggaatgaaaacacacccacgccttggaaccgtcctttggtaaagggaagctgtgggtccacattcccttcagcatcacctctagccctggcaactttcagcccctagctggcatcttgctcaccgccctgattctgttcctcggctccactgcttcaggtcacttcccatggctgcagtccactggtgggacaagagcaaagcccactgccagtaagaaggccaaagggcccttccatcctagccctctgcaggcatgcccttccttcccttgggcaggaaagccagcagccccagactgcccaaaaacttgcccaccagaccaagggcagtgccccaaggcccctgtctggaggaaatggcctagctatttgatgagaagaccaaaccccacatcctcctttcccctctctctagaatcatctcgcaccaccagttacacttgaattaagatctgcgctcaaatctcctcccacctctctccctgcttttgccttgctctgttcctctttggtcccaagagcagcagccgcagcctcctcgtgatcctccctagcataaatttcccaaacagtccacaggtcccatgcccactttgcgtctgcactgtgatcgtgacaaatcttccctcctcaccagctagtctggggtttcctctccctgccccaggccagaactgccttcttcatttccacccacgctcccagcctcttagctgaaagcacaaatggtgaaatcagtagtctcgctccatctctaatagactaaacctaaatgcctctaggacggactgttgctatccaagcgtttggtgttaccttctcctgggaggtcctgctgcaactcaagttccacaggatggtcaagctgtcagacatccaagtttacatcattgtaattattactggtatttacaatttgcaagagttttgggttagtttttttttttttttttgctttgtttttgtacaaaagagtctaacattttttgccaaacagatatatatttaatgaaaagaagagatacataaatgtgtgaatttccagtttttttttaattattttaatcccaaacatcttcctgaaaataacattcccttaaacatgctgtggaataaaatggattgtgatga

SEQ ID NO: 129844 - DNA, 1982 bp, Homo sapiens
  Payload ID: 5404
  Gene Symbol: ELMO1
  Gene Name: engulfment and cell motility 1
  Uniprot ID: Q92556
  ENST ID: ENST00000396040
  CDS Start-End: 150-893
tggaggggcagcgtggggaacgagaaactctttgcctgtagggacccttctagctgcaaacttaaaaatgtatgtggcaagatgcaacccaagcaccgagcaggattccagacgagttataatcattctgaacggggagaggaaaggtaatgcaggtggtgaaggagcaggttatgagagcacttacaaccaagcctagctccctggaccagttcaagagcaaactgcagaacctgagctacactgagatcctgaaaatccgccagtccgagaggatgaaccaggaagatttccagtcccgcccgattttggaactaaaggagaagattcagccagaaatcttagagctgatcaaacagcaacgcctgaaccgccttgtggaagggacctgctttaggaaactcaatgcccggcggaggcaagacaagttttggtattgtcggctttcgccaaatcacaaagtcctgcattacggagacttagaagagagtcctcagggagaagtgccccacgattccttgcaggacaaactgccggtggcagatatcaaagccgtggtgacgggaaaggactgccctcatatgaaagagaaaggtgcccttaaacaaaacaaggaggtgcttgaactcgctttctccatcttgtatgactcaaactgccaactgaacttcatcgctcctgacaagcatgagtactgtatctggacggatggactgaatgcgctactcgggaaggacatgatgagcgacctgacgcggaatgacctggacaccctgctcagcatggaaatcaagctccgcctcctggacctggaaaacatccagatccctgacgcacctccgccgattcccaaggagcccagcaactatgacttcgtctatgactgtaactgaagtggccgggcccagacatgccccttccaaaactggaacacctagctaacaggagagaggaatgaaaacacacccacgccttggaaccgtcctttggtaaagggaagctgtgggtccacattcccttcagcatcacctctagccctggcaactttcagcccctagctggcatcttgctcaccgccctgattctgttcctcggctccactgcttcaggtcacttcccatggctgcagtccactggtgggacaagagcaaagcccactgccagtaagaaggccaaagggcccttccatcctagccctctgcaggcatgcccttccttcccttgggcaggaaagccagcagccccagactgcccaaaaacttgcccaccagaccaagggcagtgccccaaggcccctgtctggaggaaatggcctagctatttgatgagaagaccaaaccccacatcctcctttcccctctctctagaatcatctcgcaccaccagttacacttgaattaagatctgcgctcaaatctcctcccacctctctccctgcttttgccttgctctgttcctctttggtcccaagagcagcagccgcagcctcctcgtgatcctccctagcataaatttcccaaacagtccacaggtcccatgcccactttgcgtctgcactgtgatcgtgacaaatcttccctcctcaccagctagtctggggtttcctctccctgccccaggccagaactgccttcttcatttccacccacgctcccagcctcttagctgaaagcacaaatggtgaaatcagtagtctcgctccatctctaatagactaaacctaaatgcctctaggacggactgttgctatccaagcgtttggtgttaccttctcctgggaggtcctgctgcaactcaagttccacaggatggtcaagctgtcagacatccaagtttacatcattgtaattattactggtatttacaatttgcaagagttttgggttagtttttttttttttttttgctttgtttttgtacaaaagagtctaacattttttgccaaacagatatatatttaatgaaaagaagagatacataaa

SEQ ID NO: 129845 - DNA, 2524 bp, Homo sapiens
  Payload ID: 5404
  Gene Symbol: ELMO1
  Gene Name: engulfment and cell motility 1
  Uniprot ID: Q92556
  ENST ID: ENST00000396045
  CDS Start-End: 591-1334
tgatgaatatgaactatctccagcccatcaccagctttttctttttcttcttgtccttatttgttttttagttctttataagaaaaagtgggggatatattgagaagtaccaagacggggagctatgggtttattgacaaaagagcataggacactaaaatagaaacgaagttattatttttctcttgtgatactctaagagaaaagctcttcctggaaaagccgatgatctctgaagatgctaaataaatgagcaggagtttccctgaaatggaggcgccctttgattggctgatctttccccgactcctgccaatcggagcatccctgggctccagctccataaacataagcaaagctacatgcttattcttctggacttggagtgtataccatttaaaggtgtgcggcgggtctctgttcacatggctcaactggaaacctgtttcatgaacaagcttactcaggaaccatctggtggtattccagcacattgttcttcagggggacgactctaagtcgctttgtggtggcagcagcttagaatcagtatttgtggttgggaaagatggacttacgggagcttggtaatgcaggtggtgaaggagcaggttatgagagcacttacaaccaagcctagctccctggaccagttcaagagcaaactgcagaacctgagctacactgagatcctgaaaatccgccagtccgagaggatgaaccaggaagatttccagtcccgcccgattttggaactaaaggagaagattcagccagaaatcttagagctgatcaaacagcaacgcctgaaccgccttgtggaagggacctgctttaggaaactcaatgcccggcggaggcaagacaagttttggtattgtcggctttcgccaaatcacaaagtcctgcattacggagacttagaagagagtcctcagggagaagtgccccacgattccttgcaggacaaactgccggtggcagatatcaaagccgtggtgacgggaaaggactgccctcatatgaaagagaaaggtgcccttaaacaaaacaaggaggtgcttgaactcgctttctccatcttgtatgactcaaactgccaactgaacttcatcgctcctgacaagcatgagtactgtatctggacggatggactgaatgcgctactcgggaaggacatgatgagcgacctgacgcggaatgacctggacaccctgctcagcatggaaatcaagctccgcctcctggacctggaaaacatccagatccctgacgcacctccgccgattcccaaggagcccagcaactatgacttcgtctatgactgtaactgaagtggccgggcccagacatgccccttccaaaactggaacacctagctaacaggagagaggaatgaaaacacacccacgccttggaaccgtcctttggtaaagggaagctgtgggtccacattcccttcagcatcacctctagccctggcaactttcagcccctagctggcatcttgctcaccgccctgattctgttcctcggctccactgcttcaggtcacttcccatggctgcagtccactggtgggacaagagcaaagcccactgccagtaagaaggccaaagggcccttccatcctagccctctgcaggcatgcccttccttcccttgggcaggaaagccagcagccccagactgcccaaaaacttgcccaccagaccaagggcagtgccccaaggcccctgtctggaggaaatggcctagctatttgatgagaagaccaaaccccacatcctcctttcccctctctctagaatcatctcgcaccaccagttacacttgaattaagatctgcgctcaaatctcctcccacctctctccctgcttttgccttgctctgttcctctttggtcccaagagcagcagccgcagcctcctcgtgatcctccctagcataaatttcccaaacagtccacaggtcccatgcccactttgcgtctgcactgtgatcgtgacaaatcttccctcctcaccagctagtctggggtttcctctccctgccccaggccagaactgccttcttcatttccacccacgctcccagcctcttagctgaaagcacaaatggtgaaatcagtagtctcgctccatctctaatagactaaacctaaatgcctctaggacggactgttgctatccaagcgtttggtgttaccttctcctgggaggtcctgctgcaactcaagttccacaggatggtcaagctgtcagacatccaagtttacatcattgtaattattactggtatttacaatttgcaagagttttgggttagtttttttttttttttttgctttgtttttgtacaaaagagtctaacattttttgccaaacagatatatatttaatgaaaagaagagatacataaatgtgtgaatttccagtttttttttaattattttaatcccaaacatcttcctgaaaataacattcccttaaacatgctgtggaataaaatggattgtgatga

SEQ ID NO: 129846 - DNA, 503 bp, Homo sapiens
  Payload ID: 5404
  Gene Symbol: ELMO1
  Gene Name: engulfment and cell motility 1
  ENST ID: ENST00000453399
  CDS Start-End: 261-503
agatgcaaaatgtgtctctggccagcaggaggaaggaagaggaagtgagagcagcggcagccggcggtgcagcagccggccgacccagagtggggcagagcagggagcacttataccatacaaggcagagaagatacagatcaagatatgcccaaggcccttctagttcagcctctccttggagtaggtatagacacgtgtggccgtttacgctgtaggatcctcattcccactggctttgaacattttggggacttacaatgccgccacccgcggacatcgtcaaggtggccatagaatggccgggcgcctaccccaaactcatggaaattgatcagaaaaaaccactgtctgcaataataaaggaagtctgtgatgggtggtctcttgccaaccatgaatattttgcactccagcatgccgatagttcaaacttctatatcacagaaaagaaccgcaatgagataaaaaatggcactatccttcgattaaccacatctcca

SEQ ID NO: 129847 - DNA, 2621 bp, Homo sapiens
  Payload ID: 5404
  Gene Symbol: ELMO1
  Gene Name: engulfment and cell motility 1
  Uniprot ID: Q92556
  ENST ID: ENST00000448602
  CDS Start-End: 438-2621
gagctcatcgaagtcatgctctgcacacatattatttatagcagatctgaggcatgcatggtgtttgacatttctgtcttttaagtagggggacttcaaaaagtcgtgggcatccccctaggcaaagtgcagtgggcagggaccaggcagggtgcgggcgcaaggcgaacgcgcagaccacgagtgtcctggcgcaggtgccgggggcggcggctgcaactccgcagcgtccgctcgggaggagagttcgcggctgatctccggatgccttgcagatgcaaaatgtgtctctggccagcaggaggaaggaagaggaagtgagagcagcggcagccggcggtgcagcagccggccgacccagagtgtatagacacgtgtggccgtttacgctgtaggatcctcattcccactggctttgaacattttggggacttacaatgccgccacccgcggacatcgtcaaggtggccatagaatggccgggcgcctaccccaaactcatggaaattgatcagaaaaaaccactgtctgcaataataaaggaagtctgtgatgggtggtctcttgccaaccatgaatattttgcactccagcatgccgatagttcaaacttctatatcacagaaaagaaccgcaatgagataaaaaatggcactatccttcgattaaccacatctccagctcagaacgcccagcagctccatgaacgaatccagtcctcgagtatggatgccaagctggaagccctgaaggacttggccagcctctcccgggatgtcacgtttgcccaggagtttataaacctggacggtatctctctcctcacgcagatggtggagagcggcactgagcgataccagaaattgcagaagatcatgaagccttgctttggagacatgctgtccttcaccctgacggccttcgttgagctgatggaccatggcatagtgtcctgggatacattttcggtggcgttcattaagaagatagcaagttttgtgaacaagtcagccatagacatctcgatcctgcagcggtccttggccattttggagtcgatggtgctcaatagccatgacctctaccagaaagtggcgcaggagatcaccatcggccagctcattccacacctgcaagggtcagatcaagaaatccaaacctatactattgcagtgattaatgcgcttttcctgaaggctcctgatgagaggaggcaggagatggcgaatattttggctcagaagcaactgcgttccatcattttaacacatgtcatccgagcccagcgggccatcaacaatgagatggcgcaccagctgtatgttctacaagtgctcacctttaacctcctggaagacaggatgatgaccaaaatggacccccaggaccaggctcagagggacatcatatttgaacttcgaagaattgcttttgatgctgagtctgaacctaacaacagcagtggcagcatggagaaacgcaagtccatgtacacgcgagattataagaagcttgggttcattaatcatgtcaaccctgccatggacttcacgcagactccacctgggatgttggctctggacaacatgctgtactttgccaagcaccaccaagatgcctacatccggattgtgcttgagaacagtagtcgagaagacaagcatgaatgtccctttggccgcagtagtatagagctgaccaagatgctatgtgagatcttgaaagtgggcgagttgcctagtgagacctgcaacgacttccacccgatgttcttcacccacgacagatcctttgaggagtttttctgcatctgtatccagctcctgaacaagacatggaaggaaatgagggcaacttctgaagacttcaacaaggtaatgcaggtggtgaaggagcaggttatgagagcacttacaaccaagcctagctccctggaccagttcaagagcaaactgcagaacctgagctacactgagatcctgaaaatccgccagtccgagaggatgaaccaggaagatttccagtcccgcccgattttggaactaaaggagaagattcagccagaaatcttagagctgatcaaacagcaacgcctgaaccgccttgtggaagggacctgctttaggaaactcaatgcccggcggaggcaagacaagttttggtattgtcggctttcgccaaatcacaaagtcctgcattacggagacttagaagagagtcctcagggagaagtgccccacgattccttgcaggacaaactgccggtggcagatatcaaagccgtggtgacgggaaaggactgccctcatatgaaagagaaaggtgcccttaaacaaaacaaggaggtgcttgaactcgctttctccatcttgtatgactcaaactgccaactgaacttcatcgctcctgacaagcatgagtactgtatctggacggatggactgaatgcgctactcgggaaggacatgatgagcgacctgacgcggaatgacctggacaccctgctcagcatggaaatcaagctccgcctcctggacctggaaaacatccagatccctgacgcacctccgccgattcccaaggagcccagcaactatgacttcgtctatgactgtaactga

SEQ ID NO: 129848 - DNA, 610 bp, Homo sapiens
  Payload ID: 5404
  Gene Symbol: ELMO1
  Gene Name: engulfment and cell motility 1
  ENST ID: ENST00000424212
  CDS Start-End: 1-375
caggagatggcgaatattttggctcagaagcaactgcgttccatcattttaacacatgtcatccgagcccagcgggccatcaacaatgagatggcgcaccagctgtatgttctacaagtgctcacctttaacctcctggaagacaggatgatgaccaaaatggacccccaggaccaggctcagagggacatcatatttgaacttcgaagaattgcttttgatgctgagtctgaacctaacaacagcagtggcagcatggagaaacgcaagtccatgtacacgcgagattataagaagcttgggttcattgtaagtaagctatctccagtatgcgctctccctccagcctccccgggcctgacctcagccacataactgatgtctcttccgagcgtgtggtcctcttgcgctttacggaatagtttccacatttccagatgtttagctggtttaaacaggatcacatgaaaatctcttctggcttcagtgaaatggaataacttgcacaagtgtgactaatactgcatttgtttattcagttctgattaagtgtaaccgagagtagttagcccggaatgtatctcgacttcattaaatctatttcacaaga

SEQ ID NO: 129849 - DNA, 881 bp, Homo sapiens
  Payload ID: 5404
  Gene Symbol: ELMO1
  Gene Name: engulfment and cell motility 1
  ENST ID: ENST00000420636
  CDS Start-End: 1-549
gcgaatattttggctcagaagcaactgcgttccatcattttaacacatgtcatccgagcccagcgggccatcaacaatgagatggcgcaccagctgtatgttctacaagtgctcacctttaacctcctggaagacaggatgatgaccaaaatggacccccaggaccaggctcagagggacatcatatttgaacttcgaagaattgcttttgatgctgagtctgaacctaacaacagcagtggcagcatggagaaacgcaagtccatgtacacgcgagattataagaagcttgggttcattaatcatgtcaaccctgccatggacttcacgcagactccacctgggatgttggctctggacaacatgctgtactttgccaagcaccaccaagatgcctacatccggattgtgcttgagaacagtagtcgagaagacaagcatgaatgtccctttggccgcagtagtatagagctgaccaagatgctatgtgagatcttgaaagtgggcgagttgcatcacttatctcctgaaaaattcacactgccgtgaacacgatccagccttgcagtgtgtctcggagctagtgagacctgcaacgacttccacccgatgttcttcacccacgacagatcctttgaggagtttttctgcatctgtatccagctcctgaacaagacatggaaggaaatgagggcaacttctgaagacttcaacaaggtaatgcaggtggtgaaggagcaggttatgagagcacttacaaccaagcctagctccctggaccagttcaagagcaaactgcagaacctgagctacactgagatcctgaaaatccgccagtccgagaggatgaaccaggaagatttccagtcccgcccgatttt

SEQ ID NO: 129850 - DNA, 858 bp, Homo sapiens
  Payload ID: 5404
  Gene Symbol: ELMO1
  Gene Name: engulfment and cell motility 1
  ENST ID: ENST00000445322
  CDS Start-End: 682-858
atagcagatctgaggcatgcatggtgtttgacatttctgtcttttaagtagggggacttcaaaaagtcgtgggcatccccctaggcaaagtgcagtgggcagggaccaggcagggtgcgggcgcaaggcgaacgcgcagaccacgagtgtcctggcgcaggtgccgggggcggcggctgcaactccgcagcgtccgctcgggaggagagttcgcggctgatctccggatgccttgcagatgcaaaatgtgtctctggccagcaggaggaaggaagaggaagtgagagcagcggcagccggcggtgcagcagccggccgacccagagtgtaagtgcgtgtgctggggcgagcgggagcgggcgaggatgggcacaggatagaggcagagccacccacgccgccgcggccccacgctgggcgacagagcctccagttccccttcaatggtggcgggtcgccggagctctgatcgccgggaacccttgccgctgctgtcctgcgaccccaagcagggggcagagcagggagcacttataccatacaaggcagagaagatacagatcaagatatgcccaaggcccttctagttcagcctctccttggagtaggtatagacacgtgtggccgtttacgctgtaggatcctcattcccactggctttgaacattttggggacttacaatgccgccacccgcggacatcgtcaaggtggccatagaatggccgggcgcctaccccaaactcatggaaattgatcagaaaaaaccactgtctgcaataataaaggaagtctgtgatgggtggtctcttgccaaccatgaatattttgcactccagcatgccgatagttcaaacttc

SEQ ID NO: 129851 - DNA, 576 bp, Homo sapiens
  Payload ID: 5404
  Gene Symbol: ELMO1
  Gene Name: engulfment and cell motility 1
  ENST ID: ENST00000455119
  CDS Start-End: 74-576
gtatagacacgtgtggccgtttacgctgtaggatcctcattcccactggctttgaacattttggggacttacaatgccgccacccgcggacatcgtcaaggtggccatagaatggccgggcgcctaccccaaactcatggaaattgatcagaaaaaaccactgtctgcaataataaaggaagtctgtgatgggtggtctcttgccaaccatgaatattttgcactccagcatgccgatagttcaaacttctatatcacagaaaagaaccgcaatgagataaaaaatggcactatccttcgattaaccacatctccagctcagaacgcccagcagctccatgaacgaatccagtcctcgagtatggatgccaagctggaagccctgaaggacttggccagcctctcccgggatgtcacgtttgcccaggagtttataaacctggacggtatctctctcctcacgcagatggtggagagcggcactgactttggagacatgctgtccttcaccctgacggccttcgttgagctgatggaccatggcatagtgtcctgggatacattttcggtggcgtt

SEQ ID NO: 129852 - DNA, 3154 bp, Homo sapiens
  Payload ID: 5404
  Gene Symbol: ELMO1
  Gene Name: engulfment and cell motility 1
  Uniprot ID: Q92556
  ENST ID: ENST00000442504
  CDS Start-End: 711-2894
ataaacgcaggtcacctgagccagtagcagcaacctgggtccccttccacgctgtggaatctttgtttttttttcactgctcgcaataaatcttgctgctgcttattatttgggtccgtgttacctttatgagctgtagcactcaccgcgaaggtttgcagcttcgctattcactcttgaagccagcgagaccacgaacccaccgggaggaagaaacaactccggacgcgccacctttaagagctgtaacactaacggtgaaagtctgcggtatcactcctgaagtcagggagaccacgaaccccccagaagaaactccggacgcatctgaacatctgaaggaacaaactctggacacaccatctttaagaactgaaacaccgcgacagttcgctgcttcattcttaaaggcagtgagaccgagaacgcaccaattctggacacaaaaggaccttagcaggctcaggaaatggcaagccatttatgaagagggaagagatagcaaacgttggtctcaagttctctagttctttacccagaccatagctggctgggggatgatcctgatttagtctggggggttcctttacgcattgccaccagcaggtgccgcaaatggaccattggcagtcttaaggtatagacacgtgtggccgtttacgctgtaggatcctcattcccactggctttgaacattttggggacttacaatgccgccacccgcggacatcgtcaaggtggccatagaatggccgggcgcctaccccaaactcatggaaattgatcagaaaaaaccactgtctgcaataataaaggaagtctgtgatgggtggtctcttgccaaccatgaatattttgcactccagcatgccgatagttcaaacttctatatcacagaaaagaaccgcaatgagataaaaaatggcactatccttcgattaaccacatctccagctcagaacgcccagcagctccatgaacgaatccagtcctcgagtatggatgccaagctggaagccctgaaggacttggccagcctctcccgggatgtcacgtttgcccaggagtttataaacctggacggtatctctctcctcacgcagatggtggagagcggcactgagcgataccagaaattgcagaagatcatgaagccttgctttggagacatgctgtccttcaccctgacggccttcgttgagctgatggaccatggcatagtgtcctgggatacattttcggtggcgttcattaagaagatagcaagttttgtgaacaagtcagccatagacatctcgatcctgcagcggtccttggccattttggagtcgatggtgctcaatagccatgacctctaccagaaagtggcgcaggagatcaccatcggccagctcattccacacctgcaagggtcagatcaagaaatccaaacctatactattgcagtgattaatgcgcttttcctgaaggctcctgatgagaggaggcaggagatggcgaatattttggctcagaagcaactgcgttccatcattttaacacatgtcatccgagcccagcgggccatcaacaatgagatggcgcaccagctgtatgttctacaagtgctcacctttaacctcctggaagacaggatgatgaccaaaatggacccccaggaccaggctcagagggacatcatatttgaacttcgaagaattgcttttgatgctgagtctgaacctaacaacagcagtggcagcatggagaaacgcaagtccatgtacacgcgagattataagaagcttgggttcattaatcatgtcaaccctgccatggacttcacgcagactccacctgggatgttggctctggacaacatgctgtactttgccaagcaccaccaagatgcctacatccggattgtgcttgagaacagtagtcgagaagacaagcatgaatgtccctttggccgcagtagtatagagctgaccaagatgctatgtgagatcttgaaagtgggcgagttgcctagtgagacctgcaacgacttccacccgatgttcttcacccacgacagatcctttgaggagtttttctgcatctgtatccagctcctgaacaagacatggaaggaaatgagggcaacttctgaagacttcaacaaggtaatgcaggtggtgaaggagcaggttatgagagcacttacaaccaagcctagctccctggaccagttcaagagcaaactgcagaacctgagctacactgagatcctgaaaatccgccagtccgagaggatgaaccaggaagatttccagtcccgcccgattttggaactaaaggagaagattcagccagaaatcttagagctgatcaaacagcaacgcctgaaccgccttgtggaagggacctgctttaggaaactcaatgcccggcggaggcaagacaagttttggtattgtcggctttcgccaaatcacaaagtcctgcattacggagacttagaagagagtcctcagggagaagtgccccacgattccttgcaggacaaactgccggtggcagatatcaaagccgtggtgacgggaaaggactgccctcatatgaaagagaaaggtgcccttaaacaaaacaaggaggtgcttgaactcgctttctccatcttgtatgactcaaactgccaactgaacttcatcgctcctgacaagcatgagtactgtatctggacggatggactgaatgcgctactcgggaaggacatgatgagcgacctgacgcggaatgacctggacaccctgctcagcatggaaatcaagctccgcctcctggacctggaaaacatccagatccctgacgcacctccgccgattcccaaggagcccagcaactatgacttcgtctatgactgtaactgaagtggccgggcccagacatgccccttccaaaactggaacacctagctaacaggagagaggaatgaaaacacacccacgccttggaaccgtcctttggtaaagggaagctgtgggtccacattcccttcagcatcacctctagccctggcaactttcagcccctagctggcatcttgctcaccgccctgattctgttcctcggctccactgcttcaggtcacttcccatggctgcagtccactggtgggacaagagcaaag

SEQ ID NO: 129853 - DNA, 580 bp, Homo sapiens
  Payload ID: 5404
  Gene Symbol: ELMO1
  Gene Name: engulfment and cell motility 1
  ENST ID: ENST00000433246
  CDS Start-End: 1-580
atcaagaaatccaaacctatactattgcagtgattaatgcgcttttcctgaaggctcctgatgagaggaggcaggttgatgtagagagcaatgttgacatccttgattgtcctctgactgagatggcgaatattttggctcagaagcaactgcgttccatcattttaacacatgtcatccgagcccagcgggccatcaacaatgagatggcgcaccagctgtatgttctacaagtgctcacctttaacctcctggaagacaggatgatgaccaaaatggacccccaggaccaggctcagagggacatcatatttgaacttcgaagaattgcttttgatgctgagtctgaacctaacaacagcagtggcagcatggagaaacgcaagtccatgtacacgcgagattataagaagcttgggttcattaatcatgtcaaccctgccatggacttcacgcagactccacctgggatgttggctctggacaacatgctgtactttgccaagcaccaccaagatgcctacatccggattgtgcttgagaacagtagtcgagaagacaagcatgaatgtccctttgg

SEQ ID NO: 129854 - DNA, 650 bp, Homo sapiens
  Payload ID: 5404
  Gene Symbol: ELMO1
  Gene Name: engulfment and cell motility 1
  ENST ID: ENST00000455879
  CDS Start-End: 202-650
gaccatgacttcctgggcaatctgtccttcctcagactgttgagtgccagacgtttatatgcatgtctggacagagagtgagcctggctcattcagaccctgggcaccattcagagcagaactcagtggtatagacacgtgtggccgtttacgctgtaggatcctcattcccactggctttgaacattttggggacttacaatgccgccacccgcggacatcgtcaaggtggccatagaatggccgggcgcctaccccaaactcatggaaattgatcagaaaaaaccactgtctgcaataataaaggaagtctgtgatgggtggtctcttgccaaccatgaatattttgcactccagcatgccgatagttcaaacttctatatcacagaaaagaaccgcaatgagataaaaaatggcactatccttcgattaaccacatctccagctcagaacgcccagcagctccatgaacgaatccagtcctcgagtatggatgccaagctggaagccctgaaggacttggccagcctctcccgggatgtcacgtttgcccaggagtttataaacctggacggtatctctctcctcacgcagatggtggagagcggcactgagcgataccagaaattgcagaagatcatgaagccttg

SEQ ID NO: 129855 - DNA, 3669 bp, Homo sapiens
  Payload ID: 5405
  Gene Symbol: ELMO2
  Gene Name: engulfment and cell motility 2
  Uniprot ID: Q96JJ3
  ENST ID: ENST00000290246
  CDS Start-End: 196-2358
gcgggcggaggctggaggagccgccgagcggagacccgggagcaggagctgggcctaggtctgcgccctggagggaggtgtagaaagaggtacatggagaacaagtttgtcaatccgtctgaacttcagttgccttacctgtaaggcagccgtgtctgtgtttttgtctcgcagaattagagcccattgggaacgatgccaccaccgtcagacattgtcaaagtggccattgagtggccaggtgctaacgcccagctccttgaaatcgaccagaaacggcccctggcatccattatcaaggaagtttgtgatgggtggtcgttgccaaacccagagtattataccctccgttatgcagatggtcctcagctgtacatcaccgaacagactcgcagtgacattaagaatgggacaatcttacaactggctatctccccgtcccgggctgcacgccagctgatggagaggacccagtcatccaacatggagacccggctggatgccatgaaggagctggccaagctctctgccgacgtgactttcgctactgagttcatcaacatggatggcatcattgtgctgacaaggctcgtggaaagtggaaccaagctcttgtcccactacagtgagatgctggcattcaccctgactgccttcctagagctcatggaccatggcattgtctcctgggacatggtttcaatcacctttattaagcagattgcagggtatgtgagccagcccatggtggacgtgtcaatccttcagaggtccctggccatcctggagagcatggtcttgaacagccagagtctgtaccagaagatagccgaggaaatcaccgtgggacagctcatctcacacctccaggtctccaaccaggagattcagacctacgccattgcactgattaatgcactttttctgaaggctcctgaggacaaacgacaggatatggcaaatgcatttgcacagaagcatctccggtctataatcctgaatcatgtgatccgagggaaccgccccatcaaaactgagatggcccatcagctatatgtccttcaagtcctaacctttaaccttctggaagaaaggatgatgaccaagatggaccccaatgaccaggctcaaagggacatcatatttgaactgaggaggattgcatttgacgcagagtctgatcctagcaatgcccctgggagtgggaccgaaaaacgcaaagccatgtacacaaaggactacaaaatgctgggatttaccaaccacatcaatccagccatggactttacccagactcctcctggaatgctggccttggacaacatgctgtacttggctaaagtccaccaggacacctacatccggattgtcttggagaacagtagccgggaagacaaacatgaatgcccctttggccgcagtgccattgagctcaccaaaatgctctgtgaaatcctgcaggttggggaactaccaaatgaaggacgcaatgactaccacccgatgttctttacccatgaccgagcctttgaagagctctttggaatctgcatccagctgttgaacaagacctggaaggagatgagggcaacagcagaggacttcaacaaggttatgcaagtcgtccgagagcaaatcactcgagctttgccctccaaacccaactctttggatcagttcaagagcaaattgcgtagcctgagttactctgagattctacgactgcgccagtctgagaggatgagtcaggatgacttccagtccccgccaattgtggagctgagggagaagatccagcccgagatccttgagctgatcaagcagcagcgcctgaaccggctctgtgagggcagcagcttccgaaagattgggaaccgccgaaggcaagaacggttctggtactgccggttggcactgaaccacaaggtccttcactatggtgacttggatgacaacccacaaggggaggtgacatttgaatccctgcaggagaaaattcctgttgcagacattaaggccattgtcactgggaaagattgtccccacatgaaagagaaaagtgctctgaaacagaacaaggaggtgttggaattggccttctccatcctgtatgaccctgatgagaccttaaacttcatcgcacctaataaatatgagtactgcatctggattgatggcctcagtgcccttctggggaaggacatgtccagtgagctgaccaagagtgacctggacaccctgctgagcatggagatgaagctgcggctcctggacctggagaacatccagattcccgaagccccaccccccatccccaaggagcccagcagctatgactttgtctatcactatggctgagcctggagccagaaacgacggtacccaggagaagggattttgggcccaggagaaacacttacattctggtgccttgtcttttgcttgtacagaatctgtagtgattttggtggccagtaaatgccagccatttctcaaacccacctcggaccacccagagtttcctcttggtccctgtctactaagagtcatgaaggcagggtgctctgcccactccatcaccatgaagcctgggattgggccacgaggaacaaacagcagatgcccttgccttccagtccaagaaactgcttcttgaaatggatttaacaacagccactcaccttttcctcctgagcctgctctctgatcagctggatccccacgtgagcaacagctggcccaggaaaggctgcctgcagaggacaggtgtgttgggcgtgttgagagccttgaagtgactacctgtatcttagatctgagtacaagcctgaggcttttgcttttgtcttttttgatgagggctcactccagcttcatatggtgccaagacgttgctgcttctgaggttggctctaacatctctggtctttagagccaccagatctctctggcccatacagatatcagagcagacggaaatttctccctgcaagcgctcagtctcatcccagcaagtcaaagacctcctggccaagtcctgccctcttaagtctccaggaacgctgcagggaaaacccagctgaggcctgggcctagactgtggtgaggtcactagattctactgctcttcccccacattaataccttttccttcctcagagagaaatctcccctaacctgaattgcagccccctccagtttgctttcctttggccttccagaccccaggaagttggccttcccttcctagtgctatggtttctgccattggccatgatttcagggagctggctgaggccggctgaggccacacctgtgccagtggggcttccctggtgctgcagcacttgtaaaccacacacacagcctctctccctggacatacgttagcacattggcattcagtattggtggcctggcatggtaggtactacccaatgaagagtgtactatatattttcattactataggccatacttatacagacgtgtatatatatttatataagatctacctatcttaggatggaaccttggggaaaaataaaattgaggggaagtaaaaagtatgtaacacttccagttgtgagccaagattgtaaccagagagcagccaggagcttcctgtcagtaaccatgttttcaataaatactctttcatgtacaaac

SEQ ID NO: 129856 - DNA, 2157 bp, Homo sapiens
  Payload ID: 5405
  Gene Symbol: ELMO2
  Gene Name: engulfment and cell motility 2
  ENST ID: ENST00000352077
  CDS Start-End: 1-2157
atgccaccaccgtcagacattgtcaaagtggccattgagtggccaggtgctaacgcccagctccttgaaatcgaccagaaacggcccctggcatccattatcaaggaagtttgtgatgggtggtcgttgccaaacccagagtattataccctccgttatgcagatggtcctcagctgtacatcaccgaacagactcgcagtgacattaagaatgggacaatcttacaactggctatctccccgtcccgggctgcacgccagctgatggagaggacccagtcatccaacatggagacccggctggatgccatgaaggagctggccaagctctctgccgacgtgactttcgctactgagttcatcaacatggatggcatcattgtgctgacaaggctcgtggaaagtggaaccaagctcttgtcccatgagatgctggcattcaccctgactgccttcctagagctcatggaccatggcattgtctcctgggacatggtttcaatcacctttattaagcagattgcagggtatgtgagccagcccatggtggacgtgtcaatccttcagaggtccctggccatcctggagagcatggtcttgaacagccagagtctgtaccagaagatagccgaggaaatcaccgtgggacagctcatctcacacctccaggtctccaaccaggagattcagacctacgccattgcactgattaatgcactttttctgaaggctcctgaggacaaacgacaggatatggcaaatgcatttgcacagaagcatctccggtctataatcctgaatcatgtgatccgagggaaccgccccatcaaaactgagatggcccatcagctatatgtccttcaagtcctaacctttaaccttctggaagaaaggatgatgaccaagatggaccccaatgaccaggctcaaagggacatcatatttgaactgaggaggattgcatttgacgcagagtctgatcctagcaatgcccctgggagtgggaccgaaaaacgcaaagccatgtacacaaaggactacaaaatgctgggatttaccaaccacatcaatccagccatggactttacccagactcctcctggaatgctggccttggacaacatgctgtacttggctaaagtccaccaggacacctacatccggattgtcttggagaacagtagccgggaagacaaacatgaatgcccctttggccgcagtgccattgagctcaccaaaatgctctgtgaaatcctgcaggttggggaactaccaaatgaaggacgcaatgactaccacccgatgttctttacccatgaccgagcctttgaagagctctttggaatctgcatccagctgttgaacaagacctggaaggagatgagggcaacagcagaggacttcaacaaggttatgcaagtcgtccgagagcaaatcactcgagctttgccctccaaacccaactctttggatcagttcaagagcaaattgcgtagcctgagttactctgagattctacgactgcgccagtctgagaggatgagtcaggatgacttccagtccccgccaattgtggagctgagggagaagatccagcccgagatccttgagctgatcaagcagcagcgcctgaaccggctctgtgagggcagcagcttccgaaagattgggaaccgccgaaggcaagaacggttctggtactgccggttggcactgaaccacaaggtccttcactatggtgacttggatgacaacccacaaggggaggtgacatttgaatccctgcaggagaaaattcctgttgcagacattaaggccattgtcactgggaaagattgtccccacatgaaagagaaaagtgctctgaaacagaacaaggaggtgttggaattggccttctccatcctgtatgaccctgatgagaccttaaacttcatcgcacctaataaatatgagtactgcatctggattgatggcctcagtgcccttctggggaaggacatgtccagtgagctgaccaagagtgacctggacaccctgctgagcatggagatgaagctgcggctcctggacctggagaacatccagattcccgaagccccaccccccatccccaaggagcccagcagctatgactttgtctatcactatggctga

SEQ ID NO: 129857 - DNA, 3678 bp, Homo sapiens
  Payload ID: 5405
  Gene Symbol: ELMO2
  Gene Name: engulfment and cell motility 2
  Uniprot ID: Q96JJ3
  ENST ID: ENST00000372176
  CDS Start-End: 470-2368
gtctgcgccctggagggaggtgtagaaagaggtacatggagaacaagtttgtcaatccgtctgaacttcagttgccttacctgtaaggcagccgtgtctgtgtttttgtctcgcagaattagagcccattgggaacgatgccaccaccgtcagacattgtcaaagtggccattgagtggccaggtgctaacgcccagctccttgaaatcgaccagaaacggcccctggcatccattatcaaggaagtttgtgatgggtaggttgaaatggacctcgttttcaacagtggcagctccgactgaaagagcactcctacaccttgaggtggtcgttgccaaacccagagtattataccctccgttatgcagatggtcctcagctgtacatcaccgaacagactcgcagtgacattaagaatgggacaatcttacaactggctatctccccgtcccgggctgcacgccagctgatggagaggacccagtcatccaacatggagacccggctggatgccatgaaggagctggccaagctctctgccgacgtgactttcgctactgagttcatcaacatggatggcatcattgtgctgacaaggctcgtggaaagtggaaccaagctcttgtcccactacagtgagatgctggcattcaccctgactgccttcctagagctcatggaccatggcattgtctcctgggacatggtttcaatcacctttattaagcagattgcagggtatgtgagccagcccatggtggacgtgtcaatccttcagaggtccctggccatcctggagagcatggtcttgaacagccagagtctgtaccagaagatagccgaggaaatcaccgtgggacagctcatctcacacctccaggtctccaaccaggagattcagacctacgccattgcactgattaatgcactttttctgaaggctcctgaggacaaacgacaggatatggcaaatgcatttgcacagaagcatctccggtctataatcctgaatcatgtgatccgagggaaccgccccatcaaaactgagatggcccatcagctatatgtccttcaagtcctaacctttaaccttctggaagaaaggatgatgaccaagatggaccccaatgaccaggctcaaagggacatcatatttgaactgaggaggattgcatttgacgcagagtctgatcctagcaatgcccctgggagtgggaccgaaaaacgcaaagccatgtacacaaaggactacaaaatgctgggatttaccaaccacatcaatccagccatggactttacccagactcctcctggaatgctggccttggacaacatgctgtacttggctaaagtccaccaggacacctacatccggattgtcttggagaacagtagccgggaagacaaacatgaatgcccctttggccgcagtgccattgagctcaccaaaatgctctgtgaaatcctgcaggttggggaactaccaaatgaaggacgcaatgactaccacccgatgttctttacccatgaccgagcctttgaagagctctttggaatctgcatccagctgttgaacaagacctggaaggagatgagggcaacagcagaggacttcaacaaggttatgcaagtcgtccgagagcaaatcactcgagctttgccctccaaacccaactctttggatcagttcaagagcaaattgcgtagcctgagttactctgagattctacgactgcgccagtctgagaggatgagtcaggatgacttccagtccccgccaattgtggagctgagggagaagatccagcccgagatccttgagctgatcaagcagcagcgcctgaaccggctctgtgagggcagcagcttccgaaagattgggaaccgccgaaggcaagaacggttctggtactgccggttggcactgaaccacaaggtccttcactatggtgacttggatgacaacccacaaggggaggtgacatttgaatccctgcaggagaaaattcctgttgcagacattaaggccattgtcactgggaaagattgtccccacatgaaagagaaaagtgctctgaaacagaacaaggaggtgttggaattggccttctccatcctgtatgaccctgatgagaccttaaacttcatcgcacctaataaatatgagtactgcatctggattgatggcctcagtgcccttctggggaaggacatgtccagtgagctgaccaagagtgacctggacaccctgctgagcatggagatgaagctgcggctcctggacctggagaacatccagattcccgaagccccaccccccatccccaaggagcccagcagctatgactttgtctatcactatggctgagcctggagccagaaacgacggtacccaggagaagggattttgggcccaggagaaacacttacattctggtgccttgtcttttgcttgtacagaatctgtagtgattttggtggccagtaaatgccagccatttctcaaacccacctcggaccacccagagtttcctcttggtccctgtctactaagagtcatgaaggcagggtgctctgcccactccatcaccatgaagcctgggattgggccacgaggaacaaacagcagatgcccttgccttccagtccaagaaactgcttcttgaaatggatttaacaacagccactcaccttttcctcctgagcctgctctctgatcagctggatccccacgtgagcaacagctggcccaggaaaggctgcctgcagaggacaggtgtgttgggcgtgttgagagccttgaagtgactacctgtatcttagatctgagtacaagcctgaggcttttgcttttgtcttttttgatgagggctcactccagcttcatatggtgccaagacgttgctgcttctgaggttggctctaacatctctggtctttagagccaccagatctctctggcccatacagatatcagagcagacggaaatttctccctgcaagcgctcagtctcatcccagcaagtcaaagacctcctggccaagtcctgccctcttaagtctccaggaacgctgcagggaaaacccagctgaggcctgggcctagactgtggtgaggtcactagattctactgctcttcccccacattaataccttttccttcctcagagagaaatctcccctaacctgaattgcagccccctccagtttgctttcctttggccttccagaccccaggaagttggccttcccttcctagtgctatggtttctgccattggccatgatttcagggagctggctgaggccggctgaggccacacctgtgccagtggggcttccctggtgctgcagcacttgtaaaccacacacacagcctctctccctggacatacgttagcacattggcattcagtattggtggcctggcatggtaggtactacccaatgaagagtgtactatatattttcattactataggccatacttatacagacgtgtatatatatttatataagatctacctatcttaggatggaaccttggggaaaaataaaattgaggggaagtaaaaagtatgtaacacttccagttgtgagccaagattgtaaccagagagcagccaggagcttcctgtcagtaaccatgttttcaataaatactctttcatgtacaaa

SEQ ID NO: 129858 - DNA, 3574 bp, Homo sapiens
  Payload ID: 5405
  Gene Symbol: ELMO2
  Gene Name: engulfment and cell motility 2
  Uniprot ID: Q96JJ3
  ENST ID: ENST00000396391
  CDS Start-End: 107-2269
tcccaagaaggcggggcgggcggaggctggaggagccgccgagcggagacccgggagcaggagctgggcctaggtctgcgccctgaattagagcccattgggaacgatgccaccaccgtcagacattgtcaaagtggccattgagtggccaggtgctaacgcccagctccttgaaatcgaccagaaacggcccctggcatccattatcaaggaagtttgtgatgggtggtcgttgccaaacccagagtattataccctccgttatgcagatggtcctcagctgtacatcaccgaacagactcgcagtgacattaagaatgggacaatcttacaactggctatctccccgtcccgggctgcacgccagctgatggagaggacccagtcatccaacatggagacccggctggatgccatgaaggagctggccaagctctctgccgacgtgactttcgctactgagttcatcaacatggatggcatcattgtgctgacaaggctcgtggaaagtggaaccaagctcttgtcccactacagtgagatgctggcattcaccctgactgccttcctagagctcatggaccatggcattgtctcctgggacatggtttcaatcacctttattaagcagattgcagggtatgtgagccagcccatggtggacgtgtcaatccttcagaggtccctggccatcctggagagcatggtcttgaacagccagagtctgtaccagaagatagccgaggaaatcaccgtgggacagctcatctcacacctccaggtctccaaccaggagattcagacctacgccattgcactgattaatgcactttttctgaaggctcctgaggacaaacgacaggatatggcaaatgcatttgcacagaagcatctccggtctataatcctgaatcatgtgatccgagggaaccgccccatcaaaactgagatggcccatcagctatatgtccttcaagtcctaacctttaaccttctggaagaaaggatgatgaccaagatggaccccaatgaccaggctcaaagggacatcatatttgaactgaggaggattgcatttgacgcagagtctgatcctagcaatgcccctgggagtgggaccgaaaaacgcaaagccatgtacacaaaggactacaaaatgctgggatttaccaaccacatcaatccagccatggactttacccagactcctcctggaatgctggccttggacaacatgctgtacttggctaaagtccaccaggacacctacatccggattgtcttggagaacagtagccgggaagacaaacatgaatgcccctttggccgcagtgccattgagctcaccaaaatgctctgtgaaatcctgcaggttggggaactaccaaatgaaggacgcaatgactaccacccgatgttctttacccatgaccgagcctttgaagagctctttggaatctgcatccagctgttgaacaagacctggaaggagatgagggcaacagcagaggacttcaacaaggttatgcaagtcgtccgagagcaaatcactcgagctttgccctccaaacccaactctttggatcagttcaagagcaaattgcgtagcctgagttactctgagattctacgactgcgccagtctgagaggatgagtcaggatgacttccagtccccgccaattgtggagctgagggagaagatccagcccgagatccttgagctgatcaagcagcagcgcctgaaccggctctgtgagggcagcagcttccgaaagattgggaaccgccgaaggcaagaacggttctggtactgccggttggcactgaaccacaaggtccttcactatggtgacttggatgacaacccacaaggggaggtgacatttgaatccctgcaggagaaaattcctgttgcagacattaaggccattgtcactgggaaagattgtccccacatgaaagagaaaagtgctctgaaacagaacaaggaggtgttggaattggccttctccatcctgtatgaccctgatgagaccttaaacttcatcgcacctaataaatatgagtactgcatctggattgatggcctcagtgcccttctggggaaggacatgtccagtgagctgaccaagagtgacctggacaccctgctgagcatggagatgaagctgcggctcctggacctggagaacatccagattcccgaagccccaccccccatccccaaggagcccagcagctatgactttgtctatcactatggctgagcctggagccagaaacgacggtacccaggagaagggattttgggcccaggagaaacacttacattctggtgccttgtcttttgcttgtacagaatctgtagtgattttggtggccagtaaatgccagccatttctcaaacccacctcggaccacccagagtttcctcttggtccctgtctactaagagtcatgaaggcagggtgctctgcccactccatcaccatgaagcctgggattgggccacgaggaacaaacagcagatgcccttgccttccagtccaagaaactgcttcttgaaatggatttaacaacagccactcaccttttcctcctgagcctgctctctgatcagctggatccccacgtgagcaacagctggcccaggaaaggctgcctgcagaggacaggtgtgttgggcgtgttgagagccttgaagtgactacctgtatcttagatctgagtacaagcctgaggcttttgcttttgtcttttttgatgagggctcactccagcttcatatggtgccaagacgttgctgcttctgaggttggctctaacatctctggtctttagagccaccagatctctctggcccatacagatatcagagcagacggaaatttctccctgcaagcgctcagtctcatcccagcaagtcaaagacctcctggccaagtcctgccctcttaagtctccaggaacgctgcagggaaaacccagctgaggcctgggcctagactgtggtgaggtcactagattctactgctcttcccccacattaataccttttccttcctcagagagaaatctcccctaacctgaattgcagccccctccagtttgctttcctttggccttccagaccccaggaagttggccttcccttcctagtgctatggtttctgccattggccatgatttcagggagctggctgaggccggctgaggccacacctgtgccagtggggcttccctggtgctgcagcacttgtaaaccacacacacagcctctctccctggacatacgttagcacattggcattcagtattggtggcctggcatggtaggtactacccaatgaagagtgtactatatattttcattactataggccatacttatacagacgtgtatatatatttatataagatctacctatcttaggatggaaccttggggaaaaataaaattgaggggaagtaaaaagtatgtaacacttccagttgtgagccaagattgtaaccagagagcagccaggagcttcctgtcagtaaccatgttttcaataaatactctttcatgt

SEQ ID NO: 129859 - DNA, 1344 bp, Homo sapiens
  Payload ID: 5405
  Gene Symbol: ELMO2
  Gene Name: engulfment and cell motility 2
  ENST ID: ENST00000425546
  CDS Start-End: 1-804
gaggaaatcaccgtgggacagctcatctcacacctccaggtctccaaccaggagattcagacctacgccattgcactgattaatgcactttttctgaaggctcctgaggacaaacgacaggatatggcaaatgcatttgcacagaagcatctccggtctataatcctgaatcatgtgatccgagggaaccgccccatcaaaactgagatggcccatcagctatatgtccttcaagtcctaacctttaaccttctggaagaaaggatgatgaccaagatggaccccaatgaccaggctcaaagggacatcatatttgaactgaggaggattgcatttgacgcagagtctgatcctagcaatgcccctgggagtgggaccgaaaaacgcaaagccatgtacacaaaggactacaaaatgctgggatttaccaaccacatcaatccagccatggactttacccagactcctcctggaatgctggccttggacaacatgctgtacttggctaaagtccaccaggacacctacatccggattgtcttggagaacagtagccgggaagacaaacatgaatgcccctttggccgcagtgccattgagctcaccaaaatgctctgtgaaatcctgcaggttggggaactaccaaatgaaggacgcaatgactaccacccgatgttctttacccatgaccgagcctttgaagagctctttggaatctgcatccagctgttgaacaagacctggaaggagatgagggcaacagcagaggacttcaacaaggtcagtgtctccgggctgctctgaggcccacgggaggagaccatcacacgacagcctttgacagctggctggcacctggagaatccctgagctggaaaagcagcttggtctgcagaactgagtcacaagactgaggcactggggagcctcagccccatctggttgttgctccctctgtgaccttgagcttgtcttccacttggtgccgtaggccctcatttgtccattgaagttagcacctgtccctcccgtcctccagagaggtcaggaggataagcattagaagactcactgtggtttattgagtgcttactgtgcaggtactgctgtagttttgtgaactgggaaggttaggagagaagagtggactggcatgatgtgcacaccctgggtacttaatcgatagttatccctcggtgctttcagtcctcactctatgcagagcactgttgtgccaggccctcaaaagctgatcatctaggggtcgagtgttttgaagttgatcatctcatcataaaaaatttggaaagtataaagaataaaaagttacctgtatttacacca

SEQ ID NO: 129860 - DNA, 2158 bp, Homo sapiens
  Payload ID: 5405
  Gene Symbol: ELMO2
  Gene Name: engulfment and cell motility 2
  ENST ID: ENST00000452857
  CDS Start-End: 1-852
taccacccgatgttctttacccatgaccgagcctttgaagagctctttggaatctgcatccagctgttgaacaagacctggaaggagatgagggcaacagcagaggacttcaacaaggttatgcaagtcgtccgagagcaaatcactcgagctttgccctccaaacccaactctttggatcagttcaagagcaaattgcgtagcctgagttactctgagattctacgactgcgccagtctgagaggatgagtcaggatgacttccagtccccgccaattgtggagctgagggagaagatccagcccgagatccttgagctgatcaagcagcagcgcctgaaccggctctgtgagggcagcagcttccgaaagattgggaaccgccgaaggcaagaacggttctggtactgccggttggcactgaaccacaaggtccttcactatggtgacttggatgacaacccacaaggggaggtgacatttgaatccctgcaggagaaaaacattaaggccattgtcactgggaaagattgtccccacatgaaagagaaaagtgctctgaaacagaacaaggaggtgttggaattggccttctccatcctgtatgaccctgatgagaccttaaacttcatcgcacctaataaatatgagtactgcatctggattgatggcctcagtgcccttctggggaaggacatgtccagtgagctgaccaagagtgacctggacaccctgctgagcatggagatgaagctgcggctcctggacctggagaacatccagattcccgaagccccaccccccatccccaaggagcccagcagctatgactttgtctatcactatggctgagcctggagccagaaacgacggtacccaggagaagggattttgggcccaggagaaacacttacattctggtgccttgtcttttgcttgtacagaatctgtagtgattttggtggccagtaaatgccagccatttctcaaacccacctcggaccacccagagtttcctcttggtccctgtctactaagagtcatgaaggcagggtgctctgcccactccatcaccatgaagcctgggattgggccacgaggaacaaacagcagatgcccttgccttccagtccaagaaactgcttcttgaaatggatttaacaacagccactcaccttttcctcctgagcctgctctctgatcagctggatccccacgtgagcaacagctggcccaggaaaggctgcctgcagaggacaggtgtgttgggcgtgttgagagccttgaagtgactacctgtatcttagatctgagtacaagcctgaggcttttgcttttgtcttttttgatgagggctcactccagcttcatatggtgccaagacgttgctgcttctgaggttggctctaacatctctggtctttagagccaccagatctctctggcccatacagatatcagagcagacggaaatttctccctgcaagcgctcagtctcatcccagcaagtcaaagacctcctggccaagtcctgccctcttaagtctccaggaacgctgcagggaaaacccagctgaggcctgggcctagactgtggtgaggtcactagattctactgctcttcccccacattaataccttttccttcctcagagagaaatctcccctaacctgaattgcagccccctccagtttgctttcctttggccttccagaccccaggaagttggccttcccttcctagtgctatggtttctgccattggccatgatttcagggagctggctgaggccggctgaggccacacctgtgccagtggggcttccctggtgctgcagcacttgtaaaccacacacacagcctctctccctggacatacgttagcacattggcattcagtattggtggcctggcatggtaggtactacccaatgaagagtgtactatatattttcattactataggccatacttatacagacgtgtatatatatttatataagatctacctatcttaggatggaaccttggggaaaaataaaattgaggggaagtaaaaagtatgtaacacttccagttgtgagccaagattgtaaccagagagcagccaggagcttcctgtcagtaaccatgttttcaataaatactctttcatgta

SEQ ID NO: 129861 - DNA, 1168 bp, Homo sapiens
  Payload ID: 5405
  Gene Symbol: ELMO2
  Gene Name: engulfment and cell motility 2
  ENST ID: ENST00000450812
  CDS Start-End: 154-1168
ggaggagccgccgagcggagacccgggagcaggagctgggcctaggtctgcgccctggagggaggtgtagaaagaggtacatggagaacaagtttgtcaatccgtctgaacttcagttgccttacctgtaagaattagagcccattgggaacgatgccaccaccgtcagacattgtcaaagtggccattgagtggccaggtgctaacgcccagctccttgaaatcgaccagaaacggcccctggcatccattatcaaggaagtttgtgatgggtggtcgttgccaaacccagagtattataccctccgttatgcagatggtcctcagctgtacatcaccgaacagactcgcagtgacattaagaatgggacaatcttacaactggctatctccccgtcccgggctgcacgccagctgatggagaggacccagtcatccaacatggagacccggctggatgccatgaaggagctggccaagctctctgccgacgtgactttcgctactgagttcatcaacatggatggcatcattgtgctgacaaggctcgtggaaagtggaaccaagctcttgtcccactacagtgagatgctggcattcaccctgactgccttcctagagctcatggaccatggcattgtctcctgggacatggtttcaatcacctttattaagcagattgcagggtatgtgagccagcccatggtggacgtgtcaatccttcagaggtccctggccatcctggagagcatggtcttgaacagccagagtctgtaccagaagatagccgaggaaatcaccgtgggacagctcatctcacacctccaggtctccaaccaggagattcagacctacgccattgcactgattaatgcactttttctgaaggctcctgaggacaaacgacaggatatggcaaatgcatttgcacagaagcatctccggtctataatcctgaatcatgtgatccgagggaaccgccccatcaaaactgagatggcccatcagctatatgtccttcaagtcctaacctttaaccttctggaagaaaggatgatgaccaagatggaccccaatgaccaggctcaaagggacatcatatttgaactgaggaggattgcatttgacgcagagtctgatcctagcaatgcccctgggagtgggaccg

SEQ ID NO: 129862 - DNA, 4121 bp, Homo sapiens
  Payload ID: 5405
  Gene Symbol: ELMO2
  Gene Name: engulfment and cell motility 2
  ENST ID: ENST00000467800
  CDS Start-End: 1-1325
gccccatcaaaactgagatggcccatcagctatatgtccttcaagtcctaacctttaaccttctggaagaaaggatgatgaccaagatggaccccaatgaccaggctcaaagggacatcatatttgaactgaggaggattgcatttgacgcagagtctgatcctagcaatgcccctgggagtgggaccgaaaaacgcaaagccatgtacacaaaggactacaaaatgctgggatttaccaaccacatcaatccagccatggactttacccagactcctcctggaatgctggccttggacaacatgctgtacttggctaaagtccaccaggacacctacatccggattgtcttggagaacagtagccgggaagacaaacatgaatgcccctttggccgcagtgccattgagctcaccaaaatgctctgtgaaatcctgcaggttggggaactaccaaatgaaggacgcaatgactaccacccgatgttctttacccatgaccgagcctttgaagagctctttggaatctgcatccagctgttgaacaagacctggaaggagatgagggcaacagcagaggacttcaacaaggttatgcaagtcgtccgagagcaaatcactcgagctttgccctccaaacccaactctttggatcagttcaagagcaaattgcgtagcctgagttactctgagattctacgactgcgccagtctgagaggatgagtcaggatgacttccagtccccgccaattgtggagctgagggagaagatccagcccgagatccttgagctgatcaagcagcagcgcctgaaccggctctgtgagggcagcagcttccgaaagattgggaaccgccgaaggcaagaacggttctggtactgccggttggcactgaaccacaaggtccttcactatggtgacttggatgacaacccacaaggggaggtgacatttgaatccctgcaggagaaaattcctgttgcagacattaaggccattgtcactgggaaagattgtccccacatgaaagagaaaagtgctctgaaacagaacaaggtgagtagagaggccagtttgagtagctggcccagtgatacttggagagtgccattggtggtggttttttccaggtgcattcttggcatcttcccctctctattcctgaatgttttattaagaattttgaacatacacaaaaatagatggaacctctgtatacacatcacccagactcagcaaccatggccagttctgcccatccacttgtttctctcctttatcgctttgaagaaagtcccaagtatcacactgtttcatctgtaaatatttagtgtacatcgtatagtgtataacattgccaccagtccattagcacacataacaggaaatgaaagtagttatttcagatcaaatattccactgatggtgactttctaccaattgtcttataaatgtcataatttctctacagatatataaatgtttatatggatacacacacacacacacacacacacacacacacacacacacacacccccatacccatcttgtctaaaccagagtctaagactggtcttttaagtttcttaattcataagttcccccgcccccccatcccccaccatcttttcctttgcagtttattagctgaagaaccagattgcttgtttggtagtttcctagcatctgaattttgctgattgtttccccgtggtacagtttaacttgttcctctgtcccagatctgtacattggaagagggatctagaggtttgatccagttcaggtttaacttttttcctggccagtgtcatcagtggtattatgttctatcaagaggcacataacgtctggtggtctctccttttgtgataattagcagactgttgaagctcagtgcctcattccatcagtcaactaaggtttgcaaactcatgatattttgatgcagtcattgcttttcatttatgagctgaaccatgaaacttgcccttatctactattggtttcccagtggtacagtttatataggaaacgagaataaatgctgattcttcttttatgtacttactttcaaaataatgagttagttccttggtatcatgcaacagtgaccaattttgtgtgtgtgtgtgttttgttttgttttttaattgttaagacattcctatgccaaatacagcacgatagaagttgttagtcatcttggtaatataaaaacttttaggataacttacagtcatggatcgtgaccttccagggttctgagtgttgaaaatgacttttttccaatcttaaaaatatcacaacatctttgatgtgacttgggcagggagtgggtaagttaaggttgatttatgctgggcctcatctccagccacacttgtggccgcctaggagcattgatgacattcatctgaatcagcatgtttggtgatgatgccgagtcactaggactttggccaagatcttgatgtgcagaccccaggctgttccatcgctctaatttaaaccctttctccttcaggaggtgttggaattggccttctccatcctgtatgaccctgatgagaccttaaacttcatcgcacctaataaatatgagtactgcatctggattgatggcctcagtgcccttctggggaaggacatgtccagtgagctgaccaagagtgacctggacaccctgctgagcatggagatgaagctgcggctcctggacctggagaacatccagattcccgaagccccaccccccatccccaaggagcccagcagctatgactttgtctatcactatggctgagcctggagccagaaacgacggtacccaggagaagggattttgggcccaggagaaacacttacattctggtgccttgtcttttgcttgtacagaatctgtagtgattttggtggccagtaaatgccagccatttctcaaacccacctcggaccacccagagtttcctcttggtccctgtctactaagagtcatgaaggcagggtgctctgcccactccatcaccatgaagcctgggattgggccacgaggaacaaacagcagatgcccttgccttccagtccaagaaactgcttcttgaaatggatttaacaacagccactcaccttttcctcctgagcctgctctctgatcagctggatccccacgtgagcaacagctggcccaggaaaggctgcctgcagaggacaggtgtgttgggcgtgttgagagccttgaagtgactacctgtatcttagatctgagtacaagcctgaggcttttgcttttgtcttttttgatgagggctcactccagcttcatatggtgccaagacgttgctgcttctgaggttggctctaacatctctggtctttagagccaccagatctctctggcccatacagatatcagagcagacggaaatttctccctgcaagcgctcagtctcatcccagcaagtcaaagacctcctggccaagtcctgccctcttaagtctccaggaacgctgcagggaaaacccagctgaggcctgggcctagactgtggtgaggtcactagattctactgctcttcccccacattaataccttttccttcctcagagagaaatctcccctaacctgaattgcagccccctccagtttgctttcctttggccttccagaccccaggaagttggccttcccttcctagtgctatggtttctgccattggccatgatttcagggagctggctgaggccggctgaggccacacctgtgccagtggggcttccctggtgctgcagcacttgtaaaccacacacacagcctctctccctggacatacgttagcacattggcattcagtattggtggcctggcatggtaggtactacccaatgaagagtgtactatatattttcattactataggccatacttatacagacgtgtatatatatttatataagatctacctatcttaggatggaaccttggggaaaaataaaattgaggggaagtaaaaagtatgtaacacttccagttgtgagccaagattgtaaccagagagcagccaggagcttcctgtcagtaaccatgttttcaataaatactctttcatgtacaaa

SEQ ID NO: 129863 - DNA, 2480 bp, Homo sapiens
  Payload ID: 5406
  Gene Symbol: ELMO3
  Gene Name: engulfment and cell motility 3
  ENST ID: ENST00000360833
  CDS Start-End: 58-2328
ctacccccagactccaacccggaactaacctcggctcccttgggaaggccgcgttgcatggccaggagcagcagtctgggccgcgagtgcgggacaccgaggtcaggtctcggaaagggaggacctcctcgtccccaggggccccaggccaggtgcacccttggccgcaggtgcacggtctccggaaagtgcaggcgcccacgtcccagctggaccatggcgcctccgcggaacgtggtgaagattgccatcaagatgcgtgacgccatcccgcagctcatccagctggaccaggcgaagcccctggccgctgtgctgaaggaggtgtgcgacgcgtggagcctgacgcactctgagcgttacgccctgcagtttgcggatgggcaccggagatacatcaccgagaatgaccttgaggctgagcagctcttgggtgggctgcagagtaacagtcctgaagggcgccgggaagccctgaggcgccttgttccgctggcctcggacatgatctttgccagggaggtcatcagccgtaatgggctccagatactaggcaccatcattgaagatggggacgacctaggagaggtgctggccctcagcctgagggccttctcagagctcatggagcacggcgtggtgtcctgggagactctgagcatcccctttgtgaggaaggtggtgtgctacgtgaacatgaacctcatggatgcctccgtgcctcccctggcccttgggctgctggagagtgtgaccttgagcagcccagccctgggccagctggtcaagagcgaggtgcccctggataggctgctggtgcacctacaggtgatgaaccagcagctgcaaaccaaggccatggccctgctgacagccttgctgcagggggccagccctgtggaacgcaagcacatgcttgactatctttggcagaggaaccttcgccagttcatctataagaacatcatccacagtgcagcaccaatgggcgacgagatggctcatcacctgtacgtactgcaggctctcatgctggggctgctggagccgcgcatgcggacgcccctggacccctacagccaggagcagcgggagcagctgcaggtcctacgccaggctgccttcgaggtggagggggagtcctcgggtgccgggctaagtgctgaccgtcgccgttccctctgtgcccgagagttccgcaaactgggcttttctaacagcaacccagcacaggacctggagcgcgtgccccccggtctgctggccctggacaacatgttgtacttctccagaaacgcgcccagcgcgtacagccggtttgtgttggagaacagcagccgcgaggacaagcacgagtgcccctttgcccggggcagcatccagctgacggtgctgctgtgtgagctgctccgtgttggggagccctgctctgagacagcccaggacttctcacccatgttcttcggccaagaccagagcttccacgagctcttctgtgtgggcatccagctgttgaataagacctggaaggagatgcgggctacacaggaggacttcgacaaggtcatgcaggtggtgcgggagcagctggcccgcactctggccctgaagcccacttccctggagctcttccgaaccaaggtgaatgcgctcacttatggggaggtgctgcggctgcggcagactgaacggctgcaccaggagggcacactggctccccctatactggagctgcgggagaagctgaagccagagctcatgggcctgatccgccagcagcgcttgctccgcctctgtgaggggacgctcttccgcaagatcagcagccggcggcgccaggataagctgtggttctgctgcctgtcccccaaccacaagctgctgcagtacggagacatggaggagggcgccagcccgcctaccctggagagtctgcccgagcaactccctgtggccgacatgagggcactcctgacaggcaaggactgcccccatgtccgggagaagggctccgggaagcagaacaaggacctctatgagttggccttctcaatcagctatgaccgtggggaggaggaagcgtacctcaacttcattgccccctccaagcgggagttctacctgtggacagatgggctcagtgccttgctgggcagtcccatgggcagcgagcagacacggctggacctggagcagctgctgaccatggagaccaagctgcgtctgctggagctggagaacgtgcccatccccgagcggccaccccctgtgcccccaccccccaccaacttcaacttctgctatgactgcagcatcgctgaaccttgacagtgtggctggccatgggccacagctgcggccactgcagcagccatgaagggcagtgggtagaggagtgcaggcaccctgaccagcagagattgctgcagaaataaagtctgcttggctcttgggatatgttgagccagctctgtaccttg

SEQ ID NO: 129864 - DNA, 2531 bp, Homo sapiens
  Payload ID: 5406
  Gene Symbol: ELMO3
  Gene Name: engulfment and cell motility 3
  Uniprot ID: Q96BJ8
  ENST ID: ENST00000393997
  CDS Start-End: 58-2379
ctacccccagactccaacccggaactaacctcggctcccttgggaaggccgcgttgcatggccaggagcagcagtctgggccgcgagtgcgggacaccgaggtcaggtctcggaaagggaggacctcctcgtccccaggggccccaggccaggtgcacccttggccgcaggtgcacggtctccggaaagtgcaggcgcccacgtcccagctggaccatggcgcctccgcggaacgtggtgaagattgccatcaagatgcgtgacgccatcccgcagctcatccagctggaccaggcgaagcccctggccgctgtgctgaaggaggtgtgcgacgcgtggagcctgacgcactctgagcgttacgccctgcagtttgcggatgggcaccggagatacatcaccgagaataaccgcgcggagatcaagaatggcagcatcctgtgcctcagcacggccccagaccttgaggctgagcagctcttgggtgggctgcagagtaacagtcctgaagggcgccgggaagccctgaggcgccttgttccgctggcctcggacatgatctttgccagggaggtcatcagccgtaatgggctccagatactaggcaccatcattgaagatggggacgacctaggagaggtgctggccctcagcctgagggccttctcagagctcatggagcacggcgtggtgtcctgggagactctgagcatcccctttgtgaggaaggtggtgtgctacgtgaacatgaacctcatggatgcctccgtgcctcccctggcccttgggctgctggagagtgtgaccttgagcagcccagccctgggccagctggtcaagagcgaggtgcccctggataggctgctggtgcacctacaggtgatgaaccagcagctgcaaaccaaggccatggccctgctgacagccttgctgcagggggccagccctgtggaacgcaagcacatgcttgactatctttggcagaggaaccttcgccagttcatctataagaacatcatccacagtgcagcaccaatgggcgacgagatggctcatcacctgtacgtactgcaggctctcatgctggggctgctggagccgcgcatgcggacgcccctggacccctacagccaggagcagcgggagcagctgcaggtcctacgccaggctgccttcgaggtggagggggagtcctcgggtgccgggctaagtgctgaccgtcgccgttccctctgtgcccgagagttccgcaaactgggcttttctaacagcaacccagcacaggacctggagcgcgtgccccccggtctgctggccctggacaacatgttgtacttctccagaaacgcgcccagcgcgtacagccggtttgtgttggagaacagcagccgcgaggacaagcacgagtgcccctttgcccggggcagcatccagctgacggtgctgctgtgtgagctgctccgtgttggggagccctgctctgagacagcccaggacttctcacccatgttcttcggccaagaccagagcttccacgagctcttctgtgtgggcatccagctgttgaataagacctggaaggagatgcgggctacacaggaggacttcgacaaggtcatgcaggtggtgcgggagcagctggcccgcactctggccctgaagcccacttccctggagctcttccgaaccaaggtgaatgcgctcacttatggggaggtgctgcggctgcggcagactgaacggctgcaccaggagggcacactggctccccctatactggagctgcgggagaagctgaagccagagctcatgggcctgatccgccagcagcgcttgctccgcctctgtgaggggacgctcttccgcaagatcagcagccggcggcgccaggataagctgtggttctgctgcctgtcccccaaccacaagctgctgcagtacggagacatggaggagggcgccagcccgcctaccctggagagtctgcccgagcaactccctgtggccgacatgagggcactcctgacaggcaaggactgcccccatgtccgggagaagggctccgggaagcagaacaaggacctctatgagttggccttctcaatcagctatgaccgtggggaggaggaagcgtacctcaacttcattgccccctccaagcgggagttctacctgtggacagatgggctcagtgccttgctgggcagtcccatgggcagcgagcagacacggctggacctggagcagctgctgaccatggagaccaagctgcgtctgctggagctggagaacgtgcccatccccgagcggccaccccctgtgcccccaccccccaccaacttcaacttctgctatgactgcagcatcgctgaaccttgacagtgtggctggccatgggccacagctgcggccactgcagcagccatgaagggcagtgggtagaggagtgcaggcaccctgaccagcagagattgctgcagaaataaagtctgcttggctcttgggatatgttgagccagctctgtaccttg

SEQ ID NO: 129865 - DNA, 2281 bp, Homo sapiens
  Payload ID: 5406
  Gene Symbol: ELMO3
  Gene Name: engulfment and cell motility 3
  Uniprot ID: Q96BJ8
  ENST ID: ENST00000477898
  CDS Start-End: 306-2129
atccctccctgcccaggccgcgagaatgaccactccacttgcaggcgaagcccctggccgctgtgctgaaggaggtgtgcgacgcgtggagcctgacgcactctgagcgttacgccctgcagtttgcggatgggcaccggagatacatcaccgagaataaccgcgcggagatcaagaatggcagcatcctgtgcctcagcacggccccagaccttgaggctgagcagctcttgggtgggctgcagagtaacagtcctgaagggcgccgggaagccctgaggcgccttgttccgctggcctcggacatgatctttgccagggaggtcatcagccgtaatgggctccagatactaggcaccatcattgaagatggggacgacctaggagaggtgctggccctcagcctgagggccttctcagagctcatggagcacggcgtggtgtcctgggagactctgagcatcccctttgtgaggaaggtggtgtgctacgtgaacatgaacctcatggatgcctccgtgcctcccctggcccttgggctgctggagagtgtgaccttgagcagcccagccctgggccagctggtcaagagcgaggtgcccctggataggctgctggtgcacctacaggtgatgaaccagcagctgcaaaccaaggccatggccctgctgacagccttgctgcagggggccagccctgtggaacgcaagcacatgcttgactatctttggcagaggaaccttcgccagttcatctataagaacatcatccacagtgcagcaccaatgggcgacgagatggctcatcacctgtacgtactgcaggctctcatgctggggctgctggagccgcgcatgcggacgcccctggacccctacagccaggagcagcgggagcagctgcaggtcctacgccaggctgccttcgaggtggagggggagtcctcgggtgccgggctaagtgctgaccgtcgccgttccctctgtgcccgagagttccgcaaactgggcttttctaacagcaacccagcacaggacctggagcgcgtgccccccggtctgctggccctggacaacatgttgtacttctccagaaacgcgcccagcgcgtacagccggtttgtgttggagaacagcagccgcgaggacaagcacgagtgcccctttgcccggggcagcatccagctgacggtgctgctgtgtgagctgctccgtgttggggagccctgctctgagacagcccaggacttctcacccatgttcttcggccaagaccagagcttccacgagctcttctgtgtgggcatccagctgttgaataagacctggaaggagatgcgggctacacaggaggacttcgacaaggtcatgcaggtggtgcgggagcagctggcccgcactctggccctgaagcccacttccctggagctcttccgaaccaaggtgaatgcgctcacttatggggaggtgctgcggctgcggcagactgaacggctgcaccaggagggcacactggctccccctatactggagctgcgggagaagctgaagccagagctcatgggcctgatccgccagcagcgcttgctccgcctctgtgaggggacgctcttccgcaagatcagcagccggcggcgccaggataagctgtggttctgctgcctgtcccccaaccacaagctgctgcagtacggagacatggaggagggcgccagcccgcctaccctggagagtctgcccgagcaactccctgtggccgacatgagggcactcctgacaggcaaggactgcccccatgtccgggagaagggctccgggaagcagaacaaggacctctatgagttggccttctcaatcagctatgaccgtggggaggaggaagcgtacctcaacttcattgccccctccaagcgggagttctacctgtggacagatgggctcagtgccttgctgggcagtcccatgggcagcgagcagacacggctggacctggagcagctgctgaccatggagaccaagctgcgtctgctggagctggagaacgtgcccatccccgagcggccaccccctgtgcccccaccccccaccaacttcaacttctgctatgactgcagcatcgctgaaccttgacagtgtggctggccatgggccacagctgcggccactgcagcagccatgaagggcagtgggtagaggagtgcaggcaccctgaccagcagagattgctgcagaaataaagtctgcttggctcttgggatatgttgagccagctctgtaccttg

SEQ ID NO: 129866 - DNA, 780 bp, Homo sapiens
  Payload ID: 5406
  Gene Symbol: ELMO3
  Gene Name: engulfment and cell motility 3
  ENST ID: ENST00000571587
  CDS Start-End: 3-290
gcatggccaggagcagcagtctgggccgcgagtgcgggacaccgaggtcaggtctcggaaagggaggacctcctcgtccccaggggccccaggccaggtgcacccttggccgcaggtgcacggtctccggaaagtgcaggcgcccacgtcccagctggaccatggcgcctccgcggaacgtggtgaagattgccatcaagatgcgtgacgccatcccgcagctcatccagctggaccaggcgaagcccctggccgctgtgctgaaggaggtggagcctgacgcactctgagcgttacgccctgcagtttgcggatgggcaccggagatacatcaccgagaataaccgcgcggagatcaagaatggcagcatcctgtgcctcagcacggccccacctaggagaggtgctggccctcagcctgagggccttctcagagctcatggagcacggcgtggtgtcctgggagactctgagcatcccctttgtgaggaaggtggtgtgctacgtgaacatgaacctcatggatgcctccgtgcctcccctggcccttgggctgctggagagtgtgaccttgagcagcccagccctgggccagctggtcaagagcgaggtgcccctggataggctgctggtgcacctacaggtgatgaaccagcagctgcaaaccaaggccatggccctgctgacagccttgctgcagggggccagccctgtggaacgcaagaggaaccttcgccagttcatctataagaacatcatccacagtgcagcaccaatggg

SEQ ID NO: 129867 - DNA, 3763 bp, Homo sapiens
  Payload ID: 5407
  Gene Symbol: EDC3
  Gene Name: enhancer of mRNA decapping 3
  Uniprot ID: Q96F86
  ENST ID: ENST00000315127
  CDS Start-End: 183-1709
acggtggtggcgtggagacgtgggggcgcttccggcagcggcggcggtggtgaaggccgatgctgtgggggtgggcgtggagagaattcttctgtgggtcctctggtgttgagtggtcggcttggtgtggtgtgcggaggagctccaggcccgtcggcgcggagtggtctcacgtgtgaaacatggctacagattggctgggaagtattgtgtccatcaattgtggagatagcttgggtgtctatcagggaagagtgtcagctgtggatcaggtcagccagaccatttctctcacccggcctttccataatggagtgaagtgtcttgttccagaagtcaccttcagggcaggtgacattacggagttaaaaattctggagataccaggacctggagacaaccaacattttggagaccttcatcaaacagaattaggcccctctggtgctggctgccaagtgggcatcaatcagaatggcacaggcaagtttgtcaagaagccagcctcttccagcagtgcccctcagaatatccctaagaggacagatgtgaagagccaggatgttgccgtttccccgcagcagcaacagtgctcaaagagctatgtcgacaggcacatggaatccttgagtcagtccaaaagtttccgtcgtcggcacaactcctggtcatctagtagcaggcacccaaatcaggcaactcccaagaaaagtggtttaaagaatggccagatgaagaataaagatgacgagtgcttcggggatgatattgaggagatcccagacacagattttgattttgaagggaacctggctctttttgacaaggcagctgtgtttgaggagattgatacctatgaaaggagaagtggtacccgttcccggggcatcccaaatgaaaggcccactcggtaccgccatgatgagaacatcttggagtccgagcccattgtctatcgacggatcatagtgccccacaacgtgagcaaggagttctgcacggactctggcctggttgtcccaagtatttcctatgagctgcataaaaagctgttgtccgtggctgagaagcatgggctgacccttgagcggagactggagatgacaggtgtgtgtgccagtcagatggcactgaccctcctcggaggacctaacaggttgaatcccaaaaatgttcaccagaggcctacagtggctctactgtgtggacctcatgtgaagggggctcagggtatcagctgtggaaggcacctagccaaccatgatgtccaggtcatccttttcctgcccaattttgtcaagatgttggaatctatcaccaatgagctgtcgctcttcagcaagacccaaggccaacaagtgtctagcctcaaagatctgcccactagccctgtggacctggtcatcaactgcctggattgccctgagaacgtcttcctgcgcgatcaaccctggtacaaggcagctgtggcctgggccaaccagaaccgggcaccagtactcagcatagaccctcctgtgcatgaagtcgaacagggcattgatgccaaatggtcactggcactgggcctgcctctgccactgggggagcacgcaggccgtatctatttgtgcgacattggcattccccagcaggtcttccaggaggtgggcatcaactaccactcgccctttggctgcaagtttgttatcccactgcactctgcttagagggttcctgcgcaggcaggactctgctgtcccctgctgctcctgataacaaacgccttaaggatatgaagcttcatggaccttgttaaagttttttctcttttgggtttgtttcttctgtgagagaacagaacttacttaaaactgacctgtcacttgctcttagccagggaagtctttcccactgggttccgggctgggtggcaggctgagcgtgcagcaactccaggcatctctaccctcagccccctgcacggccaggtgggcctttgtttacagccgtaggcagctctcaagactgtgtttcaggtttacagccactgggcctgggcacacacattgaagagtgggccaggtcctgtctgggggcctgtacctgctctatttcagagcttgtggctttgtgtctcccctgctttccccacgcagacagcccttcctctgtagaaccagctgcacggcagctgtccaccagagggcagacctgcactctccattcatgtccagggctgtgacagaccaggccttcccctagccccacaagttgatttggggggttttgacccttactcctgagctgatccaagttttatgctgatttttccaaggatctctccctccttttccctccatcactcagaggtagggaagggggcggcattaggatggtgttactgtattgggattttatgttgttctgtcgtcttcagcacaggtagtataaggttatattactgtagaaccacagtgcccatcttgccagcagtgcccgcccccaccctcaaagctgagcaggttgagcctttgcctagtctggggccagacccctcagatggggatatccctgggggagcctggtgctgaaccagaagaggcttcctggtgcttctgtcctaggccaccactcctccagccctttgcccgcacatacatgccccacctactctttcatcccctctgcccttcccctgaaacggtcctttgcagctgtcatcccagagcaggcagatgggctcccgtgcttgagctccaccccagctcttacatcatctgggctttgaaccttttacatttgtccagtctagatgagtaggcttggggccagcaccctgtctcaaagatggcaaaatgaggctagttctggatgagctagctggtgtgggttccaaccataggaacacactgatgctcaaatcctaaggtgccaagctctaggccctggaggctggtagaacaggatctatgcctggaatcctggcagggattcctgtcaaggacttgtgtttaagcctgcttcagggcttcaggctgcttctgctctgtgtctgcccaggctggctgagcgggtggatgggtggacagaagggctcaccaaggattgtggacatagggtaggccctggtaccacgggtttcaggctgttatcacttcccttgtaggaacatagccagaagcagatgagccagggtagagggctggcccctcctctcatcttcccttcagtcttaaattgtctccagcgatgggaagaggccagggactgtaacccttgtgctgtgtattctctgagcctctgctcactctcagggccaagcagctcccaagccggggccctctcttggccaaaatctgaggagcagtctaggttacaggctttttggtaggtaggttctggctgcctgttaatgcagttaggccccctgattaggtacagtgagaaacaagctagaacaaccctggcccagaagactgtccactccagcaagatccagggatgatagccttgcagggccactgggagtttgtgcccaagcttctccctcttctctccccagggggcactgggactggtccctgccctcatccttagcctgggccttccccagaggtattaaagagaagtatgattcctctgtcttcagttcttttcaggggcatcctgcccatagtacccagttcccaaggggcccccagtcacgtggtgaagcctagcactcatgcagctcttagggaaccaaaaaccagcactgaaataaagctgaatgactgactga

SEQ ID NO: 129868 - DNA, 2093 bp, Homo sapiens
  Payload ID: 5407
  Gene Symbol: EDC3
  Gene Name: enhancer of mRNA decapping 3
  Uniprot ID: Q96F86
  ENST ID: ENST00000426797
  CDS Start-End: 464-1990
gggcgcttccggcagcggcggcggtggtgaaggccgatgctgtgggggtgggcgtggagagaattcttctgtgggtcctctggtgttgagtggtcggcttggtgtggtgtgcggaggagctccaggcccgtcggcgcggaggctttcaggtataggctgggtcactagtcttaaaacatttcttcttgagaatgtctaaaagactgtggaatctgttagatcttatatacttttaagttggcacctgaaacttttcatcctagatttacatagtggtcttgctgtgttgcccagcctggtcttgaattcctggactcaagtgatgctcctgccttggcttcccaaactcctggaattacaactcaatgaatgacggtttttgttgctccacatcctcgtcagcatttggtgttgtcagtgttttggatttcggccattctgacagtggtctcacgtgtgaaacatggctacagattggctgggaagtattgtgtccatcaattgtggagatagcttgggtgtctatcagggaagagtgtcagctgtggatcaggtcagccagaccatttctctcacccggcctttccataatggagtgaagtgtcttgttccagaagtcaccttcagggcaggtgacattacggagttaaaaattctggagataccaggacctggagacaaccaacattttggagaccttcatcaaacagaattaggcccctctggtgctggctgccaagtgggcatcaatcagaatggcacaggcaagtttgtcaagaagccagcctcttccagcagtgcccctcagaatatccctaagaggacagatgtgaagagccaggatgttgccgtttccccgcagcagcaacagtgctcaaagagctatgtcgacaggcacatggaatccttgagtcagtccaaaagtttccgtcgtcggcacaactcctggtcatctagtagcaggcacccaaatcaggcaactcccaagaaaagtggtttaaagaatggccagatgaagaataaagatgacgagtgcttcggggatgatattgaggagatcccagacacagattttgattttgaagggaacctggctctttttgacaaggcagctgtgtttgaggagattgatacctatgaaaggagaagtggtacccgttcccggggcatcccaaatgaaaggcccactcggtaccgccatgatgagaacatcttggagtccgagcccattgtctatcgacggatcatagtgccccacaacgtgagcaaggagttctgcacggactctggcctggttgtcccaagtatttcctatgagctgcataaaaagctgttgtccgtggctgagaagcatgggctgacccttgagcggagactggagatgacaggtgtgtgtgccagtcagatggcactgaccctcctcggaggacctaacaggttgaatcccaaaaatgttcaccagaggcctacagtggctctactgtgtggacctcatgtgaagggggctcagggtatcagctgtggaaggcacctagccaaccatgatgtccaggtcatccttttcctgcccaattttgtcaagatgttggaatctatcaccaatgagctgtcgctcttcagcaagacccaaggccaacaagtgtctagcctcaaagatctgcccactagccctgtggacctggtcatcaactgcctggattgccctgagaacgtcttcctgcgcgatcaaccctggtacaaggcagctgtggcctgggccaaccagaaccgggcaccagtactcagcatagaccctcctgtgcatgaagtcgaacagggcattgatgccaaatggtcactggcactgggcctgcctctgccactgggggagcacgcaggccgtatctatttgtgcgacattggcattccccagcaggtcttccaggaggtgggcatcaactaccactcgccctttggctgcaagtttgttatcccactgcactctgcttagagggttcctgcgcaggcaggactctgctgtcccctgctgctcctgataacaaacgccttaaggatatgaagcttcatggaccttgttaaagttttttctcttt

SEQ ID NO: 129869 - DNA, 588 bp, Homo sapiens
  Payload ID: 5407
  Gene Symbol: EDC3
  Gene Name: enhancer of mRNA decapping 3
  ENST ID: ENST00000563292
  CDS Start-End: 312-588
agtatggggattgtgtggggagtgaggcattagctgcttgggcccttagtccagccttgttggtggctgctgcagttctttggctcactcactctgttcttcgtgcctcagtttccctttgcataatgagatacggtggcagagaagaacgccagtgccacatccatgactgatagcttgaggacggagatgaactggagggtagaaaaagaggatgcctgagaaatttatacctaccaggtcacatcttcgaatcccaggaagttatccctggattcatttctgcctttgattggtctcacgtgtgaaacatggctacagattggctgggaagtattgtgtccatcaattgtggagatagcttgggtgtctatcagggaagagtgtcagctgtggatcaggtcagccagaccatttctctcacccggcctttccataatggagtgaagtgtcttgttccagaagtcaccttcagggcaggtgacattacggagttaaaaattctggagataccaggacctggagacaaccaacattttggagaccttcatcaaacagaattaggcccctctggtgctggctgccaag

SEQ ID NO: 129870 - DNA, 1862 bp, Homo sapiens
  Payload ID: 5407
  Gene Symbol: EDC3
  Gene Name: enhancer of mRNA decapping 3
  ENST ID: ENST00000565602
  CDS Start-End: 169-342
gagacgtgggggcgcttccggcagcggcggcggtggtgaaggccgatgctgtgggggtgggcgtggagagaattcttctgtgggtcctctggtgttgagtggtcggcttggtgtggtgtgcggaggagctccaggcccgtcggcgcggagtggtctcacgtgtgaaacatggctacagattggctgggaagtattgtgtccatcaattgtggagatagcttgggtgtctatcagggaagagtgtcagctgtggatcaggtcagccagaccatttctctcacccggcctttccataatggagtgaagtgtcttgttccagaagtcaccttcagggtcatctagtagcaggcacccaaatcaggcaactcccaagaaaagtggtttaaagaatggccagatgaagaataaagatgacgagtgcttcggggatgatattgaggagatcccagacacagattttgattttgaagggaacctggctctttttgacaaggcagctgtgtttgaggagattgatacctatgaaaggagaagtggtacccgttcccggggcatcccaaatgaaaggcccactcggtaccgccatgatgagaacatcttggagtccgagcccattgtctatcgacggatcatagtgccccacaacgtgagcaaggagttctgcacggactctggcctggttgtcccaagtatttcctatgagctgcataaaaagctgttgtccgtggctgagaagcatgggctgacccttgagcggagactggagatgacaggtgtgtgtgccagtcagatggcactgaccctcctcggaggacctaacaggttgaatcccaaaaatgttcaccagaggcctacagtggctctactgtgtggacctcatgtgaagggggctcagggtatcagctgtggaaggcacctagccaaccatgatgtccaggtcatccttttcctgcccaattttgtcaagatgttggaatctatcaccaatgagctgtcgctcttcagcaagacccaaggccaacaagtgtctagcctcaaagatctgcccactagccctgtggacctggtcatcaactgcctggattgccctgagaacgtcttcctgcgcgatcaaccctggtacaaggcagctgtggcctgggccaaccagaaccgggcaccagtactcagcatagaccctcctgtgcatgaagtcgaacagggcattgatgccaaatggtcactggcactgggcctgcctctgccactgggggagcacgcaggccgtatctatttgtgcgacattggcattccccagcaggtcttccaggaggtgggcatcaactaccactcgccctttggctgcaagtttgttatcccactgcactctgcttagagggttcctgcgcaggcaggactctgctgtcccctgctgctcctgataacaaacgccttaaggatatgaagcttcatggaccttgttaaagttttttctcttttgggtttgtttcttctgtgagagaacagaacttacttaaaactgacctgtcacttgctcttagccagggaagtctttcccactgggttccgggctgggtggcaggctgagcgtgcagcaactccaggcatctctaccctcagccccctgcacggccaggtgggcctttgtttacagccgtaggcagctctcaagactgtgtttcaggtttacagccactgggcctgggcacacacattgaagagtgggccaggtcctgtctgggggcctgtacctgctctatttcagagcttgtggctttgtgtctcccctgctttccccacgcagacagcccttcctctgtagaaccagctgcacggcagctgtccaccagagggcagacctg

SEQ ID NO: 129871 - DNA, 761 bp, Homo sapiens
  Payload ID: 5407
  Gene Symbol: EDC3
  Gene Name: enhancer of mRNA decapping 3
  ENST ID: ENST00000562174
  CDS Start-End: 1-640
ggagattgatacctatgaaaggagaagtggtacccgttcccggggcatcccaaatgaaaggcccactcggtaccgccatgatgagaacatcttggagtccgagcccattgtctatcgacggatcatagtgccccacaacgtgagcaaggagttctgcacggactctggcctggttgtcccaagtatttcctatgagctgcataaaaagctgttgtccgtggctgagaagcatgggctgacccttgagcggagactggagatgacaggtgtgtgtgccagtcagatggcactgaccctcctcggaggacctaacaggttgaatcccaaaaatgttcaccagaggcctacagtggctctactgtgtggacctcatgtgaagggggctcagggtatcagctgtggaaggcacctagccaaccatgatgtccaggtcatccttttcctgcccaattttgtcaagatgttggaatctatcaccaatgagctgtcgctcttcagcaagacccaaggccaacaagtgtctagcctcaaaggtgagcacttaggcagggctgggctgaaggcctcctccctccttagcagtttgatggtctcgtcatgccacccagtggcgacaggtggaaaggcactacgtgtgtaaggatggtgcttcgcctctaaggagtcttagaacagtaatatactacttcccatccccttatgcttctccctctccaactactcacatgaagagctggggacccattggtccattccacaaa

SEQ ID NO: 129872 - DNA, 967 bp, Homo sapiens
  Payload ID: 5407
  Gene Symbol: EDC3
  Gene Name: enhancer of mRNA decapping 3
  ENST ID: ENST00000563009
  CDS Start-End: 209-967
ccgatgctgtgggggtgggcgtggagagaattcttctgtgggtcctctggtgttgagtggtcggcttggtgtggtgtgcggaggagctccaggcccgtcggcgcggagcaatgaatgacggtttttgttgctccacatcctcgtcagcatttggtgttgtcagtgttttggatttcggccattctgacagtggtctcacgtgtgaaacatggctacagattggctgggaagtattgtgtccatcaattgtggagatagcttgggtgtctatcagggaagagtgtcagctgtggatcaggtcagccagaccatttctctcacccggcctttccataatggagtgaagtgtcttgttccagaagtcaccttcagggcaggtgacattacggagttaaaaattctggagataccaggacctggagacaaccaacattttggagaccttcatcaaacagaattaggcccctctggtgctggctgccaagtgggcatcaatcagaatggcacaggcaagtttgtcaagaagccagcctcttccagcagtgcccctcagaatatccctaagaggacagatgtgaagagccaggatgttgccgtttccccgcagcagcaacagtgctcaaagagctatgtcgacaggcacatggaatccttgagtcagtccaaaagtttccgtcgtcggcacaactcctggtcatctagtagcaggcacccaaatcaggcaactcccaagaaaagtggtttaaagaatggccagatgaagaataaagatgacgagtgcttcggggatgatattgaggagatcccagacacagattttgattttgaagggaacctggctctttttgacaaggcagctgtgtttgaggagattgatacctatgaaaggagaagtggtacccgttcccggggcatcccaaatgaaaggcccactcggtaccgccatgatgagaacatcttggagtcc

SEQ ID NO: 129873 - DNA, 1825 bp, Homo sapiens
  Payload ID: 5407
  Gene Symbol: EDC3
  Gene Name: enhancer of mRNA decapping 3
  Uniprot ID: Q96F86
  ENST ID: ENST00000568176
  CDS Start-End: 229-1755
gcggtggtgaaggccgatgctgtgggggtgggcgtggagagaattcttctgtgggtcctctggtgttgagtggtcggcttggtgtggtgtgcggaggagctccaggcccgtcggcgcggagggtcttgctgtgttgcccagcctggtcttgaattcctggactcaagtgatgctcctgccttggcttcccaaactcctggaattacaacttggtctcacgtgtgaaacatggctacagattggctgggaagtattgtgtccatcaattgtggagatagcttgggtgtctatcagggaagagtgtcagctgtggatcaggtcagccagaccatttctctcacccggcctttccataatggagtgaagtgtcttgttccagaagtcaccttcagggcaggtgacattacggagttaaaaattctggagataccaggacctggagacaaccaacattttggagaccttcatcaaacagaattaggcccctctggtgctggctgccaagtgggcatcaatcagaatggcacaggcaagtttgtcaagaagccagcctcttccagcagtgcccctcagaatatccctaagaggacagatgtgaagagccaggatgttgccgtttccccgcagcagcaacagtgctcaaagagctatgtcgacaggcacatggaatccttgagtcagtccaaaagtttccgtcgtcggcacaactcctggtcatctagtagcaggcacccaaatcaggcaactcccaagaaaagtggtttaaagaatggccagatgaagaataaagatgacgagtgcttcggggatgatattgaggagatcccagacacagattttgattttgaagggaacctggctctttttgacaaggcagctgtgtttgaggagattgatacctatgaaaggagaagtggtacccgttcccggggcatcccaaatgaaaggcccactcggtaccgccatgatgagaacatcttggagtccgagcccattgtctatcgacggatcatagtgccccacaacgtgagcaaggagttctgcacggactctggcctggttgtcccaagtatttcctatgagctgcataaaaagctgttgtccgtggctgagaagcatgggctgacccttgagcggagactggagatgacaggtgtgtgtgccagtcagatggcactgaccctcctcggaggacctaacaggttgaatcccaaaaatgttcaccagaggcctacagtggctctactgtgtggacctcatgtgaagggggctcagggtatcagctgtggaaggcacctagccaaccatgatgtccaggtcatccttttcctgcccaattttgtcaagatgttggaatctatcaccaatgagctgtcgctcttcagcaagacccaaggccaacaagtgtctagcctcaaagatctgcccactagccctgtggacctggtcatcaactgcctggattgccctgagaacgtcttcctgcgcgatcaaccctggtacaaggcagctgtggcctgggccaaccagaaccgggcaccagtactcagcatagaccctcctgtgcatgaagtcgaacagggcattgatgccaaatggtcactggcactgggcctgcctctgccactgggggagcacgcaggccgtatctatttgtgcgacattggcattccccagcaggtcttccaggaggtgggcatcaactaccactcgccctttggctgcaagtttgttatcccactgcactctgcttagagggttcctgcgcaggcaggactctgctgtcccctgctgctcctgataacaaacgccttaaggatatgaa

SEQ ID NO: 129874 - DNA, 658 bp, Homo sapiens
  Payload ID: 5407
  Gene Symbol: EDC3
  Gene Name: enhancer of mRNA decapping 3
  ENST ID: ENST00000569561
  CDS Start-End: 126-658
ggggaagcgggtgcttttcatcgagcctgcaagaggggggcccaggcatcgaggctggggagtcgtgggtagagccccgattccagccaagacgccacaggacataatggtctcacgtgtgaaacatggctacagattggctgggaagtattgtgtccatcaattgtggagatagcttgggtgtctatcagggaagagtgtcagctgtggatcaggtcagccagaccatttctctcacccggcctttccataatggagtgaagtgtcttgttccagaagtcaccttcagggcaggtgacattacggagttaaaaattctggagataccaggacctggagacaaccaacattttggagaccttcatcaaacagaattaggcccctctggtgctggctgccaagtgggcatcaatcagaatggcacaggcaagtttgtcaagaagccagcctcttccagcagtgcccctcagaatatccctaagaggacagatgtgaagagccaggatgttgccgtttccccgcagcagcaacagtgctcaaagagctatgtcgacaggcacatggaatccttgagtcagtccaaaagtttccgtcgtcggcacaactcctggtcatctagtagcaggcacccaaatcaggcaactcccaagaaaagtgg

SEQ ID NO: 129875 - DNA, 479 bp, Homo sapiens
  Payload ID: 5407
  Gene Symbol: EDC3
  Gene Name: enhancer of mRNA decapping 3
  ENST ID: ENST00000566119
  CDS Start-End: 386-479
gtgggggcgcttccggcagcggcggcggtggtgaaggccgatgctgtgggggtgggcgtggagagaattcttctgtgggtcctctggtgttgagtggtcggcttggtgtggtgtgcggaggagctccaggcccgtcggcgcggaggctttcaggtataggctgggtcactagtcttaaaacatttcttcttgagaatgtctaaaagactgtggaatctgttagatcttatatacttttaagttggcacctgaaacttttcatcctagatttacatagtggtcttgctgtgttgcccagcctggtcttgaattcctggactcaagtgatgctcctgccttggcttcccaaactcctggaattacaacttggtctcacgtgtgaaacatggctacagattggctgggaagtattgtgtccatcaattgtggagatagcttgggtgtctatcagggaagagtgtcagctgtggatcaggtca

SEQ ID NO: 129876 - DNA, 574 bp, Homo sapiens
  Payload ID: 5407
  Gene Symbol: EDC3
  Gene Name: enhancer of mRNA decapping 3
  ENST ID: ENST00000566828
  CDS Start-End: 204-574
tggtgttgagtggtcggcttggtgtggtgtgcggaggagctccaggcccgtcggcgcggagagatggtgtcttgctttgttgcccaggctggagtgcagtggtgtgatcatagctcactccatccactgactcatgggcccaagctcccttcctgcctcaggctcccaagtagctgagattactgtggtctcacgtgtgaaacatggctacagattggctgggaagtattgtgtccatcaattgtggagatagcttgggtgtctatcagggaagagtgtcagctgtggatcaggtcagccagaccatttctctcacccggcctttccataatggagtgaagtgtcttgttccagaagtcaccttcagggcaggtgacattacggagttaaaaattctggagataccaggacctggagacaaccaacattttggagaccttcatcaaacagaattaggcccctctggtgctggctgccaagtgggcatcaatcagaatggcacaggcaagtttgtcaagaagccagcctcttccagcagtgcccctcagaatatccctaagaggacagatgtgaa

SEQ ID NO: 129877 - DNA, 688 bp, Homo sapiens
  Payload ID: 5407
  Gene Symbol: EDC3
  Gene Name: enhancer of mRNA decapping 3
  ENST ID: ENST00000566219
  CDS Start-End: 199-688
ccggcagcggcggcggtggtgaaggccgatgctgtgggggtgggcgtggagagaattcttctgtgggtcctctggtgttgagtggtcggcttggtgtggtgtgcggaggagctccaggcccgtcggcgcggagggtcatctagtagcaggcacccaaatcaggcaactcccaagaaaagtggtttaaagaatggccagatgaagaataaagatgacgagtgcttcggggatgatattgaggagatcccagacacagattttgattttgaagggaacctggctctttttgacaaggcagctgtgtttgaggagattgatacctatgaaaggagaagtggtacccgttcccggggcatcccaaatgaaaggcccactcggtaccgccatgatgagaacatcttggagtccgagcccattgtctatcgacggatcatagtgccccacaacgtgagcaaggagttctgcacggactctggcctggttgtcccaagtatttcctatgagctgcataaaaagctgttgtccgtggctgagaagcatgggctgacccttgagcggagactggagatgacaggtgtgtgtgccagtcagatggcactgaccctcctcggaggacctaacaggttgaatcccaaaaatgttcaccagaggcctacagtggctctactgtgtggacctcatgtgaagg

SEQ ID NO: 129878 - DNA, 204 bp, Homo sapiens
  Payload ID: 5407
  Gene Symbol: EDC3
  Gene Name: enhancer of mRNA decapping 3
  ENST ID: ENST00000562974
  CDS Start-End: 1-204
cctcagaatatccctaagaggacagatgtgaagagccaggatgttgccgtttccccgcagcagcaacagtgctcaaagagctatgtcgacaggcacatggaatccttgagtcagtccaaaagtttccgtcgtcggcacaactcctactctggcctggttgtcccaagtatttcctatgagctgcataaaaagctgttgtccgtg

SEQ ID NO: 129879 - DNA, 471 bp, Homo sapiens
  Payload ID: 5407
  Gene Symbol: EDC3
  Gene Name: enhancer of mRNA decapping 3
  ENST ID: ENST00000567813
  CDS Start-End: 308-471
gtccagccttgttggtggctgctgcagttctttggctcactcactctgttcttcgtgcctcagtttccctttgcataatgagatacggtggcagagaagaacgccagtgccacatccatgactgatagcttgaggacggagatgaactggagggtagaaaaagaggatgcctgagaaatttatacctaccaggtcacatcttcgaatcccaggaagttatccctggattcatttctgcctttgatgcaagtctgtggttcttttcagtacactttgtgtgatattgatttggtctcacgtgtgaaacatggctacagattggctgggaagtattgtgtccatcaattgtggagatagcttgggtgtctatcagggaagagtgtcagctgtggatcaggtcagccagaccatttctctcacccggcctttccataatggagtgaagtgtcttgttccagaagtcaccttcag

SEQ ID NO: 129880 - DNA, 573 bp, Homo sapiens
  Payload ID: 5407
  Gene Symbol: EDC3
  Gene Name: enhancer of mRNA decapping 3
  ENST ID: ENST00000570138
  CDS Start-End: 270-573
ggattctaaatagtatggggattgtgtggggagtgaggcattagctgcttgggcccttagtccagccttgttggtggctgctgcagttctttggctcactcactctgttcttcgtgcctcagtttccctttgcataatgagatacggtggcagagaagaacgccagtgccacatccatgactgatagcttgaggacggagatgaactggagggtagaaaaagaggatgcctgagaaatttatacctaccagtggtctcacgtgtgaaacatggctacagattggctgggaagtattgtgtccatcaattgtggagatagcttgggtgtctatcagggaagagtgtcagctgtggatcaggtcagccagaccatttctctcacccggcctttccataatggagtgaagtgtcttgttccagaagtcaccttcagggcaggtgacattacggagttaaaaattctggagataccaggacctggagacaaccaacattttggagaccttcatcaaacagaattaggcccctctggtgctggctgccaagtgggcatcaatcagaatggcacaggca

SEQ ID NO: 129881 - DNA, 711 bp, Homo sapiens
  Payload ID: 5407
  Gene Symbol: EDC3
  Gene Name: enhancer of mRNA decapping 3
  ENST ID: ENST00000566243
  CDS Start-End: 318-711
agcggcggcggtggtgaaggccgatgctgtgggggtgggcgtggagagaattcttctgtgggtcctctggtgttgagtggtcggcttggtgtggtgtgcggaggagctccaggcccgtcggcgcggagggtcttgctgtgttgcccagcctggtcttgaattcctggactcaagtgatgctcctgccttggcttcccaaactcctggaattacaactcaatgaatgacggtttttgttgctccacatcctcgtcagcatttggtgttgtcagtgttttggatttcggccattctgacagtggtctcacgtgtgaaacatggctacagattggctgggaagtattgtgtccatcaattgtggagatagcttgggtgtctatcagggaagagtgtcagctgtggatcaggtcagccagaccatttctctcacccggcctttccataatggagtgaagtgtcttgttccagaagtcaccttcagggcaggtgacattacggagttaaaaattctggagataccaggacctggagacaaccaacattttggagaccttcatcaaacagaattaggcccctctggtgctggctgccaagtgggcatcaatcagaatggcacaggcaagtttgtcaagaagccagcctcttccagcagtgcccctcagaatatccctaagaggacagatgtgaagagccaggatgttgccgtttccc

SEQ ID NO: 129882 - DNA, 4800 bp, Homo sapiens
  Payload ID: 5408
  Gene Symbol: EDC4
  Gene Name: enhancer of mRNA decapping 4
  Uniprot ID: Q6P2E9
  ENST ID: ENST00000358933
  CDS Start-End: 240-4445
tttcttctccggccctggcaggttccgggagcctcggctcgtgggtgccggaagtggaggcggttggtggggttggcggggctcagcgacgctgcgcgggtggcggtttgcgaactgcgggtggactgtgtagtgaccggcgtcccgctgtctcgccccgtggcgggtgagcgagggtgcgtggtgcgcggcggcggcggaacgaacgcggtgcgggcggggcgcccgccgcagggcccatggcctcctgcgcgagcatcgacatcgaggacgccacgcagcacctgcgggacatcctcaagctggaccggcccgcgggcggccccagtgcagagagcccacggccatccagtgcctacaatggggacctcaatggacttctggtcccagacccgctctgctcaggtgatagtacctcagcaaacaagactggtcttcggaccatgccacccattaacctgcaagagaagcaggtcatctgtctctcaggagatgatagctccacctgcattgggattttggccaaggaggtggagattgtggctagcagtgactctagcatttcaagcaaggcccggggaagcaacaaggtgaaaattcagcctgtcgccaagtatgactgggaacagaagtactactatggcaacctgattgctgtgtctaactccttcttggcctatgccattcgggctgccaacaatggctctgccatggtgcgggtgatcagcgtcagcacttcggagcggaccttgctcaagggcttcacaggcagtgtggctgatctggctttcgcgcacctcaactctccacagctggcctgcctggatgaggcaggcaacctgttcgtgtggcgcttggctctggttaatggcaaaattcaagaagagatcttggtccatattcggcagccagagggcacgccactgaaccactttcgcaggatcatctggtgccccttcatccctgaggagagcgaagactgctgtgaggagagcagcccaacagtggccctgctgcatgaagaccgggctgaggtgtgggacctggacatgctccgctccagccacagtacctggcctgtggatgttagccagatcaagcagggcttcattgtggtaaaaggtcatagcacgtgcctcagtgaaggagccctctctcctgatgggactgtgctggctactgcgagccacgatggctatgtcaagttctggcagatctacattgaggggcaagatgagccaaggtgtctgcacgagtggaaacctcatgatgggcggcccctctcctgcctcctgttctgtgacaaccataagaaacaagaccctgatgtccctttctggaggttccttattactggtgctgaccagaaccgagagttaaagatgtggtgtacagtatcctggacctgcctgcagactattcgcttctccccagatatcttcagctcagtgagtgtgccccctagcctcaaggtttgcttggacctctcagcagaatacctgattctcagcgatgtgcaacggaaggtcctctatgtgatggagctgctgcaaaaccaggaggagggccacgcctgcttcagctccatctcggagttcctgctcacccaccctgtgctgagctttggtatccaggttgtgagtcgctgccggctacggcacactgaggtgctgcctgccgaagaggaaaatgacagcctgggtgctgatggtacccatggagccggtgccatggagtctgcggccggtgtgctcatcaagctcttttgtgtgcatactaaggcactgcaagatgtgcagatccgcttccagccacagctgaaccctgatgtggtggccccactgcccacccacactgcccacgaggacttcacatttggagagtctcggcccgaactgggctctgagggcctggggtcagccgctcacggctcccagcctgacctccgacgaatcgtggagctgcctgcacctgccgacttcctcagtctgagcagtgagaccaagcccaagttgatgacacctgacgccttcatgacacctagcgcctccttgcagcagatcactgcctctcccagcagcagcagcagcggtagcagcagcagcagcagcagtagcagcagctcccttacagctgtgtctgccatgagcagcacctcagctgtggacccctccttgaccaggccacctgaggagctgaccttgagccccaagctgcagctggatggcagcctgacaatgagcagcagtggcagccttcaggcaagcccgcgtggcctcctgcctggcctgctcccagccccagctgacaaactgactcccaaggggccgggccaggtgcctactgccacctctgcactgtccctggagctgcaggaagtggagcccctggggctaccccaagcctcccctagccgcactcgttcccctgatgtcatctcctcagcttccactgccctgtcccaggacatccctgagattgcatctgaggccctgtcccgtggttttggctcctctgcaccagagggccttgagccagacagtatggcttcagccgcctcggcactgcacctgctgtccccacggccccggccagggcccgagctcggcccccagctcgggcttgatggaggccctggggatggagatcggcataataccccctccctcctggaggcagccttgacccaggaggcctcgactcctgacagtcaggtttggcccacagcacctgacattactcgtgagacctgcagcaccctggcagaaagccccaggaatggccttcaggaaaagcacaagagcctggccttccaccgaccaccatatcacctgctgcagcaacgtgacagccaggatgccagtgctgagcaaagtgaccatgatgatgaggtggccagccttgcctctgcttcaggaggctttggcaccaaagttcctgctccacggctgcctgccaaggactggaagaccaagggatcccctcgaacctcacccaagctcaagaggaaaagcaagaaggatgatggggatgcagccatgggatcccggctcacagagcaccaggtggcagagccccctgaggactggccagcactaatttggcaacagcagagagagctggcagagctgcggcacagccaggaagagctgctgcagcgtctgtgtacccaactcgaaggcctgcagagcacagtcacaggccacgtagaacgtgcccttgagactcggcacgagcaggaacagcggcggctggagcgagcactggctgaggggcagcagcggggagggcagctgcaggagcagctgacacaacagttgtcccaagcactgtcgtcagctgtagctgggcggctagagcgcagcatacgggatgagatcaagaagacagtccctccatgtgtctcaaggagtctggagcctatggcaggccaactgagcaactcagtggctaccaagctcacagctgtggagggcagcatgaaagagaacatctccaagctgctcaagtccaagaacttgactgatgccatcgcccgagcagctgcagacacattacaagggccgatgcaggctgcctaccgggaagccttccagagtgtggtgctgccggcctttgagaagagctgccaggccatgttccagcaaatcaatgatagcttccggctggggacacaggaatacttgcagcagctagaaagccacatgaagagccggaaggcacgggaacaggaggccagggagcctgtgctagcccagctgcggggcctggtcagcacactgcagagtgccactgagcagatggcagccaccgtggccggcagtgttcgtgctgaggtgcagcaccagctgcatgtggctgtgggcagcctgcaggagtccattttagcacaggtacagcgcatcgttaagggtgaggtgagtgtggcgctcaaggagcagcaggccgccgtcacctccagcatcatgcaggccatgcgctcagctgctggcacacctgtcccctctgcccaccttgactgccaggcccagcaagcccatatcctgcagctgctgcagcagggccacctcaatcaggccttccagcaggcgctgacagctgctgacctgaacctggtgctgtatgtgtgtgaaactgtggacccagcccaggtttttgggcagccaccctgcccgctctcccagcctgtgctcctttccctcatccagcagctggcatctgaccttggcactcgaactgacctcaagctcagctacctggaagaggccgtgatgcacctggaccacagtgaccccatcactcgggaccacatgggctccgttatggcccaggtgcgccaaaagctttttcagttcctgcaggctgagccacacaactcacttggcaaagcagctcggcgtctcagcctcatgctgcatggcctcgtgacccccagcctcccttagctgctaagcctgccttgcccaggggtgggatggcactgaaggccagcagacaggcctaggctggggcagggtcacggctggcctttacctgctcaggcccccatctctggggtgtttgggggtcagggagcagggagcactggccgtggtctacagcgtgtggtagtcagaaggtttagctgggcccagggcaggtattgcgcctgcttgggttctgccatgcctggagcatgaccctgagatcgtgacaccacttgagtggaattttccatgttcctttttacctctaatttggatctttttgtttttgaaaaacattgagaaattcaattaaatgcttttggaataaaatgga

SEQ ID NO: 129883 - DNA, 482 bp, Homo sapiens
  Payload ID: 5408
  Gene Symbol: EDC4
  Gene Name: enhancer of mRNA decapping 4
  ENST ID: ENST00000573985
  CDS Start-End: 1-465
ctgcctaccgggaagccttccagagtgtggtgctgccggcctttgagaagagctgccaggccatgttccagcaaatcaatgatagcttccggctggggacacaggaatgcgctgacagctgctgacctgaacctggtgctgtatgtgtgtgaaactgtggacccagcccaggtttttgggcagccaccctgcccgctctcccagcctgtgctcctttccctcatccagcagctggcatctgaccttggcactcgaactgacctcaagctcagctacctggaagaggccgtgatgcacctggaccacagtgaccccatcactcgggaccacatgggctccgttatggcccaggtgcgccaaaagctttttcagttcctgcaggctgagccacacaactcacttggcaaagcagctcggcgtctcagcctcatgctgcatggcctcgtgacccccagcctcccttagctgctaagcctgccttg

SEQ ID NO: 129884 - DNA, 580 bp, Homo sapiens
  Payload ID: 5408
  Gene Symbol: EDC4
  Gene Name: enhancer of mRNA decapping 4
  ENST ID: ENST00000577105
  CDS Start-End: 1-406
ccgagcagctgcagacacattacaagggccgatgcaggctgcctaccgggaagccttccagagtgtggtgctgccggcctttgagaagagctgccaggccatgttccagcaaatcaatgatagcttccggctggggacacaggaatacttgcagcagctagaaagccacatgaagagccggaaggcacgggaacaggaggccagggagcctgtgctagcccagctgcggggcctggtcagcacactgcagagtgccactgagcagatggcagccaccgtggccggcagtgttcgtgctgaggtgcagcaccagctgcatgtggctgagccacacaactcacttggcaaagcagctcggcgtctcagcctcatgctgcatggcctcgtgacccccagcctcccttagctgctaagcctgccttgcccaggggtgggatggcactgaaggccagcagacaggcctaggctggggcagggtcacggctggcctttacctgctcaggcccccatctctggggtgtttgggggtcagggagcagggagcactggccgtggtctacagcgtgtggtagtcagaagg

SEQ ID NO: 129885 - DNA, 530 bp, Homo sapiens
  Payload ID: 5408
  Gene Symbol: EDC4
  Gene Name: enhancer of mRNA decapping 4
  ENST ID: ENST00000575033
  CDS Start-End: 1-530
cagagtgccactgagcagatggcagccaccgtggccggcagtgttcgtgctgaggtgcagcaccagctgcatgtggctgtgggcagcctgcaggagtccattttagcacaggtacagcgcatcgttaagggtgaggcccagcaagcccatatcctgcagctgctgcagcagggccacctcaatcaggccttccagcaggcgctgacagctgctgacctgaacctggtgctgtatgtgtgtgaaactgtggacccagcccaggtttttgggcagccaccctgcccgctctcccagcctgtgctcctttccctcatccagcagctggcatctgaccttggcactcgaactgacctcaagctcagctacctggaagaggccgtgatgcacctggaccacagtgaccccatcactcgggaccacatgggctccgttatggcccaggtgcgccaaaagctttttcagttcctgcaggctgagccacacaactcacttggcaaagcagctcggcgtctcagcctcatgctgcatgg

SEQ ID NO: 129886 - DNA, 2913 bp, Homo sapiens
  Payload ID: 5409
  Gene Symbol: EPC1
  Gene Name: enhancer of polycomb homolog 1 (Drosophila)
  Uniprot ID: Q9H2F5
  ENST ID: ENST00000263062
  CDS Start-End: 271-2781
gaatggctggggttggctgaagagcgcacagtggagttttaatgtccgccatgttggccatggcgtattgaagagagcgagcgagagaggagcggagcggcacagcctcccaccctcccggctggtgttagtgcccggacggcgggctctgcgctccgcccctcaagtccccggcagcggttggcgagtggggaccgaacccccggttctccatgatcccgctggccggggccgtttccccagagcggagaggtatctgctgcgcctgagatgagtaaactgtcgtttcgggcgcgggcgctagacgcctcgaagccgctgccggttttccgctgtgaggatctgcccgacctgcacgaatacgcctcgataaacagggccgtgccgcagatgcccaccggaatggagaaggaagaggagtcggaacatcatcttcagcgggctatttcagcacagcaggtgtatggcgagaagagggataatatggttataccggtcccagaggcagaaagtaatattgcttactatgagtctatatatcctggggaatttaagatgccaaagcagctcattcacatacagccttttagtttggatgctgaacagcctgattatgatttggattctgaagatgaagtatttgtgaataaactgaaaaagaaaatggacatctgcccattgcaatttgaggagatgattgaccgcctagaaaaaggcagtggtcagcagccagtcagtctgcaggaagccaaactactgctaaaagaagatgatgaactaattagagaagtttatgaatattggattaaaaagagaaaaaactgtcgagggccatctcttattccatcagtaaaacaagagaagcgagatggttccagcacaaatgatccttatgtggcttttagaaggcgtactgaaaaaatgcagactcgaaaaaatcgcaaaaatgatgaagcctcttacgaaaaaatgcttaagctgcgacgagatctaagtcgagctgttactattctagagatgataaaaagaagagaaaaaagtaaaagagagctattgcacttaacactggaaattatggaaaagaggtataatttgggcgactacaatggagagatcatgtctgaggttatggcacagagacagccaatgaaacctacttatgccatccccatcatccctattactaatagcagtcaatttaaacaccaggaagcaatggatgtgaaggagttcaaagttaataagcaagataaagccgatcttatccgaccgaaacggaaatatgaaaagaagcccaaagtcttaccatcgtctgccgctgctactccccaacagacgagtcctgctgcactgccagtcttcaatgctaaagatctgaatcagtatgactttcccagctcagacgaagaacctctctcccaggttttgtctggctcttcggaagctgaggaagacaatgatcctgatggtccttttgctttccgtaggaaagcaggctgtcagtactatgctcctcacttagaccaaactggcaactggccttggactagtcctaaagatggaggattaggggatgtgcgatatagatactgcttaactactctcaccgtaccccaaaggtgtattggatttgcacgaagacgggttgggcgcggtggaagggtcttactggacagagctcattcagactatgacagtgtgtttcaccatctggatttggaaatgctttcctcaccacaacattctccagtcaatcagtttgccaatacctcagaaacaaatacctcggacaaatctttctctaaagacctcagtcagatactagtcaatatcaaatcatgtagatggcggcattttaggcctcggacaccatccctacatgacagtgacaatgatgaactctcctgtagaaaattatataggagtataaaccgaacaggaacagcacaacctgggacccagacatgcagtacctctacgcaaagtaaaagtagcagtggttcagcacactttgcatttacagccgaacaataccagcaacatcaacagcaactggcactcatgcagaaacagcagcttgcacaaattcagcaacagcaagcaaatagtaattcctccaccaacacatcacagaaccttgcatctaaccagcagaaaagtggctttcgcctgaatatacagggtttagaaagaacactacagggttttgtttctaagactttggattctgctagtgcacagtttgctgcttctgctttggtgacatcagaacaactgatgggattcaagatgaaggatgatgtggtgcttggaatcggggtgaatggcgtccttccagcctcaggagtatacaagggcttacacctcagtagtactacaccaacagcacttgtacatacaagtccatcaacggcaggttcagctttgttacagccttcaaatattacacagacttcaagttcccacagtgcactgagtcatcaagtaactgctgccaattctgcaacaactcaggttctgattgggaacaacattcgattaactgtaccttcatcagttgccactgtaaactctattgccccaataaatgcacgacatatacctaggactttaagtgctgttccatcatctgccttaaagctggccgctgcagcaaactgtcaagtttccaaggtcccatcttcatcctctgtagattcagttccaagggaaaatcatgaatcagaaaagccagcactgaacaacatagcagacaacacagtagcgatggaggtgacgtagcttcctccgagtggaactgcagcctggggacttgattaggtgctatgcatcagtagcattttgaatgcaagggatgatggaaagcagcacatgcgtttctgtggcagctgtggggacttgacagcaatgctc

SEQ ID NO: 129887 - DNA, 4057 bp, Homo sapiens
  Payload ID: 5409
  Gene Symbol: EPC1
  Gene Name: enhancer of polycomb homolog 1 (Drosophila)
  Uniprot ID: Q9H2F5
  ENST ID: ENST00000319778
  CDS Start-End: 304-2745
gcgtgcccgcgccgctgcgcgatgcagtgtggggaatggctggggttggctgaagagcgcacagtggagttttaatgtccgccatgttggccatggcgtattgaagagagcgagcgagagaggagcggagcggcacagcctcccaccctcccggctggtgttagtgcccggacggcgggctctgcgctccgcccctcaagtccccggcagcggttggcgagtggggaccgaacccccggttctccatgatcccgctggccggggccgtttccccagagcggagaggtatctgctgcgcctgagatgagtaaactgtcgtttcgggcgcgggcgctagacgcctcgaagccgctgccggttttccgctgtgaggatctgcccgacctgcacgaatacgcctcgataaacagggccgtgccgcagatgcccaccggaatggagaaggaagaggagtcggaacatcatcttcagcgggctatttcagcacagcaggtgtatggcgagaagagggataatatggttataccggtcccagaggcagaaagtaatattgcttactatgagtctatatatcctggggaatttaagatgccaaagcagctcattcacatacagccttttagtttggatgctgaacagcctgattatgatttggattctgaagatgaagtatttgtgaataaactgaaaaagaaaatggacatctgcccattgcaatttgaggagatgattgaccgcctagaaaaaggcagtggtcagcagccagtcagtctgcaggaagccaaactactgctaaaagaagatgatgaactaattagagaagtttatgaatattggattaaaaagagaaaaaactgtcgagggccatctcttattccatcagtaaaacaagagaagcgagatggttccagcacaaatgatccttatgtggcttttagaaggcgtactgaaaaaatgcagactcgaaaaaatcgcaaaaatgatgaagcctcttacgaaaaaatgcttaagctgcgacgagatctaagtcgagctgttactattctagagatgataaaaagaagagaaaaaagtaaaagagagctattgcacttaacactggaaattatggaaaagaggtataatttgggcgactacaatggagagatcatgtctgaggttatggcacagagacagccaatgaaacctacttatgccatccccatcatccctattactaatagcagtcaatttaaacaccaggaagcaatggatgtgaaggagttcaaagttaataagcaagataaagccgatcttatccgaccgaaacggaaatatgaaaagaagcccaaagtcttaccatcgtctgccgctgctactccccaacagacgagtcctgctgcactgccagtcttcaatgctaaagatctgaatcagtatgactttcccagctcagacgaagaacctctctcccaggttttgtctggctcttcggaagctgaggaagacaatgatcctgatggtccttttgctttccgtaggaaagcaggctgtcagtactatgctcctcacttagaccaaactggcaactggccttggactagtcctaaagatggaggattaggggatgtgcgatatagatactgcttaactactctcaccgtaccccaaaggtgtattggatttgcacgaagacgggttgggcgcggtggaagggtcttactggacagagctcattcagactatgacagtgtgtttcaccatctggatttggaaatgctttcctcaccacaacattctccagtcaatcagtttgccaatacctcagaaacaaatacctcggacaaatctttctctaaagacctcagtcagatactagtcaatatcaaatcatgtagatggcggcattttaggcctcggacaccatccctacatgacagtgacaatgatgaactctcctgtagaaaattatataggagtataaaccgaacaggaacagcacaacctgggacccagacatgcagtacctctacgcaaagtaaaagtagcagtggttcagcacactttgcatttacagccgaacaataccagcaacatcaacagcaactggcactcatgcagaaacagcagcttgcacaaattcagcaacagcaagcaaatagtaattcctccaccaacacatcacagggttttgtttctaagactttggattctgctagtgcacagtttgctgcttctgctttggtgacatcagaacaactgatgggattcaagatgaaggatgatgtggtgcttggaatcggggtgaatggcgtccttccagcctcaggagtatacaagggcttacacctcagtagtactacaccaacagcacttgtacatacaagtccatcaacggcaggttcagctttgttacagccttcaaatattacacagacttcaagttcccacagtgcactgagtcatcaagtaactgctgccaattctgcaacaactcaggttctgattgggaacaacattcgattaactgtaccttcatcagttgccactgtaaactctattgccccaataaatgcacgacatatacctaggactttaagtgctgttccatcatctgccttaaagctggccgctgcagcaaactgtcaagtttccaaggtcccatcttcatcctctgtagattcagttccaagggaaaatcatgaatcagaaaagccagcactgaacaacatagcagacaacacagtagcgatggaggtgacgtagcttcctccgagtggaactgcagcctggggacttgattaggtgctatgcatcagtagcattttgaatgcaagggatgatggaaagcagcacatgcgtttctgtggcagctgtggggacttgacagcaatgctcatctctcatgcttcaatttttcttttcttactgttaataggaaaaaaatcaacatctgtaaattaagaatacagcaattatctgtacagtactgcatatttgtaatacccttgtatatatgttacttgaatacagaaatgttcatttgtgatgctttgcacttgggggtggggggtgggagggaaatcaattgcaacaaagagtgtgagatgtgagattgtatagagatgaagtgtcatcacatcatgtgcatggtgcggaacctgctgttttatctatttattgtgccgtgtttacagttttttgtacactgtaccttcattggttcctgtgctgtagtaaatgtgttaggtagctgtggactccttggtattttgtaaatggtataacataacttggttcccctctgggtccttgagttttctgtgtatcatgtgaaaaaaaatggtgacatacatacagaattttacaaaaaaaaaaaaaaaaaaaaaggcatcagtttttttaaaaatggggaatgtactattaaatggggatcttcctggtctactatcattaggacaagtaacaagctaaaaatgaagtctcttgaatctttccatccccaacttgcccacaaagctgtgggtggtttctggtacttaaagcactaatattatgttgctgctctgcgaacagcccagtagtcccatttccttccacaccaaaaagtgttaaatcaagtatgcaaatggagtccttacaactggagtttatgttgtcttgccctttttttagcacaaaaaaaattgtacttttttattgtcgaattgtttaaaagacttcattctttacttgttcttacgaaaaggatataagggagaagaatgcagtaattgctgtacgtgtatcatcattccagtttctaaaaacagccagccagcttttttccttttaagattctccagaaggctgcaaggccagaaccacaaatatcgggtgccttcctttggaaatatttgacctctcttctgtgaagagaatggtacttaacagactactactagtgctttgtcagtaccgaagtctgaatgcccagtccaatggcatacattatccttaaggtttttaatcccacctggaaaaattgtgatagaattctcacaaaataaacccagggcattacatgttgacaaactaa

SEQ ID NO: 129888 - DNA, 3909 bp, Homo sapiens
  Payload ID: 5409
  Gene Symbol: EPC1
  Gene Name: enhancer of polycomb homolog 1 (Drosophila)
  Uniprot ID: Q9H2F5
  ENST ID: ENST00000375110
  CDS Start-End: 306-2597
agcgctcgcctgcttgccatcgcaaagttgttaaccccagagtcttctggctgtgctgcctcctctgcttttaatcttctgtggatatttctccgatttcccccaaaagcccacagatcctgggggaagccaccccattcggccaccgatcatggaagaaagtattactttttatttaccaaacattttaaagatgttggaagatccatatgctgcctggaggctgttgtttctagggacacaagtatccagcctatattgttacaattttttttcaagaactgccgtcttctttgcctgcactaatggaacatcatcttcagcgggctatttcagcacagcaggtgtatggcgagaagagggataatatggttataccggtcccagaggcagaaagtaatattgcttactatgagtctatatatcctggggaatttaagatgccaaagcagctcattcacatacagccttttagtttggatgctgaacagcctgattatgatttggattctgaagatgaagtatttgtgaataaactgaaaaagaaaatggacatctgcccattgcaatttgaggagatgattgaccgcctagaaaaaggcagtggtcagcagccagtcagtctgcaggaagccaaactactgctaaaagaagatgatgaactaattagagaagtttatgaatattggattaaaaagagaaaaaactgtcgagggccatctcttattccatcagtaaaacaagagaagcgagatggttccagcacaaatgatccttatgtggcttttagaaggcgtactgaaaaaatgcagactcgaaaaaatcgcaaaaatgatgaagcctcttacgaaaaaatgcttaagctgcgacgagatctaagtcgagctgttactattctagagatgataaaaagaagagaaaaaagtaaaagagagctattgcacttaacactggaaattatggaaaagaggtataatttgggcgactacaatggagagatcatgtctgaggttatggcacagagacagccaatgaaacctacttatgccatccccatcatccctattactaatagcagtcaatttaaacaccaggaagcaatggatgtgaaggagttcaaagttaataagcaagataaagccgatcttatccgaccgaaacggaaatatgaaaagaagcccaaagtcttaccatcgtctgccgctgctactccccaacagacgagtcctgctgcactgccagtcttcaatgctaaagatctgaatcagtatgactttcccagctcagacgaagaacctctctcccaggttttgtctggctcttcggaagctgaggaagacaatgatcctgatggtccttttgctttccgtaggaaagcaggctgtcagtactatgctcctcacttagaccaaactggcaactggccttggactagtcctaaagatggaggattaggggatgtgcgatatagatactgcttaactactctcaccgtaccccaaaggtgtattggatttgcacgaagacgggttgggcgcggtggaagggtcttactggacagagctcattcagactatgacagtgtgtttcaccatctggatttggaaatgctttcctcaccacaacattctccagtcaatcagtttgccaatacctcagaaacaaatacctcggacaaatctttctctaaagacctcagtcagatactagtcaatatcaaatcatgtagatggcggcattttaggcctcggacaccatccctacatgacagtgacaatgatgaactctcctgtagaaaattatataggagtataaaccgaacaggaacagcacaacctgggacccagacatgcagtacctctacgcaaagtaaaagtagcagtggttcagcacactttgcatttacagccgaacaataccagcaacatcaacagcaactggcactcatgcagaaacagcagcttgcacaaattcagcaacagcaagcaaatagtaattcctccaccaacacatcacagggttttgtttctaagactttggattctgctagtgcacagtttgctgcttctgctttggtgacatcagaacaactgatgggattcaagatgaaggatgatgtggtgcttggaatcggggtgaatggcgtccttccagcctcaggagtatacaagggcttacacctcagtagtactacaccaacagcacttgtacatacaagtccatcaacggcaggttcagctttgttacagccttcaaatattacacagacttcaagttcccacagtgcactgagtcatcaagtaactgctgccaattctgcaacaactcaggttctgattgggaacaacattcgattaactgtaccttcatcagttgccactgtaaactctattgccccaataaatgcacgacatatacctaggactttaagtgctgttccatcatctgccttaaagctggccgctgcagcaaactgtcaagtttccaaggtcccatcttcatcctctgtagattcagttccaagggaaaatcatgaatcagaaaagccagcactgaacaacatagcagacaacacagtagcgatggaggtgacgtagcttcctccgagtggaactgcagcctggggacttgattaggtgctatgcatcagtagcattttgaatgcaagggatgatggaaagcagcacatgcgtttctgtggcagctgtggggacttgacagcaatgctcatctctcatgcttcaatttttcttttcttactgttaataggaaaaaaatcaacatctgtaaattaagaatacagcaattatctgtacagtactgcatatttgtaatacccttgtatatatgttacttgaatacagaaatgttcatttgtgatgctttgcacttgggggtggggggtgggagggaaatcaattgcaacaaagagtgtgagatgtgagattgtatagagatgaagtgtcatcacatcatgtgcatggtgcggaacctgctgttttatctatttattgtgccgtgtttacagttttttgtacactgtaccttcattggttcctgtgctgtagtaaatgtgttaggtagctgtggactccttggtattttgtaaatggtataacataacttggttcccctctgggtccttgagttttctgtgtatcatgtgaaaaaaaatggtgacatacatacagaattttacaaaaaaaaaaaaaaaaaaaaaggcatcagtttttttaaaaatggggaatgtactattaaatggggatcttcctggtctactatcattaggacaagtaacaagctaaaaatgaagtctcttgaatctttccatccccaacttgcccacaaagctgtgggtggtttctggtacttaaagcactaatattatgttgctgctctgcgaacagcccagtagtcccatttccttccacaccaaaaagtgttaaatcaagtatgcaaatggagtccttacaactggagtttatgttgtcttgccctttttttagcacaaaaaaaattgtacttttttattgtcgaattgtttaaaagacttcattctttacttgttcttacgaaaaggatataagggagaagaatgcagtaattgctgtacgtgtatcatcattccagtttctaaaaacagccagccagcttttttccttttaagattctccagaaggctgcaaggccagaaccacaaatatcgggtgccttcctttggaaatatttgacctctcttctgtgaagagaatggtacttaacagactactactagtgctttgtcagtaccgaagtctgaatgcccagtccaatggcatacattatccttaaggtttttaatcccacctggaaaaattgtgatagaattctcacaaaataaacccagggcattacatgttgacaaactaa

SEQ ID NO: 129889 - DNA, 3649 bp, Homo sapiens
  Payload ID: 5410
  Gene Symbol: EPC2
  Gene Name: enhancer of polycomb homolog 2 (Drosophila)
  Uniprot ID: Q52LR7
  ENST ID: ENST00000258484
  CDS Start-End: 35-2458
gccgcccgggctgttcctgtaaggcggggagacaatgagtaaactctccttccgagcgcgggcgctggacgccgccaagccgctgcctatctaccgcggcaaggacatgcctgatctcaacgactgcgtctccatcaaccgggccgtgccccagatgcccaccgggatggagaaggaggaggaatcggaacatcatttacagcgagcaatttcagcacagcaagtgtttagagaaaaaaaagagagtatggtcattcctgttcctgaggcagagagcaacgtcaactattacaatcgcttgtacaaaggagagtttaaacagccaaaacagttcattcatattcagccttttaatctagacaacgagcaaccagattatgatatggattcagaagatgagactttattaaatagacttaacagaaagatggaaattaagcctttgcaatttgaaattatgattgacagacttgaaaaagccagttctaatcagcttgtaacacttcaagaagcaaaactgctgctaaacgaagatgattaccttattaaagctgtatatgactactgggtgagaaaacgtaaaaactgcagggggccatccctcattcctcagataaaacaagagaaaagagatggctctaccaacaatgacccttatgttgcctttcggagaagaacagagaaaatgcaaactcgaaagaatcgtaagaatgatgaagcctcttatgaaaagatgttgaaactgagacgagaatttagtagagccataacaattttggaaatgattaagagaagagagaaaacaaaacgagaattattgcacttaaccttagaagttgtggagaaaagataccatttgggagactatggtggtgaaatccttaatgaagtaaaaatcagtagatcagaaaaagagttatatgccactccagcaactcttcataatggaaatcatcacaaagttcaagaatgtaaaactaagcaccctcatcatttgtctttgaaagaagaggcttctgatgtggttcgtcaaaagaagaagtacccaaagaagcctaaagcagaggctttgataacatctcagcaacccactcctgagacattgcctgtgatcaataagagtgacattaagcaatatgattttcacagctcagatgaagatgaatttccacaggtattgtccccagtatcagaaccggaagaagaaaatgatcctgatggtccctgtgctttcagaaggcgggcaggatgccagtattatgctcctcgtttggaccaagctaaccattcatgtgaaaattcagaattggcagatttggataagttgaggtataggcattgccttacaacacttacagtcccaagaagatgtataggatttgcaaggaggcgaattggcagaggtggaagggtcataatggaccgaatatccacagaacatgacccagtcctgaaacagatagaccctgaaatgctgaatagtttttcaagctcttcccaaactatagacttttcttctaatttctctcggaccaatgcttccagtaaacattgtgaaaatagactgtctctttctgaaatattaagcaatatcagatcatgtcgactacagtgtttccagccaaggctactaaatttacaggacagtgatagtgaagaatgtacctcaagaaaaccagggcagactgtgaacaataaaagagtttctgcagcatctgtagctttattgaacaccagcaagaatggcatatcagtaacagggggtatcacagaagagcagtttcagacacatcagcagcagttagttcagatgcaaaggcagcaacttgcccagcttcagcagaaacagcaatctcagcattcctcgcaacagacacatccaaaagcacagggctcaagcacctctgactgtatgtctaaaacacttgactcagccagcgcccactttgctgcatctgcagtggtcagtgcacctgttccaagtcgcagtgaggtagccaaggaacagaacactggccacaacaacataaacggtgttgtccagccttcaggaacctctaaaacattatactccaccaatatggctttatcatccagcccagggatttcagctgtacagcttgtaaggacagttggccacaccactacaaaccacttaatcccagcattgtgcacaagcagtcctcagacacttcccatgaacaattcctgcctgacaaatgcagtgcacctcaataatgtcagtgttgtttctccagtcaatgtgcatatcaatacacggacttcagcaccatcgccaacagccttaaaacttgccacagttgctgccagtatggacagagtgccaaaggttactcccagcagtgccatcagcagcatagcaagagagaaccacgaaccagaaagattgggcttaaatggaatagcagagacaacagtagctatggaagtgacataacctaaaacacgtggctctgacctgtgctgatggtgtgcagtcattcatattccagctgaatgcaaaaggcaacactctgtggatcacagagtgtaacaatggacctaaatggactatagtatattggatgttaaatccatatatgatgtatattttgtaaaattgggaaaatcactaccttgtaaaatagtttatttgtatcatcaatattatttctgttacttgaatagtagatattcatcatcatgcttttgcacttgaatttgcaactgaatggattttaaaaaataattctttaatgggatcatgagcatgaaatgggatcctgcatcacttgttttaactatttattttgccatgtttacattttgtatcttgtaaaaataaatccaactttgtgtctaaaaagttaaagattcatagctaggaaatgaaattcttgtaatttttttctaaaggaactgtaaagttttcacttggttcattttgtttcacaatttgactagatggactttttggtaaatactttagtggcatttcactgtcaaatatgaagttcaaggcaaaatagtattttctattactgtgcaggggaaagggatggatcgatacatgcaaatttaatgtagtaactcacttttccatatattttgaatgtatatttctatttatgataccaatttataaaaaataattacacagaaaaaatggaataggaaaaattatgcatctagcacatttaaactgtgcaaatatgaaaatttttcgaggattacattttatctgaaggctgcatattttaactggctttaaaactgtaacacatcacataaaagatactttaccaggtatgtattgcattatatcattgcaataattattggaagtctagatatcgagccatcccaggtgttgggcggggggagggttgtggcaagattgtcttttcaattttggagagttttcctgtggctacaaggcaagtaacgggttggaaaaagtctgactgtaagcgttggacaccttcatagtgtagtgttttagtgactttttttatacggttcttgtaaattagatacgtgtagtggtgtttcagaatgtttgtttatgcactagttcagacaactttccctgttacttgttcttgataagtgaaaactgcagggaaataaaaaatacatatcaaaacat

SEQ ID NO: 129890 - DNA, 672 bp, Homo sapiens
  Payload ID: 5410
  Gene Symbol: EPC2
  Gene Name: enhancer of polycomb homolog 2 (Drosophila)
  ENST ID: ENST00000397424
  CDS Start-End: 192-672
cttgccgtaagcggcggccgggaatggcgcaggggatgcgctggccgctcttggcgtacggtctctgtttacctttccacctccctctctcaggcgcggggctaattaatggcgtggtattatttggctaggaacatcatttacagcgagcaatttcagcacagcaagtgtttagagaaaaaaaagagagtatggtcattcctgttcctgaggcagagagcaacgtcaactattacaatcgcttgtacaaaggagagtttaaacagccaaaacagttcattcatattcagccttttaatctagacaacgagcaaccagattatgatatggattcagaagatgagactttattaaatagacttaacagaaagatggaaattaagcctttgcaatttgaaattatgattgacagacttgaaaaagccagttctaatcagcttgtaacacttcaagaagcaaaactgctgctaaacgaagatgattaccttattaaagctgtatatgactactgggtgagaaaacgtaaaaactgcagggggccatccctcattcctcagataaaacaagagaaaagagatggctctaccaacaatgacccttatgttgcctttcggagaagaacagagaaaatgcaaactcgaaagaatcgtaagaatgatgaagcctcttatg

SEQ ID NO: 129891 - DNA, 1624 bp, Homo sapiens
  Payload ID: 5410
  Gene Symbol: EPC2
  Gene Name: enhancer of polycomb homolog 2 (Drosophila)
  ENST ID: ENST00000409654
  CDS Start-End: 20-385
cctgtaaggcggggagacaatgagtaaactctccttccgagcgcgggcgctggacgccgccaagccgctgcctatctaccgcggcaaggacatgcctgatctcaacgactgcgtctccatcaaccgggccgtgccccagatgcccaccgggatggagaaggaggaggaatcggaacatcatttacagcgagcaatttcagcacagcaagtgtttagagaaaaaaaagagagtatggtcattcctgttcctgaggcagagagcaacgtcaactattacaatcgcttgtacaaaggagagtttaaacagccaaaacagttcattcatattcagctgaaattgcatcttaaattgctgttgttcaggattgaagtcttgttcttctaaagagaattttcatttgtttctgccaggcatttggggacactaccaaccggagaccacgttaaagtttttgcttgtttgttttgttcatttgtttttggaccacagtattagctttaatttaggctgcagatctgctcaaggttcagttctcaggaagattttttgcttctcctttctacctaagggcaagttgagaaatacaaaattctttgctttccctttctgcatggctaatttatttctttaatcttacactgagggcatagccctttggtaatgtatctttattcagtagcattctatactaatattaacacacaagcataaagcttttttctttcttatggtatatatagtaatgttgtgtcttttaattgatggcagtttagatttgatagaattcaataatagtcatattctctagtatgaatattaggttctttgtaatttgttcccgctttctcctttaacgtcatttatttttgctcttcccttcactctgtgtaccatagggactacgaaaattaccctcattcaccttctttcatatttaacatttccttggatgtgctattgaagtcttctttcccttcctatagctcattaaagacttaactcccttatgaaagccaccttgacttttctcactctacctgtcttctttgcttatcgtagtatcttttacatacttctgttagaggactcaccatactttattgcaattatttgtaaccattctttctctccttttagactgtgagctccttgagggcaggaactatatattttattttcttttgtgttttcagagtaaagtgcttggtttatagatgctcaataaatgatgtgtttgtcgactgaattgttttaaaatggctttaaaaagtcttttggtggtacagccattttccacagatttcttttctctgaaatagtctagagaaacacacatgcgaaaattatttatgtatatttttttctcctgtgttctttgactttgagtcctattagctttttgaatttgcctttaccttctatcagtcaggaaggagataactattcataatagaaattttaaggatctctcttaagccaaagtatcaattattttgtattttgataatattgcagttaggcaggaagaccatttgtaaaaaccattctaggaaaccaagaactaaaaatcgggtgtaactcatgtgggtcaggcccatcgaatacaataaacattattcttgt

SEQ ID NO: 129892 - DNA, 788 bp, Homo sapiens
  Payload ID: 5410
  Gene Symbol: EPC2
  Gene Name: enhancer of polycomb homolog 2 (Drosophila)
  ENST ID: ENST00000449013
  CDS Start-End: 1-381
gaacatcatttacagcgagcaatttcagcacagcaagtgtttagagaaaaaaaagagagtatggtcattcctgttcctgaggcagagagcaacgtcaactattacaatcgcttgtacaaaggagagtttaaacagccaaaacagttcattcatattcagcgcatttggggacactaccaaccggagaccacgttaaagtttttgcttgtttgttttgttcatttgtttttggaccacagtattagctttaatttaggctgcagatctgctcaaggttcagttctcaggaagattttttgcttctcctttctacctaagggcaagttgagaaatacaaaattctttgctttccctttctgcatggctaatttatttctttaatcttacactgagggcatagccctttggtaatgtatctttattcagtagcattctatactaatattaacacacaagcataaagcttttttctttcttatggtatatatagtaatgttgtgtcttttaattgatggcagtttagatttgatagaattcaataatagtcatattctctagtatgaatattaggttctttgtaatttgttcccgctttctcctttaacgtcatttatttttgctcttcccttcactctgtgtaccatagggactacgaaaattaccctcattcaccttctttcatatttaacatttccttggatgtgctattgaagtcttctttcccttcctatagctcattaaagacttaactcccttatgaaagccaccttgacttttctcactctacc

SEQ ID NO: 129893 - DNA, 724 bp, Homo sapiens
  Payload ID: 5410
  Gene Symbol: EPC2
  Gene Name: enhancer of polycomb homolog 2 (Drosophila)
  ENST ID: ENST00000457184
  CDS Start-End: 244-724
agcgagaggggtgaccgggcggcggcgggagaggcgcacgctcccgggcgcgggcgaacttgcgcacctggcacctgccacacagcgaaagcaccggccagcgagcggaggggcgccgcccccgccccctctccccggagcggaccgagaccgagcacgctcccgcgggccggcagcgccgcggagagagtggcgcgggcgctggacgccgccaagccgctgcctatctaccgcggcaaggacatgcctgatctcaacgactgcgtctccatcaaccgggccgtgccccagatgcccaccgggatggagaaggaggaggaatcggaacatcatttacagcgagcaatttcagcacagcaagtgtttagagaaaaaaaagagagtatggtcattcctgttcctgaggcagagagcaacgtcaactattacaatcgcttgtacaaaggagagtttaaacagccaaaacagttcattcatattcagccttttaatctagacaacgagcaaccagattatgatatggattcagaagatgagactttattaaatagacttaacagaaagatggaaattaagcctttgcaatttgaaattatgattgacagacttgaaaaagccagttctaatcagcttgtaacacttcaagaagcaaaactgctgctaaacgaagatgattaccttattaaagctgtatatgactactgggtgagaaaacgtaaaaact

SEQ ID NO: 129894 - DNA, 586 bp, Homo sapiens
  Payload ID: 5411
  Gene Symbol: ERH
  Gene Name: enhancer of rudimentary homolog (Drosophila)
  ENST ID: ENST00000555373
  CDS Start-End: 67-282
gttgtagttaagctcgtgtaacggcggcggtgtcggcagctgctgtagcgaagagagtttggcgcgatgtctcacaccattttgctggtacagcctaccaagaggccagaaggcagaacttatgctgactacgaatctgtgaatgaatgcatggaaggtgtttgtaaaatgtatgaagaacatctgaaaagaatgaatcccaacagtccctctatcacatatgacatcagtcagttgtttgatttcatcgatgatctggcagacctcagctgcctggtgtaagtattagccaacatgtcttttatcttgtattttctattgcttttctgtctgtttgaggtgatttatggtattgggagctaattatgtgcctgatactgatctttgcatttgcatagtgtatagtaattaatatttctcttacagaaataagagattggcaacataaagccaaaggcacagaaaaaaataactttgctaattgatatagttagtatccagaaaggatcctaattcagaagttccatgtgcctcttctttgttccttatacctaattttttttttcctttacagtctttgtcttaa

SEQ ID NO: 129895 - DNA, 1124 bp, Homo sapiens
  Payload ID: 5411
  Gene Symbol: ERH
  Gene Name: enhancer of rudimentary homolog (Drosophila)
  Uniprot ID: P84090
  ENST ID: ENST00000557016
  CDS Start-End: 395-709
cgacctccggcccaggatacttacgttgccgccatttttgagtagggctaatgaaagatgtctgatgtcactgtctataccggtgatcacttgagccgtatgtttaataacgaaagtacggaagacagcgtcttgaaaaaaaataattcttcctaaagcttggaaactttcccttacctttttgcctttatcgaagatggctgaaacagagtcagtagctgctctagctgccggaagtgactgtgcctctatgatccaaaaggctcttttgcgttgcactttcgacgacttccggcggctcctctcgcgaggattggctgttagcggcgttgtagttaagctcgtgtaacggcggcggtgtcggcagctgctgtagcgaagagagtttggcgcgatgtctcacaccattttgctggtacagcctaccaagaggccagaaggcagaacttatgctgactacgaatctgtgaatgaatgcatggaaggtgtttgtaaaatgtatgaagaacatctgaaaagaatgaatcccaacagtccctctatcacatatgacatcagtcagttgtttgatttcatcgatgatctggcagacctcagctgcctggtttaccgagctgatacccagacataccagccttataacaaagactggattaaagagaagatctacgtgctccttcgtcggcaggcccaacaggctgggaaataattgtgttggaagcactgggggggttggggtgggcttggaacacaggtgtgtacagcgtgctgtagtggaagttttgtatcatagtaatcctgtttccactttgttatactctagccaagattgactgtattagatgaaatgtgaggatcttgttcaatcggaaacccccgttacctcctctttttctttctctttctttttttttttttacttaaacatttttatgatgatttagatggaagttgttcttcgtcacttaatgttggttccagtccttcaactgttcatatctactttataacattcacatactaacccttcttcaagatggggtggggggtggaaatgcagtttagccatgtcctcaagataaagtcttggtaaaaataaataaatgtcctttagttatattttc

SEQ ID NO: 129896 - DNA, 546 bp, Homo sapiens
  Payload ID: 5412
  Gene Symbol: ENY2
  Gene Name: enhancer of yellow 2 homolog (Drosophila)
  ENST ID: ENST00000339942
  CDS Start-End: 69-215
agctttctgtgtgcttaggtgcccgagctactgagggtctaagtccgggcagccgaagagtgtgcaagatgaacaaagatgcgcagatgagagcagcgattaaccaaaagttgatagaaactggagaaagagaacgcctcaaagagttgctgagagctaaattaattgaatgtggctggaaggatcagttgaaggcacactgtaaaggtaattaaagaaaaaggactagaacacgttactgttgatgacttggtggctgaaatcactccaaaaggcagagccctggtacctgacagtgtaaagaaggagctcctacaaagaataagaacattccttgctcagcatgccagcctttaagattgaattagattgtgttgttgtggttttatttctgaaagtaaaacttgccataaattagaaaacaatttcccaaaataaaatccttttttgtatgatggtatacagttttcagtaatgatgtatacattgtattgatttttttccctaaatgtgttattttaataaatatctcatgaatgagtttga

SEQ ID NO: 129897 - DNA, 567 bp, Homo sapiens
  Payload ID: 5412
  Gene Symbol: ENY2
  Gene Name: enhancer of yellow 2 homolog (Drosophila)
  ENST ID: ENST00000522766
  CDS Start-End: 89-244
ggaaatgcgtgttctagctttctgtgtgcttaggtgcccgagctactgagggtctaagtccgggcagccgaagagtgtggttagcaagatgaacaaagatgcgcagatgagagcagcgattaaccaaaagttgatagaaactggagaaagagaacgcctcaaagagttgctgagagctaaattaattgaatgtggctggaaggatcagttgaaggcacactgtaaagataatgattttaaatgatatgatttgttttttgcttttgcataagaggtaattaaagaaaaaggactagaacacgttactgttgatgacttggtggctgaaatcactccaaaaggcagagccctggtacctgacagtgtaaagaaggagctcctacaaagaataagaacattccttgctcagcatgccagcctttaagattgaattagattgtgttgttgtggttttatttctgaaagtaaaacttgccataaattagaaaacaatttcccaaaataaaatccttttttgtatgatggtatacagttttcagtaatgatgtatacattgtattgattttt

SEQ ID NO: 129898 - DNA, 2966 bp, Homo sapiens
  Payload ID: 5412
  Gene Symbol: ENY2
  Gene Name: enhancer of yellow 2 homolog (Drosophila)
  ENST ID: ENST00000517311
  CDS Start-End: 144-314
aaatgcgtgttctagctttctgtgtgcttaggtgcccgagctactgagggtctaagtccgggcagccgaagagtgtggtaggtaacggtcctcagcgcaagggtcatttcgtcgctgggaagggacggccctcgcccgcggtgatggtggttagcaagatgaacaaagatgcgcagatgagagcagcgattaaccaaaagttgatagaaactggagaaagagaacgcctcaaagagttgctgagagctaaattaattgaatgtggctggaaggatcagttgaaggcacactgtaaagataatgattttaaatgatatgatttgttttttgcttttgcataagaggtaattaaagaaaaaggactagaacacgttactgttgatgacttggtggctgaaatcactccaaaaggcagagccctggtacctgacagtgtaaagaaggagctcctacaaagaataagaacattccttgctcagcatgccagcctttaagattgaattagattgtgttgttgtggttttatttctgaaagtaaaacttgccataaattagaaaacaatttcccaaaataaaatccttttttgtatgatggtatacagttttcagtaatgatgtatacattgtattgatttttttccctaaatgtgttattttaataaatatctcatgaatgagtttgaagtttgcttggattttgaaatgaatgggactttgtctttattactaattcaccaaatttgttgagcgcaaaagcaattaatgtagtttaagtatttagtatgtacagttctctgtgttaacagctgagaagtaagcaaccttttctgactgcatatggtgtattcctcttttgagtccccataatattttataaattgtaatgccccatcttgtactacagttgtcttattcgtattgtttataaactttgagggttaggactgggtcttactcatctttatgtgccttccttatgcttcaaagaatttaccatctaatggaagagaacatttgcaagttggctccataccaagctccttccacatactctactcatctgaactttgaatgcagaatctttaaattgcaaccccacatactaaggtcaagaaagaacttaatgggaattaatctccacccattagctttaccctgacatcaggattgccaaatccaatggactcttgtctattcttacgtgacttctgctggaaaatgcgaatgttgaccatcctgccacttggaactctcttcccactcctcacattgcttttgctaccactggaagttccttctgtttcttgtggagtaccttttgctgtctgggacttgtagataatggtgtttcctagggctccctccagggccctctgcctcactaactggatatacttttcctgagcaaatcccaggaaacttgcgtcagaccgtgacttcaaatacaggttgataaatgctaaactgtctccaaaccagacttcatcctagcctccacacccagacacccaactgctatggatcaactttttagaatatcctcacttcaaactgaccttacctaaaataatgactttttcccccaataattgcccctgctatattccttatttctgaatggtacctcctagctatatagattatctgaggagcttactgaaatgctgattctgaagataaggggcatggctttaagattctgtatttctggcgagtacccaactggtgctcatgctgctgattgagaaccacttctgaatatagcaaggctgtaaattatccactacgtgccctcgtaattgtcttagttcaagcccagattattgtagtagacttagtatttctttgccttagttgatctgtgacccctccaatatctattccacactgttgcctaagtggccttagtaaaattcaagtctggttattttattcccctgcttggaatttctcaatgtagaatgaaactcattcagcattaacacataggcccttcttgatctgacatcgtgtttctctagttagactaaagaatccccactatgaagttgtttcatccgtaagtacctttgaacccagaagccccctttctcatatgtttctcattcctgtttgcccttcagagttcagctttagttgctaaaacattcagacatccctctgacttagatcccccactactgtttttctgtgagaagcagctatgcataattcctcttcaacacagtagttcttgaaattttgcaggcctctcctggaaaggaggaaatgacttctctgactttgtatgatgcttatttgtggatgaatgggcaagggaaaaaatgaaggaacaagtgaatgaacagtatgggagtatgagaaaaggtataaattgggtatagttgagaaaaggattcaaattgatctttggttcgagagacaatttcatctttctgatgaatttaaagtgtagtctttgaaccagctgggcttaattatgtaaagttttgagcctgagataagcacacaatcacaaaacctacccaaacaagttttttgtttcacttcatctcttataaaacaatgttctaaagtaagtgatagggatgctcatcattctgctacctattatcacaatgaaaacaatcataaatagtacacaggaaaggtgagaaatagcggatagttcttatttcatagtactgtatatggaaataaaccaaatttgctcatagagatactattttattacctcaaaaatatataaaaatgaaaacgttatgaaaatattttaaaatgggatttaaaaataattgagaacatcacagcaatttagaatactaaagagcatagctttaaaatgatagtgctgagaactccccacctctaccccaccacctgtaggcttctttgacaacttacaaatgttctctagtttgtatctagaatcacttatatctttcaaataaaccaactttgtgaac

SEQ ID NO: 129899 - DNA, 857 bp, Homo sapiens
  Payload ID: 5412
  Gene Symbol: ENY2
  Gene Name: enhancer of yellow 2 homolog (Drosophila)
  ENST ID: ENST00000520147
  CDS Start-End: 73-375
tctgtgtgcttaggtgcccgagctactgagggtctaagtccgggcagccgaagagtgtggtaggttagcaagatgaacaaagatgcgcagatgagagcagcgattaaccaaaagttgatagaaactggagaaagagaacgcctcaaagagttgctgagagctaaattaattgaatgtggctggaaggatcagttgaaggcacactgtaaagaggtaattaaagaaaaaggactagaacacgttactgttgatgacttggtggctgaaatcactccaaaaggcagagagacaggtttcgccatgttgcccaggctggtcttgagctcccggactcaggcaatcctcctgcctcaaccttccagactgctgggatgacaggcgtgagccatcgtacccagccaacacaccctggtacctgacagtgtaaagaaggagctcctacaaagaataagaacattccttgctcagcatgccagcctttaagattgaattagattgtgttgttgtggttttatttctgaaagtaaaacttgccataaattagaaaacaatttcccaaaataaaatccttttttgtatgatggtatacagttttcagtaatgatgtatacattgtattgatttttttccctaaatgtgttattttaataaatatctcatgaatgagtttgaagtttgcttggattttgaaatgaatgggactttgtctttattactaattcaccaaatttgttgagcgcaaaagcaattaatgtagtttaagtatttagtatgtacagttctctgtgttaacagctgagaagtaagcaaccttttctgactgcatatggtgtattcctcttttgagtccccataat

SEQ ID NO: 129900 - DNA, 1540 bp, Homo sapiens
  Payload ID: 5412
  Gene Symbol: ENY2
  Gene Name: enhancer of yellow 2 homolog (Drosophila)
  ENST ID: ENST00000523335
  CDS Start-End: 119-280
gcttaggtgcccgagctactgagggtctaagtccgggcagccgaagagtgtggtaggtaacggtcctcagcgcaagggtcatttcgtcgctgggaagggacggccctcgcccgcggtgatggtggttagcaagatgaacaaagatgcgcagatgagagcagcgattaaccaaaagttgatagaaactggagaaagagaacgcctcaaagagttgctgagagctaaattaattgaatgtggctggaaggatcagttgaaggcacactgtaaaggtaattaaagaaaaaggactagaacacgttactgttgatgacttggtggctgaaatcactccaaaaggcagagccctggtacctgacagtgtaaagaaggagctcctacaaagaataagaacattccttgctcagcatgccagcctttaagattgaattagattgtgttgttgtggttttatttctgaaagtaaaacttgccataaattagaaaacaatttcccaaaataaaatccttttttgtatgatggtatacagttttcagtaatgatgtatacattgtattgatttttttccctaaatgtgttattttaataaatatctcatgaatgagtttgaagtttgcttggattttgaaatgaatgggactttgtctttattactaattcaccaaatttgttgagcgcaaaagcaattaatgtagtttaagtatttagtatgtacagttctctgtgttaacagctgagaagtaagcaaccttttctgactgcatatggtgtattcctcttttgagtccccataatattttataaattgtaatgccccatcttgtactacagttgtcttattcgtattgtttataaactttgagggttaggactgggtcttactcatctttatgtgccttccttatgcttcaaagaatttaccatctaatggaagagaacatttgcaagttggctccataccaagctccttccacatactctactcatctgaactttgaatgcagaatctttaaattgcaaccccacatactaaggtcaagaaagaacttaatgggaattaatctccacccattagctttaccctgacatcaggattgccaaatccaatggactcttgtctattcttacgtgacttctgctggaaaatgcgaatgttgaccatcctgccacttggaactctcttcccactcctcacattgcttttgctaccactggaagttccttctgtttcttgtggagtaccttttgctgtctgggacttgtagataatggtgtttcctagggctccctccagggccctctgcctcactaactggatatacttttcctgagcaaatcccaggaaacttgcgtcagaccgtgacttcaaatacaggttgataaatgctaaactgtctccaaaccagacttcatcctagcctccacacccagacacccaactgctatggatcaactttttagaatatcctcacttcaaactgaccttacctaaaataatgactttttcccccaataattgcccctgctatattccttatt

SEQ ID NO: 129901 - DNA, 562 bp, Homo sapiens
  Payload ID: 5412
  Gene Symbol: ENY2
  Gene Name: enhancer of yellow 2 homolog (Drosophila)
  Uniprot ID: Q9NPA8
  ENST ID: ENST00000521662
  CDS Start-End: 89-379
ggaaatgcgtgttctagctttctgtgtgcttaggtgcccgagctactgagggtctaagtccgggcagccgaagagtgtggttagcaagatgaacaaagatgcgcagatgagagcagcgattaaccaaaagttgatagaaactggagaaagagaacgcctcaaagagttgctgagagctaaattaattgaatgtggctggaaggatcagttgaaggcacactgtaaagaggtaattaaagaaaaaggactagaacacgttactgttgatgacttggtggctgaaatcactccaaaaggcagagccctggtacctgacagtgtaaagaaggagctcctacaaagaataagaacattccttgctcagcatgccagcctttaagattgaattagattgtgttgttgtggttttatttctgaaagtaaaacttgccataaattagaaaacaatttcccaaaataaaatccttttttgtatgatggtatacagttttcagtaatgatgtatacattgtattgatttttttccctaaatgtgttattttaataaatatctcatgaatga

SEQ ID NO: 129902 - DNA, 2922 bp, Homo sapiens
  Payload ID: 5412
  Gene Symbol: ENY2
  Gene Name: enhancer of yellow 2 homolog (Drosophila)
  Uniprot ID: Q9NPA8
  ENST ID: ENST00000521688
  CDS Start-End: 146-451
ggaaatgcgtgttctagctttctgtgtgcttaggtgcccgagctactgagggtctaagtccgggcagccgaagagtgtggtaggtaacggtcctcagcgcaagggtcatttcgtcgctgggaagggacggccctcgcccgcggtgatggtggttagcaagatgaacaaagatgcgcagatgagagcagcgattaaccaaaagttgatagaaactggagaaagagaacgcctcaaagagttgctgagagctaaattaattgaatgtggctggaaggatcagttgaaggcacactgtaaagaggtaattaaagaaaaaggactagaacacgttactgttgatgacttggtggctgaaatcactccaaaaggcagagccctggtacctgacagtgtaaagaaggagctcctacaaagaataagaacattccttgctcagcatgccagcctttaagattgaattagattgtgttgttgtggttttatttctgaaagtaaaacttgccataaattagaaaacaatttcccaaaataaaatccttttttgtatgatggtatacagttttcagtaatgatgtatacattgtattgatttttttccctaaatgtgttattttaataaatatctcatgaatgagtttgaagtttgcttggattttgaaatgaatgggactttgtctttattactaattcaccaaatttgttgagcgcaaaagcaattaatgtagtttaagtatttagtatgtacagttctctgtgttaacagctgagaagtaagcaaccttttctgactgcatatggtgtattcctcttttgagtccccataatattttataaattgtaatgccccatcttgtactacagttgtcttattcgtattgtttataaactttgagggttaggactgggtcttactcatctttatgtgccttccttatgcttcaaagaatttaccatctaatggaagagaacatttgcaagttggctccataccaagctccttccacatactctactcatctgaactttgaatgcagaatctttaaattgcaaccccacatactaaggtcaagaaagaacttaatgggaattaatctccacccattagctttaccctgacatcaggattgccaaatccaatggactcttgtctattcttacgtgacttctgctggaaaatgcgaatgttgaccatcctgccacttggaactctcttcccactcctcacattgcttttgctaccactggaagttccttctgtttcttgtggagtaccttttgctgtctgggacttgtagataatggtgtttcctagggctccctccagggccctctgcctcactaactggatatacttttcctgagcaaatcccaggaaacttgcgtcagaccgtgacttcaaatacaggttgataaatgctaaactgtctccaaaccagacttcatcctagcctccacacccagacacccaactgctatggatcaactttttagaatatcctcacttcaaactgaccttacctaaaataatgactttttcccccaataattgcccctgctatattccttatttctgaatggtacctcctagctatatagattatctgaggagcttactgaaatgctgattctgaagataaggggcatggctttaagattctgtatttctggcgagtacccaactggtgctcatgctgctgattgagaaccacttctgaatatagcaaggctgtaaattatccactacgtgccctcgtaattgtcttagttcaagcccagattattgtagtagacttagtatttctttgccttagttgatctgtgacccctccaatatctattccacactgttgcctaagtggccttagtaaaattcaagtctggttattttattcccctgcttggaatttctcaatgtagaatgaaactcattcagcattaacacataggcccttcttgatctgacatcgtgtttctctagttagactaaagaatccccactatgaagttgtttcatccgtaagtacctttgaacccagaagccccctttctcatatgtttctcattcctgtttgcccttcagagttcagctttagttgctaaaacattcagacatccctctgacttagatcccccactactgtttttctgtgagaagcagctatgcataattcctcttcaacacagtagttcttgaaattttgcaggcctctcctggaaaggaggaaatgacttctctgactttgtatgatgcttatttgtggatgaatgggcaagggaaaaaatgaaggaacaagtgaatgaacagtatgggagtatgagaaaaggtataaattgggtatagttgagaaaaggattcaaattgatctttggttcgagagacaatttcatctttctgatgaatttaaagtgtagtctttgaaccagctgggcttaattatgtaaagttttgagcctgagataagcacacaatcacaaaacctacccaaacaagttttttgtttcacttcatctcttataaaacaatgttctaaagtaagtgatagggatgctcatcattctgctacctattatcacaatgaaaacaatcataaatagtacacaggaaaggtgagaaatagcggatagttcttatttcatagtactgtatatggaaataaaccaaatttgctcatagagatactattttattacctcaaaaatatataaaaatgaaaacgttatgaaaatattttaaaatgggatttaaaaataattgagaacatcacagcaatttagaatactaaagagcatagctttaaaatgatagtgctgagaactccccacctctaccccaccacctgtaggcttctttgacaacttacaaatgttctctagtttgtatctagaatcacttatatctttcaaataaaccaactttgtgaa

SEQ ID NO: 129903 - DNA, 4623 bp, Homo sapiens
  Payload ID: 5413
  Gene Symbol: EZH1
  Gene Name: enhancer of zeste 1 polycomb repressive complex 2 subunit
  Uniprot ID: Q92800
  ENST ID: ENST00000428826
  CDS Start-End: 123-2366
cccgcggctcgggatggaggctggacacctgttctgctgttgtgtcctgccattctcctgaagaacagaggcacactgtaaaacccaacacttccccttgcattctataagattacagcaagatggaaataccaaatccccctacctccaaatgtatcacttactggaaaagaaaagtgaaatctgaatacatgcgacttcgacaacttaaacggcttcaggcaaatatgggtgcaaaggctttgtatgtggcaaattttgcaaaggttcaagaaaaaacccagatcctcaatgaagaatggaagaagcttcgtgtccaacctgttcagtcaatgaagcctgtgagtggacacccttttctcaaaaagtgtaccatagagagcattttcccgggatttgcaagccaacatatgttaatgaggtcactgaacacagttgcattggttcccatcatgtattcctggtcccctctccaacagaactttatggtagaagatgagacggttttgtgcaatattccctacatgggagatgaagtgaaagaagaagatgagacttttattgaggagctgatcaataactatgatgggaaagtccatggtgaagaagagatgatccctggatccgttctgattagtgatgctgtttttctggagttggtcgatgccctgaatcagtactcagatgaggaggaggaagggcacaatgacacctcagatggaaagcaggatgacagcaaagaagatctgccagtaacaagaaagagaaagcgacatgctattgaaggcaacaaaaagagttccaagaaacagttcccaaatgacatgatcttcagtgcaattgcctcaatgttccctgagaatggtgtcccagatgacatgaaggagaggtatcgagaactaacagagatgtcagaccccaatgcacttccccctcagtgcacacccaacatcgatggccccaatgccaagtctgtgcagcgggagcaatctctgcactccttccacacacttttttgccggcgctgctttaaatacgactgcttccttcacccttttcatgccacccctaatgtatataaacgcaagaataaagaaatcaagattgaaccagaaccatgtggcacagactgcttccttttgctggaaggagcaaaggagtatgccatgctccacaacccccgctccaagtgctctggtcgtcgccggagaaggcaccacatagtcagtgcttcctgctccaatgcctcagcctctgctgtggctgagactaaagaaggagacagtgacagggacacaggcaatgactgggcctccagttcttcagaggctaactctcgctgtcagactcccacaaaacagaaggctagtccagccccacctcaactctgcgtagtggaagcaccctcggagcctgtggaatggactggggctgaagaatctctttttcgagtcttccatggcacctacttcaacaacttctgttcaatagccaggcttctggggaccaagacgtgcaagcaggtctttcagtttgcagtcaaagaatcacttatcctgaagctgccaacagatgagctcatgaacccctcacagaagaagaaaagaaagcacagattgtgggctgcacactgcaggaagattcagctgaagaaagataactcttccacacaagtgtacaactaccaaccctgcgaccacccagaccgcccctgtgacagcacctgcccctgcatcatgactcagaatttctgtgagaagttctgccagtgcaacccagactgtcagaatcgtttccctggctgtcgctgtaagacccagtgcaataccaagcaatgtccttgctatctggcagtgcgagaatgtgaccctgacctgtgtctcacctgtggggcctcagagcactgggactgcaaggtggtttcctgtaaaaactgcagcatccagcgtggacttaagaagcacctgctgctggccccctctgatgtggccggatggggcaccttcataaaggagtctgtgcagaagaacgaattcatttctgaatactgtggtgagctcatctctcaggatgaggctgatcgacgcggaaaggtctatgacaaatacatgtccagcttcctcttcaacctcaataatgattttgtagtggatgctactcggaaaggaaacaaaattcgatttgcaaatcattcagtgaatcccaactgttatgccaaagtggtcatggtgaatggagaccatcggattgggatctttgccaagagggcaattcaagctggcgaagagctcttctttgattacaggtacagccaagctgatgctctcaagtacgtggggatcgagagggagaccgacgtcctttagccctcccaggccccacggcagcacttatggtagcggcactgtcttggctttcgtgctcacaccactgctgctcgagtctcctgcactgtgtctcccacactgagaaaccccccaacccactccctctgtagtgaggcctctgccatgtccagagggcacaaaactgtctcaatgagaggggagacagaggcagctagggcttggtctcccaggacagagagttacagaaatgggagactgtttctctggcctcagaagaagcgagcacaggctggggtggatgacttatgcgtgatttcgtgtcggctccccaggctgtggcctcaggaatcaacttaggcagttcccaacaagcgctagcctgtaattgtagctttccacatcaagagtccttatgttattgggatgcaggcaaacctctgtggtcctaagacctggagaggacaggctaagtgaagtgtggtccctggagcctacaagtggtctgggttagaggcgagcctggcaggcagcacagactgaactcagaggtagacaggtcaccttactacctcctccctcgtggcagggctcaaactgaaagagtgtgggttctaagtacaggcattcaaggctgggggaaggaaagctacgccatccttccttagccagagagggagaaccagccagatgatagtagttaaactgctaagcttgggcccaggaggctttgagaaagccttctctgtgtactctggagatagatggagaagtgttttcagattcctgggaacagacaccagtgctccagctcctccaaagttctggcttagcagctgcaggcaagcattatgctgctattgaagaagcattaggggtatgcctggcaggtgtgagcatcctggctcgctggatttgtgggtgttttcaggccttccattccccatagaggcaaggcccaatggccagtgttgcttatcgcttcagggtaggtgggcacaggcttggactagagaggagaaagattggtgtaatctgctttcctgtctgtagtgcctgctgtttggaaagggtgagttagaatatgttccaaggttggtgaggggctaaattgcacgcgtttaggctggcaccccgtgtgcagggcacactggcagagggtatctgaagtgggagaagaagcaggtagaccacctgtcccaggctgtggtgccaccctctctggcattcatgcagagcaaagcactttaaccatttcttttaaaaggtctatagattggggtagagtttggcctaaggtctctagggtccctgcctaaatcccactcctgagggagggggaagaagagagggtgggagattctcctccagtcctgtctcatctcctgggagaggcagacgagtgagtttcacacagaagaatttcatgtgaatggggccagcaagagctgccctgtgtccatggtgggtgtgccgggctggctgggaacaaggagcagtatgttgagtagaaagggtgtgggcgggtatagattggcctgggagtgttacagtagggagcaggcttctcccttctttctgggactcagagccccgcttcttcccactccacttgttgtcccatgaaggaagaagtggggttcctcctgacccagctgcctcttacggtttggtatgggacatgcacacacactcacatgctctcactcaccacactggagggcacacacgtaccccgcacccagcaactcctgacagaaagctcctcccacccaaatgggccaggccccagcatgatcctgaaatctgcatccgccgtggtttgtattcattgtgcatatcagggataccctcaagctggactgtgggttccaaattactcatagaggagaaaaccagagaaagatgaagaggaggagttaggtctatttgaaatgccaggggctcgctgtgaggaataggtgaaaaaaaacttttcaccagcctttgagagactagactgaccccacccttccttcagtgagcagaatcactgtggtcagtctcctgtcccagcttcagttcatgaatactcctgttcctccagtttcccatcctttgtccctgctgtcccccacttttaaagatgggtctcaacccctccccaccacgtcatgatggatggggcaaggtggtggggactaggggagcctggtatacatgcggcttcattgccaataaatttcatgcactttaaagtcctgtggcttgtgacctcttaataaagtgttagaatcca

SEQ ID NO: 129904 - DNA, 4608 bp, Homo sapiens
  Payload ID: 5413
  Gene Symbol: EZH1
  Gene Name: enhancer of zeste 1 polycomb repressive complex 2 subunit
  ENST ID: ENST00000415827
  CDS Start-End: 135-2351
ctagcagcgggacccgcggctcgggatggaggctggacacctgttctgctgttgtgtcctgccattctcctgaagaacagaggcacactgtaaaacccaacacttccccttgcattctataagattacagcaagatggaaataccaaatccccctacctccaaatgtatcacttactggaaaagaaaagtgaaatctgaatacatgcgacttcgacaacttaaacggcttcaggcaaatatgggtgcaaaggctttgtatgtggcaaattttgcaaaggttcaagaaaaaacccagatcctcaatgaagaatggaagaagcttcgtgtccaacctgttcagtcaatgaagccttgtaccatagagagcattttcccgggatttgcaagccaacatatgttaatgaggtcactgaacacagttgcattggttcccatcatgtattcctggtcccctctccaacagaactttatggtagaagatgagacggttttgtgcaatattccctacatgggagatgaagtgaaagaagaagatgagacttttattgaggagctgatcaataactatgatgggaaagtccatggtgaagaagagatgatccctggatccgttctgattagtgatgctgtttttctggagttggtcgatgccctgaatcagtactcagatgaggaggaggaagggcacaatgacacctcagatggaaagcaggatgacagcaaagaagatctgccagtaacaagaaagagaaagcgacatgctattgaaggcaacaaaaagagttccaagaaacagttcccaaatgacatgatcttcagtgcaattgcctcaatgttccctgagaatggtgtcccagatgacatgaaggagaggtatcgagaactaacagagatgtcagaccccaatgcacttccccctcagtgcacacccaacatcgatggccccaatgccaagtctgtgcagcgggagcaatctctgcactccttccacacacttttttgccggcgctgctttaaatacgactgcttccttcacccttttcatgccacccctaatgtatataaacgcaagaataaagaaatcaagattgaaccagaaccatgtggcacagactgcttccttttgctggaaggagcaaaggagtatgccatgctccacaacccccgctccaagtgctctggtcgtcgccggagaaggcaccacatagtcagtgcttcctgctccaatgcctcagcctctgctgtggctgagactaaagaaggagacagtgacagggacacaggcaatgactgggcctccagttcttcagaggctaactctcgctgtcagactcccacaaaacagaaggctagtccagccccacctcaactctgcgtagtggaagcaccctcggagcctgtggaatggactggggctgaagaatctctttttcgagtcttccatggcacctacttcaacaacttctgttcaatagccaggcttctggggaccaagacgtgcaagcaggtctttcagtttgcagtcaaagaatcacttatcctgaagctgccaacagatgagctcatgaacccctcacagaagaagaaaagaaagcacagattgtgggctgcacactgcaggaagattcagctgaagaaagataactcttccacacaagtgtacaactaccaaccctgcgaccacccagaccgcccctgtgacagcacctgcccctgcatcatgactcagaatttctgtgagaagttctgccagtgcaacccagactgtcagaatcgtttccctggctgtcgctgtaagacccagtgcaataccaagcaatgtccttgctatctggcagtgcgagaatgtgaccctgacctgtgtctcacctgtggggcctcagagcactgggactgcaaggtggtttcctgtaaaaactgcagcatccagcgtggacttaagaagcacctgctgctggccccctctgatgtggccggatggggcaccttcataaaggagtctgtgcagaagaacgaattcatttctgaatactgtggtgagctcatctctcaggatgaggctgatcgacgcggaaaggtctatgacaaatacatgtccagcttcctcttcaacctcaataatgattttgtagtggatgctactcggaaaggaaacaaaattcgatttgcaaatcattcagtgaatcccaactgttatgccaaagtggtcatggtgaatggagaccatcggattgggatctttgccaagagggcaattcaagctggcgaagagctcttctttgattacaggtacagccaagctgatgctctcaagtacgtggggatcgagagggagaccgacgtcctttagccctcccaggccccacggcagcacttatggtagcggcactgtcttggctttcgtgctcacaccactgctgctcgagtctcctgcactgtgtctcccacactgagaaaccccccaacccactccctctgtagtgaggcctctgccatgtccagagggcacaaaactgtctcaatgagaggggagacagaggcagctagggcttggtctcccaggacagagagttacagaaatgggagactgtttctctggcctcagaagaagcgagcacaggctggggtggatgacttatgcgtgatttcgtgtcggctccccaggctgtggcctcaggaatcaacttaggcagttcccaacaagcgctagcctgtaattgtagctttccacatcaagagtccttatgttattgggatgcaggcaaacctctgtggtcctaagacctggagaggacaggctaagtgaagtgtggtccctggagcctacaagtggtctgggttagaggcgagcctggcaggcagcacagactgaactcagaggtagacaggtcaccttactacctcctccctcgtggcagggctcaaactgaaagagtgtgggttctaagtacaggcattcaaggctgggggaaggaaagctacgccatccttccttagccagagagggagaaccagccagatgatagtagttaaactgctaagcttgggcccaggaggctttgagaaagccttctctgtgtactctggagatagatggagaagtgttttcagattcctgggaacagacaccagtgctccagctcctccaaagttctggcttagcagctgcaggcaagcattatgctgctattgaagaagcattaggggtatgcctggcaggtgtgagcatcctggctcgctggatttgtgggtgttttcaggccttccattccccatagaggcaaggcccaatggccagtgttgcttatcgcttcagggtaggtgggcacaggcttggactagagaggagaaagattggtgtaatctgctttcctgtctgtagtgcctgctgtttggaaagggtgagttagaatatgttccaaggttggtgaggggctaaattgcacgcgtttaggctggcaccccgtgtgcagggcacactggcagagggtatctgaagtgggagaagaagcaggtagaccacctgtcccaggctgtggtgccaccctctctggcattcatgcagagcaaagcactttaaccatttcttttaaaaggtctatagattggggtagagtttggcctaaggtctctagggtccctgcctaaatcccactcctgagggagggggaagaagagagggtgggagattctcctccagtcctgtctcatctcctgggagaggcagacgagtgagtttcacacagaagaatttcatgtgaatggggccagcaagagctgccctgtgtccatggtgggtgtgccgggctggctgggaacaaggagcagtatgttgagtagaaagggtgtgggcgggtatagattggcctgggagtgttacagtagggagcaggcttctcccttctttctgggactcagagccccgcttcttcccactccacttgttgtcccatgaaggaagaagtggggttcctcctgacccagctgcctcttacggtttggtatgggacatgcacacacactcacatgctctcactcaccacactggagggcacacacgtaccccgcacccagcaactcctgacagaaagctcctcccacccaaatgggccaggccccagcatgatcctgaaatctgcatccgccgtggtttgtattcattgtgcatatcagggataccctcaagctggactgtgggttccaaattactcatagaggagaaaaccagagaaagatgaagaggaggagttaggtctatttgaaatgccaggggctcgctgtgaggaataggtgaaaaaaaacttttcaccagcctttgagagactagactgaccccacccttccttcagtgagcagaatcactgtggtcagtctcctgtcccagcttcagttcatgaatactcctgttcctccagtttcccatcctttgtccctgctgtcccccacttttaaagatgggtctcaacccctccccaccacgtcatgatggatggggcaaggtggtggggactaggggagcctggtatacatgcggcttcattgccaataaatttcatgcactttaaagtcctgtggcttgtgacctcttaataaagtgttagaatcca

SEQ ID NO: 129905 - DNA, 1022 bp, Homo sapiens
  Payload ID: 5413
  Gene Symbol: EZH1
  Gene Name: enhancer of zeste 1 polycomb repressive complex 2 subunit
  ENST ID: ENST00000586382
  CDS Start-End: 133-1022
agcagcgggacccgcggctcgggatggaggctggacacctgttctgctgttgtgtcctgccattctcctgaagaacagaggcacactgtaaaacccaacacttccccttgcattctataagattacagcaagatggaaataccaaatccccctacctccaaatgtatcacttactggaaaagaaaagtgaaatctgaatacatgcgacttcgacaacttaaacggcttcaggcaaatatgggtgcaaaggctttgtatgtggcaaattttgcaaaggttcaagaaaaaacccagatcctcaatgaagaatggaagaagcttcgtgtccaacctgttcagtcaatgaagcctgtagaagatgagacggttttgtgcaatattccctacatgggagatgaagtgaaagaagaagatgagacttttattgaggagctgatcaataactatgatgggaaagtccatggtgaagaagagatgatccctggatccgttctgattagtgatgctgtttttctggagttggtcgatgccctgaatcagtactcagatgaggaggaggaagggcacaatgacacctcagatggaaagcaggatgacagcaaagaagatctgccagtaacaagaaagagaaagcgacatgctattgaaggcaacaaaaagagttccaagaaacagttcccaaatgacatgatcttcagtgcaattgcctcaatgttccctgagaatggtgtcccagatgacatgaaggagaggtatcgagaactaacagagatgtcagaccccaatgcacttccccctcagtgcacacccaacatcgatggccccaatgccaagtctgtgcagcgggagcaatctctgcactccttccacacacttttttgccggcgctgctttaaatacgactgcttccttcacccttttcatgccacccctaatgtatataaacgcaagaataaagaaatcaagattgaaccagaaccatgtggcacagactgcttccttttgctggaaggagcaaagga

SEQ ID NO: 129906 - DNA, 2392 bp, Homo sapiens
  Payload ID: 5413
  Gene Symbol: EZH1
  Gene Name: enhancer of zeste 1 polycomb repressive complex 2 subunit
  Uniprot ID: Q92800
  ENST ID: ENST00000590078
  CDS Start-End: 212-2245
agcgggacccgcggctcgggatggaggctggacacctgttctgctgttgtgtcctgccattctcctgaagaacagaggcacactgtaaaacccaacacttccccttgcattctataaggctttgtatgtggcaaattttgcaaaggttcaagaaaaaacccagatcctcaatgaagaatggaagaagcttcgtgtccaacctgttcagtcaatgaagcctgtgagtggacacccttttctcaaaaagtgtaccatagagagcattttcccgggatttgcaagccaacatatgttaatgaggtcactgaacacagttgcattggttcccatcatgtattcctggtcccctctccaacagaactttatggtagaagatgagacggttttgtgcaatattccctacatgggagatgaagtgaaagaagaagatgagacttttattgaggagctgatcaataactatgatgggaaagtccatggtgaagaagagatgatccctggatccgttctgattagtgatgctgtttttctggagttggtcgatgccctgaatcagtactcagatgaggaggaggaagggcacaatgacacctcagatggaaagcaggatgacagcaaagaagatctgccagtaacaagaaagagaaagcgacatgctattgaaggcaacaaaaagagttccaagaaacagttcccaaatgacatgatcttcagtgcaattgcctcaatgttccctgagaatggtgtcccagatgacatgaaggagaggtatcgagaactaacagagatgtcagaccccaatgcacttccccctcagtgcacacccaacatcgatggccccaatgccaagtctgtgcagcgggagcaatctctgcactccttccacacacttttttgccggcgctgctttaaatacgactgcttccttcacccttttcatgccacccctaatgtatataaacgcaagaataaagaaatcaagattgaaccagaaccatgtggcacagactgcttccttttgctggaaggagcaaaggagtatgccatgctccacaacccccgctccaagtgctctggtcgtcgccggagaaggcaccacatagtcagtgcttcctgctccaatgcctcagcctctgctgtggctgagactaaagaaggagacagtgacagggacacaggcaatgactgggcctccagttcttcagaggctaactctcgctgtcagactcccacaaaacagaaggctagtccagccccacctcaactctgcgtagtggaagcaccctcggagcctgtggaatggactggggctgaagaatctctttttcgagtcttccatggcacctacttcaacaacttctgttcaatagccaggcttctggggaccaagacgtgcaagcaggtctttcagtttgcagtcaaagaatcacttatcctgaagctgccaacagatgagctcatgaacccctcacagaagaagaaaagaaagcacagattgtgggctgcacactgcaggaagattcagctgaagaaagataactcttccacacaagtgtacaactaccaaccctgcgaccacccagaccgcccctgtgacagcacctgcccctgcatcatgactcagaatttctgtgagaagttctgccagtgcaacccagactgtcagaatcgtttccctggctgtcgctgtaagacccagtgcaataccaagcaatgtccttgctatctggcagtgcgagaatgtgaccctgacctgtgtctcacctgtggggcctcagagcactgggactgcaaggtggtttcctgtaaaaactgcagcatccagcgtggacttaagaagcacctgctgctggccccctctgatgtggccggatggggcaccttcataaaggagtctgtgcagaagaacgaattcatttctgaatactgtggtgagctcatctctcaggatgaggctgatcgacgcggaaaggtctatgacaaatacatgtccagcttcctcttcaacctcaataatgattttgtagtggatgctactcggaaaggaaacaaaattcgatttgcaaatcattcagtgaatcccaactgttatgccaaagtggtcatggtgaatggagaccatcggattgggatctttgccaagagggcaattcaagctggcgaagagctcttctttgattacaggtacagccaagctgatgctctcaagtacgtggggatcgagagggagaccgacgtcctttagccctcccaggccccacggcagcacttatggtagcggcactgtcttggctttcgtgctcacaccactgctgctcgagtctcctgcactgtgtctcccacactgagaaaccccccaacccactccctctgtagtgaggcctctgccatg

SEQ ID NO: 129907 - DNA, 1031 bp, Homo sapiens
  Payload ID: 5413
  Gene Symbol: EZH1
  Gene Name: enhancer of zeste 1 polycomb repressive complex 2 subunit
  ENST ID: ENST00000586867
  CDS Start-End: 130-501
agcgggacccgcggctcgggatggaggctggacacctgttctgctgttgtgtcctgccattctcctgaagaacagaggcacactgtaaaacccaacacttccccttgcattctataagattacagcaagatggaaataccaaatccccctacctccaaatgtatcacttactggaaaagaaaagtgaaatctgaatacatgcgacttcgacaacttaaacggcttcaggcaaatatgggtgcaaaggctttgtatgtggcaaattttgcaaaggttcaagaaaaaacccagatcctcaatgaagaatggaagaagcttcgtgtccaacctgttcagtcaatgaagcctgtgagtggacacccttttctcaaaaagtgtaccatagagagcattttcccgggatttgcaagccaacatatgttaatgaggtcactgaacacagttgcattggttcccatcatgtattcctggtcccctctccaacagaactttatgagatgatccctggatccgttctgattagtgatgctgtttttctggagttggtcgatgccctgaatcagtactcagatgaggaggaggaagggcacaatgacacctcagatggaaagcaggatgacagcaaagaagatctgccagtaacaagaaagagaaagcgacatgctattgaaggcaacaaaaagagttccaagaaacagttcccaaatgacatgatcttcagtgcaattgcctcaatgttccctgagaatggtgtcccagatgacatgaaggagaggtatcgagaactaacagagatgtcagaccccaatgcacttccccctcagtgcacacccaacatcgatggccccaatgccaagtctgtgcagcgggagcaatctctgcactccttccacacacttttttgccggcgctgctttaaatacgactgcttccttcacccttttcatgccacccctaatgtatataaacgcaagaataaagaaatcaagattgaaccagaaccatgtggcacagactgcttccttttgctg

SEQ ID NO: 129908 - DNA, 580 bp, Homo sapiens
  Payload ID: 5413
  Gene Symbol: EZH1
  Gene Name: enhancer of zeste 1 polycomb repressive complex 2 subunit
  ENST ID: ENST00000586935
  CDS Start-End: 1-377
atgaagtgaaagaagaagatgagacttttattgaggagctgatcaataactatgatgggaaagtccatggtgaagaagagatgatccctggatccgttctgattagtgatgctgtttttctggagttggtcgatgccctgaatcagtactcagatgaggaggaggaagggcacaatgacacctcagatggaaagcaggatgacagcaaagaagatctgccagtaacaagaaagagaaagcgacatgctattgaaggaaggagcaaaggagtatgccatgctccacaacccccgctccaagtgctctggtcgtcgccggagaaggcaccacatagtcagtgcttcctgctccaatgcctcagcctctgctgtggctgagactaaagaaggagacagtgacagggacacaggcaatgactgggcctccagttcttcagaggctaactctcgctgtcagactcccacaaaacagaaggctagtccagccccacctcaactctgcgtagtggaagcaccctcggagcctgtggaatggactggggctgaagaatctctttttcgagtcttccatggcacctact

SEQ ID NO: 129909 - DNA, 535 bp, Homo sapiens
  Payload ID: 5413
  Gene Symbol: EZH1
  Gene Name: enhancer of zeste 1 polycomb repressive complex 2 subunit
  ENST ID: ENST00000592492
  CDS Start-End: 216-535
cccgcggctcgggatggaggctggacacctgttctgctgttgtgtcctgccattctcctgaagaacagaggcacactgtaaaacccaacacttccccttgcattctataagagatggggtttcaccatgttgcccaaggttgtctcaaatcactgggctcaagtagtgctctcacctcggcttcctaaagtgttggttttacagattacagcaagatggaaataccaaatccccctacctccaaatgtatcacttactggaaaagaaaagtgaaatctgaatacatgcgacttcgacaacttaaacggcttcaggcaaatatgggtgcaaaggctttgtatgtggcaaattttgcaaaggttcaagaaaaaacccagatcctcaatgaagaatggaagaagcttcgtgtccaacctgttcagtcaatgaagcctgtgagtggacacccttttctcaaaaagtgtaccatagagagcattttcccgggatttgcaagccaacatatgttaatgaggtcactgaacacagttgcatt

SEQ ID NO: 129910 - DNA, 559 bp, Homo sapiens
  Payload ID: 5413
  Gene Symbol: EZH1
  Gene Name: enhancer of zeste 1 polycomb repressive complex 2 subunit
  ENST ID: ENST00000586089
  CDS Start-End: 51-559
atgcgtcctagcagcgggacccgcggctcgggatggaggattacagcaagatggaaataccaaatccccctacctccaaatgtatcacttactggaaaagaaaagtgaaatctgaatacatgcgacttcgacaacttaaacggcttcaggcaaatatgggtgcaaaggctttgtatgtggcaaattttgcaaaggttcaagaaaaaacccagatcctcaatgaagaatggaagaagcttcgtgtccaacctgttcagtcaatgaagcctgtgagtggacacccttttctcaaaaaggtagaagatgagacggttttgtgcaatattccctacatgggagatgaagtgaaagaagaagatgagacttttattgaggagctgatcaataactatgatgggaaagtccatggtgaagaagagatgatccctggatccgttctgattagtgatgctgtttttctggagttggtcgatgccctgaatcagtactcagatgaggaggaggaagggcacaatgacacctcagatggaaagcaggatgacagcaaagaagatctgcc

SEQ ID NO: 129911 - DNA, 2501 bp, Homo sapiens
  Payload ID: 5413
  Gene Symbol: EZH1
  Gene Name: enhancer of zeste 1 polycomb repressive complex 2 subunit
  Uniprot ID: Q92800
  ENST ID: ENST00000592743
  CDS Start-End: 51-2294
atgcgtcctagcagcgggacccgcggctcgggatggaggattacagcaagatggaaataccaaatccccctacctccaaatgtatcacttactggaaaagaaaagtgaaatctgaatacatgcgacttcgacaacttaaacggcttcaggcaaatatgggtgcaaaggctttgtatgtggcaaattttgcaaaggttcaagaaaaaacccagatcctcaatgaagaatggaagaagcttcgtgtccaacctgttcagtcaatgaagcctgtgagtggacacccttttctcaaaaagtgtaccatagagagcattttcccgggatttgcaagccaacatatgttaatgaggtcactgaacacagttgcattggttcccatcatgtattcctggtcccctctccaacagaactttatggtagaagatgagacggttttgtgcaatattccctacatgggagatgaagtgaaagaagaagatgagacttttattgaggagctgatcaataactatgatgggaaagtccatggtgaagaagagatgatccctggatccgttctgattagtgatgctgtttttctggagttggtcgatgccctgaatcagtactcagatgaggaggaggaagggcacaatgacacctcagatggaaagcaggatgacagcaaagaagatctgccagtaacaagaaagagaaagcgacatgctattgaaggcaacaaaaagagttccaagaaacagttcccaaatgacatgatcttcagtgcaattgcctcaatgttccctgagaatggtgtcccagatgacatgaaggagaggtatcgagaactaacagagatgtcagaccccaatgcacttccccctcagtgcacacccaacatcgatggccccaatgccaagtctgtgcagcgggagcaatctctgcactccttccacacacttttttgccggcgctgctttaaatacgactgcttccttcacccttttcatgccacccctaatgtatataaacgcaagaataaagaaatcaagattgaaccagaaccatgtggcacagactgcttccttttgctggaaggagcaaaggagtatgccatgctccacaacccccgctccaagtgctctggtcgtcgccggagaaggcaccacatagtcagtgcttcctgctccaatgcctcagcctctgctgtggctgagactaaagaaggagacagtgacagggacacaggcaatgactgggcctccagttcttcagaggctaactctcgctgtcagactcccacaaaacagaaggctagtccagccccacctcaactctgcgtagtggaagcaccctcggagcctgtggaatggactggggctgaagaatctctttttcgagtcttccatggcacctacttcaacaacttctgttcaatagccaggcttctggggaccaagacgtgcaagcaggtctttcagtttgcagtcaaagaatcacttatcctgaagctgccaacagatgagctcatgaacccctcacagaagaagaaaagaaagcacagattgtgggctgcacactgcaggaagattcagctgaagaaagataactcttccacacaagtgtacaactaccaaccctgcgaccacccagaccgcccctgtgacagcacctgcccctgcatcatgactcagaatttctgtgagaagttctgccagtgcaacccagactgtcagaatcgtttccctggctgtcgctgtaagacccagtgcaataccaagcaatgtccttgctatctggcagtgcgagaatgtgaccctgacctgtgtctcacctgtggggcctcagagcactgggactgcaaggtggtttcctgtaaaaactgcagcatccagcgtggacttaagaagcacctgctgctggccccctctgatgtggccggatggggcaccttcataaaggagtctgtgcagaagaacgaattcatttctgaatactgtggtgagctcatctctcaggatgaggctgatcgacgcggaaaggtctatgacaaatacatgtccagcttcctcttcaacctcaataatgattttgtagtggatgctactcggaaaggaaacaaaattcgatttgcaaatcattcagtgaatcccaactgttatgccaaagtggtcatggtgaatggagaccatcggattgggatctttgccaagagggcaattcaagctggcgaagagctcttctttgattacaggtacagccaagctgatgctctcaagtacgtggggatcgagagggagaccgacgtcctttagccctcccaggccccacggcagcacttatggtagcggcactgtcttggctttcgtgctcacaccactgctgctcgagtctcctgcactgtgtctcccacactgagaaaccccccaacccactccctctgtagtgaggcctctgccatgtccagagggcacaaaactgtctcaatgagaggggagacagaggcagctagggcttggtct

SEQ ID NO: 129912 - DNA, 2283 bp, Homo sapiens
  Payload ID: 5413
  Gene Symbol: EZH1
  Gene Name: enhancer of zeste 1 polycomb repressive complex 2 subunit
  ENST ID: ENST00000588897
  CDS Start-End: 130-381
agcgggacccgcggctcgggatggaggctggacacctgttctgctgttgtgtcctgccattctcctgaagaacagaggcacactgtaaaacccaacacttccccttgcattctataagattacagcaagatggaaataccaaatccccctacctccaaatgtatcacttactggaaaagaaaagtgaaatctgaatacatgcgacttcgacaacttaaacggcttcaggcaaatatgggtgcaaaggctttgtatgtggcaaattttgcaaaggttcaagaaaaaacccagatcctcaatgaagaatggaagaagcttcgtgtccaacctgttcagtcaatgaagcctgtgagtggacacccttttctcaaaaagagatgatccctggatccgttctgattagtgatgctgtttttctggagttggtcgatgccctgaatcagtactcagatgaggaggaggaagggcacaatgacacctcagatggaaagcaggatgacagcaaagaagatctgccagtaacaagaaagagaaagcgacatgctattgaaggcaacaaaaagagttccaagaaacagttcccaaatgacatgatcttcagtgcaattgcctcaatgttccctgagaatggtgtcccagatgacatgaaggagaggtatcgagaactaacagagatgtcagaccccaatgcacttccccctcagtgcacacccaacatcgatggccccaatgccaagtctgtgcagcgggagcaatctctgcactccttccacacacttttttgccggcgctgctttaaatacgactgcttccttcacccttttcatgccacccctaatgtatataaacgcaagaataaagaaatcaagattgaaccagaaccatgtggcacagactgcttccttttgctggaaggagcaaaggagtatgccatgctccacaacccccgctccaagtgctctggtcgtcgccggagaaggcaccacatagtcagtgcttcctgctccaatgcctcagcctctgctgtggctgagactaaagaaggagacagtgacagggacacaggcaatgactgggcctccagttcttcagaggctaactctcgctgtcagactcccacaaaacagaaggctagtccagccccacctcaactctgcgtagtggaagcaccctcggagcctgtggaatggactggggctgaagaatctctttttcgagtcttccatggcacctacttcaacaacttctgttcaatagccaggcttctggggaccaagacgtgcaagcaggtctttcagtttgcagtcaaagaatcacttatcctgaagctgccaacagatgagctcatgaacccctcacagaagaagaaaagaaagcacagattgtgggctgcacactgcaggaagattcagctgaagaaagataactcttccacacaagtgtacaactaccaaccctgcgaccacccagaccgcccctgtgacagcacctgcccctgcatcatgactcagaatttctgtgagaagttctgccagtgcaacccagactgtcagaatcgtttccctggctgtcgctgtaagacccagtgcaataccaagcaatgtccttgctatctggcagtgcgagaatgtgaccctgacctgtgtctcacctgtggggcctcagagcactgggactgcaaggtggtttcctgtaaaaactgcagcatccagcgtggacttaagaagcacctgctgctggccccctctgatgtggccggatggggcaccttcataaaggagtctgtgcagaagaacgaattcatttctgaatactgtggtgagctcatctctcaggatgaggctgatcgacgcggaaaggtctatgacaaatacatgtccagcttcctcttcaacctcaataatgattttgtagtggatgctactcggaaaggaaacaaaattcgatttgcaaatcattcagtgaatcccaactgttatgccaaagtggtcatggtgaatggagaccatcggattgggatctttgccaagagggcaattcaagctggcgaagagctcttctttgattacaggtacagccaagctgatgctctcaagtacgtggggatcgagagggagaccgacgtcctttagccctcccaggccccacggcagcacttatggtagcggcactgtcttggctttcgtgctcacaccactgctgctcgagtctcctgcactgtgtctcccacactgagaaaccccccaacccactccctctgtagtgaggcctctgccatgtcca

SEQ ID NO: 129913 - DNA, 745 bp, Homo sapiens
  Payload ID: 5413
  Gene Symbol: EZH1
  Gene Name: enhancer of zeste 1 polycomb repressive complex 2 subunit
  ENST ID: ENST00000593214
  CDS Start-End: 247-745
cgggacccgcggctcgggatggaggagtctcactcttgttgcccaggccgcagtacaatggcgtgatctcagctcactgcaacctctgcctcccgggttcacatgattctcctgcctcagcctcccgagtagctgggattacagctggacacctgttctgctgttgtgtcctgccattctcctgaagaacagaggcacactgtaaaacccaacacttccccttgcattctataagattacagcaagatggaaataccaaatccccctacctccaaatgtatcacttactggaaaagaaaagtgaaatctgaatacatgcgacttcgacaacttaaacggcttcaggcaaatatgggtgcaaaggctttgtatgtggcaaattttgcaaaggttcaagaaaaaacccagatcctcaatgaagaatggaagaagcttcgtgtccaacctgttcagtcaatgaagcctgtgagtggacacccttttctcaaaaagtgtaccatagagagcattttcccgggatttgcaagccaacatatgttaatgaggtcactgaacacagttgcattggttcccatcatgtattcctggtcccctctccaacagaactttatggtagaagatgagacggttttgtgcaatattccctacatgggagatgaagtgaaagaagaagatgagacttttattgaggagctgatcaataactatgatgggaaagtccatggtgaagaagagatgatccctg

SEQ ID NO: 129914 - DNA, 2394 bp, Homo sapiens
  Payload ID: 5413
  Gene Symbol: EZH1
  Gene Name: enhancer of zeste 1 polycomb repressive complex 2 subunit
  Uniprot ID: Q92800
  ENST ID: ENST00000585893
  CDS Start-End: 124-2247
acccgcggctcgggatggaggctggacacctgttctgctgttgtgtcctgccattctcctgaagaacagaggcacactgtaaaacccaacacttccccttgcattctataagattacagcaagatggaaataccaaatccccctacctccaaatgtatcacttactggaaaagaaaagtgaaatctgaatacatgcgacttcgacaacttaaacggcttcaggcaaatatgggtgcaaaggctttgtatgtggcaaattttgcaaaggttcaagaaaaaacccagatcctcaatgaagaatggaagaagcttcgtgtccaacctgttcagtcaatgaagcctgtgagtggacacccttttctcaaaaaggtagaagatgagacggttttgtgcaatattccctacatgggagatgaagtgaaagaagaagatgagacttttattgaggagctgatcaataactatgatgggaaagtccatggtgaagaagagatgatccctggatccgttctgattagtgatgctgtttttctggagttggtcgatgccctgaatcagtactcagatgaggaggaggaagggcacaatgacacctcagatggaaagcaggatgacagcaaagaagatctgccagtaacaagaaagagaaagcgacatgctattgaaggcaacaaaaagagttccaagaaacagttcccaaatgacatgatcttcagtgcaattgcctcaatgttccctgagaatggtgtcccagatgacatgaaggagaggtatcgagaactaacagagatgtcagaccccaatgcacttccccctcagtgcacacccaacatcgatggccccaatgccaagtctgtgcagcgggagcaatctctgcactccttccacacacttttttgccggcgctgctttaaatacgactgcttccttcacccttttcatgccacccctaatgtatataaacgcaagaataaagaaatcaagattgaaccagaaccatgtggcacagactgcttccttttgctggaaggagcaaaggagtatgccatgctccacaacccccgctccaagtgctctggtcgtcgccggagaaggcaccacatagtcagtgcttcctgctccaatgcctcagcctctgctgtggctgagactaaagaaggagacagtgacagggacacaggcaatgactgggcctccagttcttcagaggctaactctcgctgtcagactcccacaaaacagaaggctagtccagccccacctcaactctgcgtagtggaagcaccctcggagcctgtggaatggactggggctgaagaatctctttttcgagtcttccatggcacctacttcaacaacttctgttcaatagccaggcttctggggaccaagacgtgcaagcaggtctttcagtttgcagtcaaagaatcacttatcctgaagctgccaacagatgagctcatgaacccctcacagaagaagaaaagaaagcacagattgtgggctgcacactgcaggaagattcagctgaagaaagataactcttccacacaagtgtacaactaccaaccctgcgaccacccagaccgcccctgtgacagcacctgcccctgcatcatgactcagaatttctgtgagaagttctgccagtgcaacccagactgtcagaatcgtttccctggctgtcgctgtaagacccagtgcaataccaagcaatgtccttgctatctggcagtgcgagaatgtgaccctgacctgtgtctcacctgtggggcctcagagcactgggactgcaaggtggtttcctgtaaaaactgcagcatccagcgtggacttaagaagcacctgctgctggccccctctgatgtggccggatggggcaccttcataaaggagtctgtgcagaagaacgaattcatttctgaatactgtggtgagctcatctctcaggatgaggctgatcgacgcggaaaggtctatgacaaatacatgtccagcttcctcttcaacctcaataatgattttgtagtggatgctactcggaaaggaaacaaaattcgatttgcaaatcattcagtgaatcccaactgttatgccaaagtggtcatggtgaatggagaccatcggattgggatctttgccaagagggcaattcaagctggcgaagagctcttctttgattacaggtacagccaagctgatgctctcaagtacgtggggatcgagagggagaccgacgtcctttagccctcccaggccccacggcagcacttatggtagcggcactgtcttggctttcgtgctcacaccactgctgctcgagtctcctgcactgtgtctcccacactgagaaaccccccaacccactccctctgtagtgaggcctctgccatg

SEQ ID NO: 129915 - DNA, 819 bp, Homo sapiens
  Payload ID: 5413
  Gene Symbol: EZH1
  Gene Name: enhancer of zeste 1 polycomb repressive complex 2 subunit
  ENST ID: ENST00000588239
  CDS Start-End: 1-154
aacaagaaagagaaagcgacatgctattgaaggcaacaaaaagagttccaagaaacagttcccaaatgacatgatcttcagtgcaattgcctcaatgttccctgagaatggtgtcccagatgacatgaaggagagcttttcatgccacccctaatgtatataaacgcaagaataaagaaatcaagattgaaccagaaccatgtggcacagactgcttccttttgctggaaggagcaaaggagtatgccatgctccacaacccccgctccaagtgctctggtcgtcgccggagaaggcaccacatagtcagtgcttcctgctccaatgcctcagcctctgctgtggctgagactaaagaaggagacagtgacagggacacaggcaatgactgggcctccagttcttcagaggctaactctcgctgtcagactcccacaaaacagaaggctagtccagccccacctcaactctgcgtagtggaagcaccctcggagcctgtggaatggactggggctgaagaatctctttttcgagtcttccatggcacctacttcaacaacttctgttcaatagccaggcttctggggaccaagacgtgcaagcaggtctttcagtttgcagtcaaagaatcacttatcctgaagctgccaacagatgagctcatgaacccctcacagaagaagaaaagaaagcacagattgtgggctgcacactgcaggaagattcagctgaagaaagataactcttccacacaagtgtacaactaccaaccctgcgaccacccagaccgcccctgtgacagcacctgcccctgcatca

SEQ ID NO: 129916 - DNA, 2477 bp, Homo sapiens
  Payload ID: 5414
  Gene Symbol: EZH2
  Gene Name: enhancer of zeste 2 polycomb repressive complex 2 subunit
  Uniprot ID: Q15910
  ENST ID: ENST00000350995
  CDS Start-End: 93-2216
agaaggcagtggagccccggcggcggcggcggcggcgcgcgggggcgacgcgcgggaacaacgcgagtcggcgcgcgggacgaagaataatcatgggccagactgggaagaaatctgagaagggaccagtttgttggcggaagcgtgtaaaatcagagtacatgcgactgagacagctcaagaggttcagacgagctgatgaagtaaagagtatgtttagttccaatcgtcagaaaattttggaaagaacggaaatcttaaaccaagaatggaaacagcgaaggatacagcctgtgcacatcctgacttctgtgagctcattgcgcgggactagggaggtggaagatgaaactgttttacataacattccttatatgggagatgaagttttagatcaggatggtactttcattgaagaactaataaaaaattatgatgggaaagtacacggggatagagaatgtgggtttataaatgatgaaatttttgtggagttggtgaatgcccttggtcaatataatgatgatgacgatgatgatgatggagacgatcctgaagaaagagaagaaaagcagaaagatctggaggatcaccgagatgataaagaaagccgcccacctcggaaatttccttctgataaaatttttgaagccatttcctcaatgtttccagataagggcacagcagaagaactaaaggaaaaatataaagaactcaccgaacagcagctcccaggcgcacttcctcctgaatgtacccccaacatagatggaccaaatgctaaatctgttcagagagagcaaagcttacactcctttcatacgcttttctgtaggcgatgttttaaatatgactgcttcctacatccttttcatgcaacacccaacacttataagcggaagaacacagaaacagctctagacaacaaaccttgtggaccacagtgttaccagcatttggagggagcaaaggagtttgctgctgctctcaccgctgagcggataaagaccccaccaaaacgtccaggaggccgcagaagaggacggcttcccaataacagtagcaggcccagcacccccaccattaatgtgctggaatcaaaggatacagacagtgatagggaagcagggactgaaacggggggagagaacaatgataaagaagaagaagagaagaaagatgaaacttcgagctcctctgaagcaaattctcggtgtcaaacaccaataaagatgaagccaaatattgaacctcctgagaatgtggagtggagtggtgctgaagcctcaatgtttagagtcctcattggcacttactatgacaatttctgtgccattgctaggttaattgggaccaaaacatgtagacaggtgtatgagtttagagtcaaagaatctagcatcatagctccagctcccgctgaggatgtggatactcctccaaggaaaaagaagaggaaacaccggttgtgggctgcacactgcagaaagatacagctgaaaaaggacggctcctctaaccatgtttacaactatcaaccctgtgatcatccacggcagccttgtgacagttcgtgcccttgtgtgatagcacaaaatttttgtgaaaagttttgtcaatgtagttcagagtgtcaaaaccgctttccgggatgccgctgcaaagcacagtgcaacaccaagcagtgcccgtgctacctggctgtccgagagtgtgaccctgacctctgtcttacttgtggagccgctgaccattgggacagtaaaaatgtgtcctgcaagaactgcagtattcagcggggctccaaaaagcatctattgctggcaccatctgacgtggcaggctgggggatttttatcaaagatcctgtgcagaaaaatgaattcatctcagaatactgtggagagattatttctcaagatgaagctgacagaagagggaaagtgtatgataaatacatgtgcagctttctgttcaacttgaacaatgattttgtggtggatgcaacccgcaagggtaacaaaattcgttttgcaaatcattcggtaaatccaaactgctatgcaaaagttatgatggttaacggtgatcacaggataggtatttttgccaagagagccatccagactggcgaagagctgttttttgattacagatacagccaggctgatgccctgaagtatgtcggcatcgaaagagaaatggaaatcccttgacatctgctacctcctcccccctcctctgaaacagctgccttagcttcaggaacctcgagtactgtgggcaatttagaaaaagaacatgcagtttgaaattctgaatttgcaaagtactgtaagaataatttatagtaatgagtttaaaaatcaactttttattgccttctcaccagctgcaaagtgttttgtaccagtgaatttttgcaataatgcagtatggtacatttttcaactttgaataaagaatacttgaacttg

SEQ ID NO: 129917 - DNA, 2639 bp, Homo sapiens
  Payload ID: 5414
  Gene Symbol: EZH2
  Gene Name: enhancer of zeste 2 polycomb repressive complex 2 subunit
  Uniprot ID: Q15910
  ENST ID: ENST00000320356
  CDS Start-End: 123-2378
tccggtcgcgtccgacacccggtgggactcagaaggcagtggagccccggcggcggcggcggcggcgcgcgggggcgacgcgcgggaacaacgcgagtcggcgcgcgggacgaagaataatcatgggccagactgggaagaaatctgagaagggaccagtttgttggcggaagcgtgtaaaatcagagtacatgcgactgagacagctcaagaggttcagacgagctgatgaagtaaagagtatgtttagttccaatcgtcagaaaattttggaaagaacggaaatcttaaaccaagaatggaaacagcgaaggatacagcctgtgcacatcctgacttctgtgagctcattgcgcgggactagggagtgttcggtgaccagtgacttggattttccaacacaagtcatcccattaaagactctgaatgcagttgcttcagtacccataatgtattcttggtctcccctacagcagaattttatggtggaagatgaaactgttttacataacattccttatatgggagatgaagttttagatcaggatggtactttcattgaagaactaataaaaaattatgatgggaaagtacacggggatagagaatgtgggtttataaatgatgaaatttttgtggagttggtgaatgcccttggtcaatataatgatgatgacgatgatgatgatggagacgatcctgaagaaagagaagaaaagcagaaagatctggaggatcaccgagatgataaagaaagccgcccacctcggaaatttccttctgataaaatttttgaagccatttcctcaatgtttccagataagggcacagcagaagaactaaaggaaaaatataaagaactcaccgaacagcagctcccaggcgcacttcctcctgaatgtacccccaacatagatggaccaaatgctaaatctgttcagagagagcaaagcttacactcctttcatacgcttttctgtaggcgatgttttaaatatgactgcttcctacatcgtaagtgcaattattcttttcatgcaacacccaacacttataagcggaagaacacagaaacagctctagacaacaaaccttgtggaccacagtgttaccagcatttggagggagcaaaggagtttgctgctgctctcaccgctgagcggataaagaccccaccaaaacgtccaggaggccgcagaagaggacggcttcccaataacagtagcaggcccagcacccccaccattaatgtgctggaatcaaaggatacagacagtgatagggaagcagggactgaaacggggggagagaacaatgataaagaagaagaagagaagaaagatgaaacttcgagctcctctgaagcaaattctcggtgtcaaacaccaataaagatgaagccaaatattgaacctcctgagaatgtggagtggagtggtgctgaagcctcaatgtttagagtcctcattggcacttactatgacaatttctgtgccattgctaggttaattgggaccaaaacatgtagacaggtgtatgagtttagagtcaaagaatctagcatcatagctccagctcccgctgaggatgtggatactcctccaaggaaaaagaagaggaaacaccggttgtgggctgcacactgcagaaagatacagctgaaaaaggacggctcctctaaccatgtttacaactatcaaccctgtgatcatccacggcagccttgtgacagttcgtgcccttgtgtgatagcacaaaatttttgtgaaaagttttgtcaatgtagttcagagtgtcaaaaccgctttccgggatgccgctgcaaagcacagtgcaacaccaagcagtgcccgtgctacctggctgtccgagagtgtgaccctgacctctgtcttacttgtggagccgctgaccattgggacagtaaaaatgtgtcctgcaagaactgcagtattcagcggggctccaaaaagcatctattgctggcaccatctgacgtggcaggctgggggatttttatcaaagatcctgtgcagaaaaatgaattcatctcagaatactgtggagagattatttctcaagatgaagctgacagaagagggaaagtgtatgataaatacatgtgcagctttctgttcaacttgaacaatgattttgtggtggatgcaacccgcaagggtaacaaaattcgttttgcaaatcattcggtaaatccaaactgctatgcaaaagttatgatggttaacggtgatcacaggataggtatttttgccaagagagccatccagactggcgaagagctgttttttgattacagatacagccaggctgatgccctgaagtatgtcggcatcgaaagagaaatggaaatcccttgacatctgctacctcctcccccctcctctgaaacagctgccttagcttcaggaacctcgagtactgtgggcaatttagaaaaagaacatgcagtttgaaattctgaatttgcaaagtactgtaagaataatttatagtaatgagtttaaaaatcaactttttattgccttctcaccagctgcaaagtgttttgtaccagtgaatttttgcaataatgcagtatggtacatttttcaactttgaataaagaatacttgaacttg

SEQ ID NO: 129918 - DNA, 2522 bp, Homo sapiens
  Payload ID: 5414
  Gene Symbol: EZH2
  Gene Name: enhancer of zeste 2 polycomb repressive complex 2 subunit
  Uniprot ID: Q15910
  ENST ID: ENST00000478654
  CDS Start-End: 173-2260
cgcgccgctgcgggcggcccggccggcggggctccgggagtgcgaaccgggcggcggcggcggcgccaggacctccccgccactgctgtgccggtcccggggttactttttgaaagcgggaggaatcgagaagcacgatcttttggaaaacttggtgaacgcctaaataatcatgggccagactgggaagaaatctgagaagggaccagtttgttggcggaagcgtgtaaaatcagagtacatgcgactgagacagctcaagaggttcagacgagctgatgaagtaaagagtatgtttagttccaatcgtcagaaaattttggaaagaacggaaatcttaaaccaagaatggaaacagcgaaggatacagcctgtgcacatcctgacttcttgttcggtgaccagtgacttggattttccaacacaagtcatcccattaaagactctgaatgcagttgcttcagtacccataatgtattcttggtctcccctacagcagaattttatggtggaagatgaaactgttttacataacattccttatatgggagatgaagttttagatcaggatggtactttcattgaagaactaataaaaaattatgatgggaaagtacacggggatagagaatgtgggtttataaatgatgaaatttttgtggagttggtgaatgcccttggtcaatataatgatgatgacgatgatgatgatggagacgatcctgaagaaagagaagaaaagcagaaagatctggaggatcaccgagatgataaagaaagccgcccacctcggaaatttccttctgataaaatttttgaagccatttcctcaatgtttccagataagggcacagcagaagaactaaaggaaaaatataaagaactcaccgaacagcagctcccaggcgcacttcctcctgaatgtacccccaacatagatggaccaaatgctaaatctgttcagagagagcaaagcttacactcctttcatacgcttttctgtaggcgatgttttaaatatgactgcttcctacatccttttcatgcaacacccaacacttataagcggaagaacacagaaacagctctagacaacaaaccttgtggaccacagtgttaccagcatttggagggagcaaaggagtttgctgctgctctcaccgctgagcggataaagaccccaccaaaacgtccaggaggccgcagaagaggacggcttcccaataacagtagcaggcccagcacccccaccattaatgtgctggaatcaaaggatacagacagtgatagggaagcagggactgaaacggggggagagaacaatgataaagaagaagaagagaagaaagatgaaacttcgagctcctctgaagcaaattctcggtgtcaaacaccaataaagatgaagccaaatattgaacctcctgagaatgtggagtggagtggtgctgaagcctcaatgtttagagtcctcattggcacttactatgacaatttctgtgccattgctaggttaattgggaccaaaacatgtagacaggtgtatgagtttagagtcaaagaatctagcatcatagctccagctcccgctgaggatgtggatactcctccaaggaaaaagaagaggaaacaccggttgtgggctgcacactgcagaaagatacagctgaaaaagggtcaaaaccgctttccgggatgccgctgcaaagcacagtgcaacaccaagcagtgcccgtgctacctggctgtccgagagtgtgaccctgacctctgtcttacttgtggagccgctgaccattgggacagtaaaaatgtgtcctgcaagaactgcagtattcagcggggctccaaaaagcatctattgctggcaccatctgacgtggcaggctgggggatttttatcaaagatcctgtgcagaaaaatgaattcatctcagaatactgtggagagattatttctcaagatgaagctgacagaagagggaaagtgtatgataaatacatgtgcagctttctgttcaacttgaacaatgattttgtggtggatgcaacccgcaagggtaacaaaattcgttttgcaaatcattcggtaaatccaaactgctatgcaaaagttatgatggttaacggtgatcacaggataggtatttttgccaagagagccatccagactggcgaagagctgttttttgattacagatacagccaggctgatgccctgaagtatgtcggcatcgaaagagaaatggaaatcccttgacatctgctacctcctcccccctcctctgaaacagctgccttagcttcaggaacctcgagtactgtgggcaatttagaaaaagaacatgcagtttgaaattctgaatttgcaaagtactgtaagaataatttatagtaatgagtttaaaaatcaactttttattgccttctcaccagctgcaaagtgttttgtaccagtgaatttttgcaataatgcagtatggtacatttttcaactttgaataaagaatacttgaacttgt

SEQ ID NO: 129919 - DNA, 3641 bp, Homo sapiens
  Payload ID: 5414
  Gene Symbol: EZH2
  Gene Name: enhancer of zeste 2 polycomb repressive complex 2 subunit
  ENST ID: ENST00000492143
  CDS Start-End: 128-1132
ctcggtccggtcgcgtccgacacccggtgggactcagaaggcagtggagccccggcggcggcggcggcggcgcgcgggggcgacgcgcgggaacaacgcgagtcggcgcgcgggacgaagaataatcatgggccagactgggaagaaatctgagaagggaccagtttgttggcggaagcgtgtaaaatcagagtacatgcgactgagacagctcaagaggttcagacgagctgatgaagtaaagagtatgtttagttccaatcgtcagaaaattttggaaagaacggaaatcttaaaccaagaatggaaacagcgaaggatacagcctgtgcacatcctgacttctgtgagctcattgcgcgggactagggagtgttcggtgaccagtgacttggattttccaacacaagtcatcccattaaagactctgaatgcagttgcttcagtacccataatgtattcttggtctcccctacagcagaattttatggtggaagatgaaactgttttacataacattccttatatgggagatgaagttttagatcaggatggtactttcattgaagaactaataaaaaattatgatgggaaagtacacggggatagagaatgtgggtttataaatgatgaaatttttgtggagttggtgaatgcccttggtcaatataatgatgatgacgatgatgatgatggagacgatcctgaagaaagagaagaaaagcagaaagatctggaggatcaccgagatgataaagaaagccgcccacctcggaaatttccttctgataaaatttttgaagccatttcctcaatgtttccagataagggcacagcagaagaactaaaggaaaaatataaagaactcaccgaacagcagctcccaggcgcacttcctcctgaatgtacccccaacatagatggaccaaatgctaaatctgttcagagagagcaaagcttacactcctttcatacgcttttctgtaggcgatgttttaaatatgactgcttcctacatccttttcatgcaacacccaacacttataagcggaagaacacagaaacagctctagacaacaaaccttgtggaccacagtgttaccagcatttgccactcctacctaggaactaaatgggtatatattgcctgttggattttggacagaagattcattgaatggcacctgcagaaggagggagcaaaggagtttgctgctgctctcaccgctgagcggataaagaccccaccaaaacgtccaggaggccgcagaagaggacggcttcccaataacagtagcaggcccagcacccccaccattaatgtgctggaatcaaaggatacagacagtgatagggaagcagggactgaaacggggggagagaacaatgataaagaagaagaagagaagaaagatgaaacttcgagctcctctggtaagacacgtctaataactgggttttactgttctgtgaaagttcgtgttgtgaggattaaggatgtataatgcattgaataattttcttagttggttagtttcagtataaagaccagagttatctcaagaatgtgtagctgtgttgtttctgtttcctgcctgcacccgtaccctagcttgtggtgtttgccctgcttggttgtttgaaagctgatgatgcactttattctcattctttgtgccattttcttttttcgatctttctcaggtagggaataatgaaatttggatcatttggtttaatattcttgacgttctgtgagtagttttgttggaaaatgtgaactacgatgggttagtgttttgccgattggatttgagttgtcctcatcttttcgcttttttcttaagcacaccctgaattgtacttcttaatattatttccaatcatttcttgaccagtgcttacatttggttttgtagaagcaaattctcggtgtcaaacaccaataaagatgaagccaaatattgaacctcctgagaatgtggagtggagtggtgctgaagcctcaatgtttagagtcctcattggcacttactatgacaatttctgtgccattgctaggttaattgggaccaaaacatgtagacaggtaagatatccgataaaaatgttgttaaaagagcttcaaacatagagataaaactgtactcgttgtccaaacaaagaaaattcttggttattactaagctcctattcatctcctaaaaataatttttttttcttcccaagagggaattgaatgaaaattattctccaggtatgttacagaatttccccaatgtagacttttaaggttagatagcagtagcttttaaaagctagtaagaattgaaatttagcatcacagttcttgaccagaatataattacagctacccctaatgtgagggtagggacagcgatgtgtgttatatccccagcatctagcagtgtcacagaagagacaaagacatttttctggtatgcatgagtataagaatggtttgcctaaataagactgtcctcatggctctgtgactgtgcctcttgtcaggtgtatgagtttagagtcaaagaatctagcatcatagctccagctcccgctgaggatgtggatactcctccaaggaaaaagaagaggaaacaccggttgtgggctgcacactgcagaaagatacagctgaaaaaggacggctcctctaaccatgtttacaactatcaaccctgtgatcatccacggcagccttgtgacagttcgtgcccttgtgtgatagcacaaaatttttgtgaaaagttttgtcaatgtagttcagagtgtcaaaaccgctttccgggatgccgctgcaaagcacagtgcaacaccaagcagtgcccgtgctacctggctgtccgagagtgtgaccctgacctctgtcttacttgtggagccgctgaccattgggacagtaaaaatgtgtcctgcaagaactgcagtattcagcggggctccaaaaagcatctattgctggcaccatctgacgtggcaggctgggggatttttatcaaagatcctgtgcagaaaaatgaattcatctcagaatactgtggagagattatttctcaagatgaagctgacagaagagggaaagtgtatgataaatacatgtgcagctttctgttcaacttgaacaatgattttgtggtggatgcaacccgcaagggtaacaaaattcgttttgcaaatcattcggtaaatccaaactgctatgcaaaagttatgatggttaacggtgatcacaggataggtatttttgccaagagagccatccagactggcgaagagctgttttttgattacagatacagccaggctgatgccctgaagtatgtcggcatcgaaagagaaatggaaatcccttgacatctgctacctcctcccccctcctctgaaacagctgccttagcttcaggaacctcgagtactgtgggcaatttagaaaaagaacatgcagtttgaaattctgaatttgcaaagtactgtaagaataatttatagtaatgagtttaaaaatcaactttttattgccttctcaccagctgcaaagtgttttgtaccagtgaatttttgcaataatgcagtatggtacatttttcaactttgaataaagaatacttgaacttgtc

SEQ ID NO: 129920 - DNA, 1491 bp, Homo sapiens
  Payload ID: 5414
  Gene Symbol: EZH2
  Gene Name: enhancer of zeste 2 polycomb repressive complex 2 subunit
  ENST ID: ENST00000483012
  CDS Start-End: 166-600
aaataaaagcgatggcgattgggctgccgcgtttggcgctcggtccggtcgcgtccgacacccggtgggactcagaaggcagtggagccccggcggcggcggcggcggcgcgcgggggcgacgcgcgggaacaacgcgagtcggcgcgcgggacgaagaataatcatgggccagactgggaagaaatctgagaagggaccagtttgttggcggaagcgtgtaaaatcagagtacatgcgactgagacagctcaagaggttcagacgagctgatgaagtaaagagtatgtttagttccaatcgtcagaaaattttggaaagaacggaaatcttaaaccaagaatggaaacagcgaaggatacagcctgtgcacatcctgacttctgtgagctcattgcgcgggactagggaggccattcacctgctcttccctctacgattttccataacacagtttttacttggaaccagccttctgccaagagtctcagtttggttgtgtactcctacaactactatttttggcttgacttccctctccagctcccagtggtccagccacacagtcgcctattgtaccagctggttgattgttcggtgaccagtgacttggattttccaacacaagtcatcccattaaagactctgaatgcagttgcttcagtacccataatgtattcttggtctcccctacagcagaattttatggtggaagatgaaactgttttacataacattccttatatgggagatgaagttttagatcaggatggtactttcattgaagaactaataaaaaattatgatgggaaagtacacggggatagagaatgtgggtttataaatgatgaaatttttgtggagttggtgaatgcccttggtcaatataatgatgatgacgatgatgatgatggagacgatcctgaagaaagagaagaaaagcagaaagatctggaggatcaccgagatgataaagaaagccgcccacctcggaaatttccttctgataaaatttttgaagccatttcctcaatgtttccagataagggcacagcagaagaactaaaggaaaaatataaagaactcaccgaacagcagctcccaggcgcacttcctcctgaatgtacccccaacatagatggaccaaatgctaaatctgttcagagagagcaaagcttacactcctttcatacgcttttctgtaggcgatgttttaaatatgactgcttcctacatccttttcatgcaacacccaacacttataagcggaagaacacagaaacagctctagacaacaaaccttgtggaccacagtgttaccagcatttgccactcctacctaggaactaaatgggtatatattgcctgttggattttggacagaagattcattgaatggcacctgcagaaggagggagcaaaggagtttgctgctgctctcaccgctgagcggataaagaccccaccaaaacgtccaggaggccgcagaaga

SEQ ID NO: 129921 - DNA, 2572 bp, Homo sapiens
  Payload ID: 5414
  Gene Symbol: EZH2
  Gene Name: enhancer of zeste 2 polycomb repressive complex 2 subunit
  Uniprot ID: Q15910
  ENST ID: ENST00000476773
  CDS Start-End: 321-2408
gacgacgttcgcggcggggaactcggagtagcttcgcctctgacgtttccccacgacgcaccccgaaatccccctgagctccggcggtcgcgggctgccctcgccgcctggtctggctttatgctaagtttgagggaagagtcgagctgctctgctctctattgattgtgtttctggagggcgtcctgttgaattcccacttcattgtgtacatccccttccgttccccccaaaaatctgtgccacagggttactttttgaaagcgggaggaatcgagaagcacgatcttttggaaaacttggtgaacgcctaaataatcatgggccagactgggaagaaatctgagaagggaccagtttgttggcggaagcgtgtaaaatcagagtacatgcgactgagacagctcaagaggttcagacgagctgatgaagtaaagagtatgtttagttccaatcgtcagaaaattttggaaagaacggaaatcttaaaccaagaatggaaacagcgaaggatacagcctgtgcacatcctgacttcttgttcggtgaccagtgacttggattttccaacacaagtcatcccattaaagactctgaatgcagttgcttcagtacccataatgtattcttggtctcccctacagcagaattttatggtggaagatgaaactgttttacataacattccttatatgggagatgaagttttagatcaggatggtactttcattgaagaactaataaaaaattatgatgggaaagtacacggggatagagaatgtgggtttataaatgatgaaatttttgtggagttggtgaatgcccttggtcaatataatgatgatgacgatgatgatgatggagacgatcctgaagaaagagaagaaaagcagaaagatctggaggatcaccgagatgataaagaaagccgcccacctcggaaatttccttctgataaaatttttgaagccatttcctcaatgtttccagataagggcacagcagaagaactaaaggaaaaatataaagaactcaccgaacagcagctcccaggcgcacttcctcctgaatgtacccccaacatagatggaccaaatgctaaatctgttcagagagagcaaagcttacactcctttcatacgcttttctgtaggcgatgttttaaatatgactgcttcctacatccttttcatgcaacacccaacacttataagcggaagaacacagaaacagctctagacaacaaaccttgtggaccacagtgttaccagcatttggagggagcaaaggagtttgctgctgctctcaccgctgagcggataaagaccccaccaaaacgtccaggaggccgcagaagaggacggcttcccaataacagtagcaggcccagcacccccaccattaatgtgctggaatcaaaggatacagacagtgatagggaagcagggactgaaacggggggagagaacaatgataaagaagaagaagagaagaaagatgaaacttcgagctcctctgaagcaaattctcggtgtcaaacaccaataaagatgaagccaaatattgaacctcctgagaatgtggagtggagtggtgctgaagcctcaatgtttagagtcctcattggcacttactatgacaatttctgtgccattgctaggttaattgggaccaaaacatgtagacaggtgtatgagtttagagtcaaagaatctagcatcatagctccagctcccgctgaggatgtggatactcctccaaggaaaaagaagaggaaacaccggttgtgggctgcacactgcagaaagatacagctgaaaaagggtcaaaaccgctttccgggatgccgctgcaaagcacagtgcaacaccaagcagtgcccgtgctacctggctgtccgagagtgtgaccctgacctctgtcttacttgtggagccgctgaccattgggacagtaaaaatgtgtcctgcaagaactgcagtattcagcggggctccaaaaagcatctattgctggcaccatctgacgtggcaggctgggggatttttatcaaagatcctgtgcagaaaaatgaattcatctcagaatactgtggagagattatttctcaagatgaagctgacagaagagggaaagtgtatgataaatacatgtgcagctttctgttcaacttgaacaatgattttgtggtggatgcaacccgcaagggtaacaaaattcgttttgcaaatcattcggtaaatccaaactgctatgcaaaagttatgatggttaacggtgatcacaggataggtatttttgccaagagagccatccagactggcgaagagctgttttttgattacagatacagccaggctgatgccctgaagtatgtcggcatcgaaagagaaatggaaatcccttgacatctgctacctcctcccccctcctctgaaacagctgccttagcttcaggaacctcgagtactgtgggcaatttagaaaaagaacatgcagtttgaaattctgaatttgcaaagtactgtaagaataatttatagtaatgagtttaaaaatcaactttttattg

SEQ ID NO: 129922 - DNA, 2591 bp, Homo sapiens
  Payload ID: 5414
  Gene Symbol: EZH2
  Gene Name: enhancer of zeste 2 polycomb repressive complex 2 subunit
  Uniprot ID: Q15910
  ENST ID: ENST00000460911
  CDS Start-End: 90-2330
aggcagtggagccccggcggcggcggcggcggcgcgcgggggcgacgcgcgggaacaacgcgagtcggcgcgcgggacgaagaataatcatgggccagactgggaagaaatctgagaagggaccagtttgttggcggaagcgtgtaaaatcagagtacatgcgactgagacagctcaagaggttcagacgagctgatgaagtaaagagtatgtttagttccaatcgtcagaaaattttggaaagaacggaaatcttaaaccaagaatggaaacagcgaaggatacagcctgtgcacatcctgacttctgtgagctcattgcgcgggactagggagtgttcggtgaccagtgacttggattttccaacacaagtcatcccattaaagactctgaatgcagttgcttcagtacccataatgtattcttggtctcccctacagcagaattttatggtggaagatgaaactgttttacataacattccttatatgggagatgaagttttagatcaggatggtactttcattgaagaactaataaaaaattatgatgggaaagtacacggggatagagaatgtgggtttataaatgatgaaatttttgtggagttggtgaatgcccttggtcaatataatgatgatgacgatgatgatgatggagacgatcctgaagaaagagaagaaaagcagaaagatctggaggatcaccgagatgataaagaaagccgcccacctcggaaatttccttctgataaaatttttgaagccatttcctcaatgtttccagataagggcacagcagaagaactaaaggaaaaatataaagaactcaccgaacagcagctcccaggcgcacttcctcctgaatgtacccccaacatagatggaccaaatgctaaatctgttcagagagagcaaagcttacactcctttcatacgcttttctgtaggcgatgttttaaatatgactgcttcctacatccttttcatgcaacacccaacacttataagcggaagaacacagaaacagctctagacaacaaaccttgtggaccacagtgttaccagcatttggagggagcaaaggagtttgctgctgctctcaccgctgagcggataaagaccccaccaaaacgtccaggaggccgcagaagaggacggcttcccaataacagtagcaggcccagcacccccaccattaatgtgctggaatcaaaggatacagacagtgatagggaagcagggactgaaacggggggagagaacaatgataaagaagaagaagagaagaaagatgaaacttcgagctcctctgaagcaaattctcggtgtcaaacaccaataaagatgaagccaaatattgaacctcctgagaatgtggagtggagtggtgctgaagcctcaatgtttagagtcctcattggcacttactatgacaatttctgtgccattgctaggttaattgggaccaaaacatgtagacaggtgtatgagtttagagtcaaagaatctagcatcatagctccagctcccgctgaggatgtggatactcctccaaggaaaaagaagaggaaacaccggttgtgggctgcacactgcagaaagatacagctgaaaaaggacggctcctctaaccatgtttacaactatcaaccctgtgatcatccacggcagccttgtgacagttcgtgcccttgtgtgatagcacaaaatttttgtgaaaagttttgtcaatgtagttcagagtgtcaaaaccgctttccgggatgccgctgcaaagcacagtgcaacaccaagcagtgcccgtgctacctggctgtccgagagtgtgaccctgacctctgtcttacttgtggagccgctgaccattgggacagtaaaaatgtgtcctgcaagaactgcagtattcagcggggctccaaaaagcatctattgctggcaccatctgacgtggcaggctgggggatttttatcaaagatcctgtgcagaaaaatgaattcatctcagaatactgtggagagattatttctcaagatgaagctgacagaagagggaaagtgtatgataaatacatgtgcagctttctgttcaacttgaacaatgattttgtggtggatgcaacccgcaagggtaacaaaattcgttttgcaaatcattcggtaaatccaaactgctatgcaaaagttatgatggttaacggtgatcacaggataggtatttttgccaagagagccatccagactggcgaagagctgttttttgattacagatacagccaggctgatgccctgaagtatgtcggcatcgaaagagaaatggaaatcccttgacatctgctacctcctcccccctcctctgaaacagctgccttagcttcaggaacctcgagtactgtgggcaatttagaaaaagaacatgcagtttgaaattctgaatttgcaaagtactgtaagaataatttatagtaatgagtttaaaaatcaactttttattgccttctcaccagctgcaaagtgttttgtaccagtgaatttttgcaataatgcagtatggtacatttttcaactttgaataaagaatacttgaacttg

SEQ ID NO: 129923 - DNA, 2466 bp, Homo sapiens
  Payload ID: 5414
  Gene Symbol: EZH2
  Gene Name: enhancer of zeste 2 polycomb repressive complex 2 subunit
  Uniprot ID: Q15910
  ENST ID: ENST00000483967
  CDS Start-End: 132-2345
ggcgctcggtccggtcgcgtccgacacccggtgggactcagaaggcagtggagccccggcggcggcggcggcggcgcgcgggggcgacgcgcgggaacaacgcgagtcggcgcgcgggacgaagaataatcatgggccagactgggaagaaatctgagaagggaccagtttgttggcggaagcgtgtaaaatcagagtacatgcgactgagacagctcaagaggttcagacgagctgatgaagtaaagagtatgtttagttccaatcgtcagaaaattttggaaagaacggaaatcttaaaccaagaatggaaacagcgaaggatacagcctgtgcacatcctgacttcttgttcggtgaccagtgacttggattttccaacacaagtcatcccattaaagactctgaatgcagttgcttcagtacccataatgtattcttggtctcccctacagcagaattttatggtggaagatgaaactgttttacataacattccttatatgggagatgaagttttagatcaggatggtactttcattgaagaactaataaaaaattatgatgggaaagtacacggggatagagaatgtgggtttataaatgatgaaatttttgtggagttggtgaatgcccttggtcaatataatgatgatgacgatgatgatgatggagacgatcctgaagaaagagaagaaaagcagaaagatctggaggatcaccgagatgataaagaaagccgcccacctcggaaatttccttctgataaaatttttgaagccatttcctcaatgtttccagataagggcacagcagaagaactaaaggaaaaatataaagaactcaccgaacagcagctcccaggcgcacttcctcctgaatgtacccccaacatagatggaccaaatgctaaatctgttcagagagagcaaagcttacactcctttcatacgcttttctgtaggcgatgttttaaatatgactgcttcctacatccttttcatgcaacacccaacacttataagcggaagaacacagaaacagctctagacaacaaaccttgtggaccacagtgttaccagcatttggagggagcaaaggagtttgctgctgctctcaccgctgagcggataaagaccccaccaaaacgtccaggaggccgcagaagaggacggcttcccaataacagtagcaggcccagcacccccaccattaatgtgctggaatcaaaggatacagacagtgatagggaagcagggactgaaacggggggagagaacaatgataaagaagaagaagagaagaaagatgaaacttcgagctcctctgaagcaaattctcggtgtcaaacaccaataaagatgaagccaaatattgaacctcctgagaatgtggagtggagtggtgctgaagcctcaatgtttagagtcctcattggcacttactatgacaatttctgtgccattgctaggttaattgggaccaaaacatgtagacaggtgtatgagtttagagtcaaagaatctagcatcatagctccagctcccgctgaggatgtggatactcctccaaggaaaaagaagaggaaacaccggttgtgggctgcacactgcagaaagatacagctgaaaaaggacggctcctctaaccatgtttacaactatcaaccctgtgatcatccacggcagccttgtgacagttcgtgcccttgtgtgatagcacaaaatttttgtgaaaagttttgtcaatgtagttcagagtgtcaaaaccgctttccgggatgccgctgcaaagcacagtgcaacaccaagcagtgcccgtgctacctggctgtccgagagtgtgaccctgacctctgtcttacttgtggagccgctgaccattgggacagtaaaaatgtgtcctgcaagaactgcagtattcagcggggctccaaaaagcatctattgctggcaccatctgacgtggcaggctgggggatttttatcaaagatcctgtgcagaaaaatgaattcatctcagaatactgtggagagattatttctcaagatgaagctgacagaagagggaaagtgtatgataaatacatgtgcagctttctgttcaacttgaacaatgattttgtggtggatgcaacccgcaagggtaacaaaattcgttttgcaaatcattcggtaaatccaaactgctatgcaaaagttatgatggttaacggtgatcacaggataggtatttttgccaagagagccatccagactggcgaagagctgttttttgattacagatacagccaggctgatgccctgaagtatgtcggcatcgaaagagaaatggaaatcccttgacatctgctacctcctcccccctcctctgaaacagctgccttagcttcaggaacctcgagtactgtgggcaatttagaaaaagaacatgcagtttgaaattctgaatttgcaaagtactgta

SEQ ID NO: 129924 - DNA, 1579 bp, Homo sapiens
  Payload ID: 5415
  Gene Symbol: ENKD1
  Gene Name: enkurin domain containing 1
  Uniprot ID: Q9H0I2
  ENST ID: ENST00000243878
  CDS Start-End: 323-1363
cggaagccacggttgcccggcaacaacaagtcccgtcgggtggcagcggctggcggcaaaacctctcgagtgagcccctgcccgagtgccgcgggggagaggccgcgagcgggaccgagaagtgggctgggagcagaggtcgcggaggtggcgagcgaggccggggcccaggcggggaccggcaggggcccgggagtggcgggcacgccagggtcagggtgccgggcgagggagggggcccggggttggggaagggggcccggggagggaggtaaacagccctgcaggcctcggggcaccgttgctgggcggcgccggcggcatgtgcgagggcccgtcccgcatctcggggcccatccccccagacccgacgctctgtcctgacaactacaggcggccgacctcggctcaagggcgcctcgagggaaacgcgctgaagctggacttgctgacttccgaccgggccctggacaccaccgctccccgtggcccctgcatcggtcccggtgccggagagatcctggagcgcggccagcgcggcgtcggggacgtgctgttgcaactcgaggggatctccctaggtcctggggcctctctcaagaggaaggaccctaaggaccatgagaaggagaacctgaggcggatcagggagattcagaagcgcttcagagaacaggagcgcagccgggagcagggccagcccaggcccctgaaagctctgtggcgctcacccaagtacgacaaggtggagtcccgggtcaaggcccagctccaggagcctggccctgcctctgggacagagtctgcccacttcctgcgggcgcactcccgctgcggccctggcctcccaccaccccatgtatctagtccccagccaaccccaccaggtcccgaagctaaggagccaggcctgggggtggacttcattcgtcacaatgcacgagctgccaagagagccccccggaggcattcctgctcactgcaggtcctggcacaagtgctagagcagcagcggcaggcccaggagcactacaatgccacgcagaagggccatgtgccacattacttgttggagcgcagggacctgtggcggcgggaggccgaggcccgcaagcagagccagccggaccctgccatgcccccaggccacacgcgcatgcctgagaaccagcggctggaaacactgaccaagctgctccagagccagagccagctgctgcgtgagctggtactgctgcctgctggggcagactcactgagagcccagagccaccgtgctgagctggaccggaagctggtgcaggtagaggaggccatcaagatcttttctcggcccaaagtcttcgtgaagatggacgactgagcccctttgggggacagtggcaaggagctccatgctgaggatcgccacatggctgcaaaggacagggttggacccaatcccagagcagaggtctgaagacaggagcaggggggtggccagtgtccctagagcactcttcccagtcaccagtggctgcagaagggccaccctagccttttaactgctttgtcaaaattaaacattttgtacacagga

SEQ ID NO: 129925 - DNA, 1353 bp, Homo sapiens
  Payload ID: 5415
  Gene Symbol: ENKD1
  Gene Name: enkurin domain containing 1
  ENST ID: ENST00000602644
  CDS Start-End: 286-963
gggtggcagcggctggcggcaaaacctctcgagtgagcccctgcccgagtgccgcgggggagaggccgcgagcgggaccgagaagtgggctgggagcagaggtcgcggaggtggcgagcgaggccggggcccaggcggggaccggcaggggcccgggagtggcgggcacgccagggtcagggtgccgggcgagggagggggcccggggttggggaagggggcccggggagggaggtaaacagccctgcaggcctcggggcaccgttgctgggcggcgccggcggcatgtgcgagggcccgtcccgcatctcggggcccatccccccagacccgacgctctgtcctgacaactacaggcggccgacctcggctcaagggcgcctcgagggaaacgcgctgaagctggacttgctgacttccgaccgggccctggacaccaccgctccccgtggcccctgcatcggtcccggtgccggagagatcctggagcgcggccagcgcggcgtcggggacgtgctgttgcaactcgaggggatctccctaggtcctggggcctctctcaagaggaaggaccctaaggaccatgagaaggagaacctgaggcggatcagggagattcagaagcgcttcagagaacaggagcgcagccgggagcagggccagcccaggcccctgaaagctctgtggcgctcacccaagtacgacaaggtggagtcccgggtcaaggcccagctccaggagcctggccctgcctctgggacagagtctgcccacttcctgcgggcgcactcccgctgcggccctggcctcccaccaccccatgtatctagtccccagccaaccccaccaggtcccgaagctaagcttgttggagcgcagggacctgtggcggcgggaggccgaggcccgcaagcagagccagccggaccctgccatgcccccaggccacacgcgcatgcctgagaaccagcggctggaaacactgaccaagctgctccagagccagagccagctgctgcgtgagctggtactgctgcctgctggggcagactcactgagagcccagagccaccgtgctgagctggaccggaagctggtgcaggtagaggaggccatcaagatcttttctcggcccaaagtcttcgtgaagatggacgactgagcccctttgggggacagtggcaaggagctccatgctgaggatcgccacatggctgcaaaggacagggttggacccaatcccagagcagaggtctgaagacaggagcaggggggtggccagtgtccctagagcactcttcccagtcaccagtggctgcagaagggccaccctagccttttaactgctttgtc

SEQ ID NO: 129926 - DNA, 266 bp, Homo sapiens
  Payload ID: 5415
  Gene Symbol: ENKD1
  Gene Name: enkurin domain containing 1
  ENST ID: ENST00000602409
  CDS Start-End: 1-266
cggggacgtgctgttgcaactcgaggggatctccctaggtcctggggcctctctcaagaggaaggaccctaaggaccatgagaaggagaacctgaggcggatcagggagattcagaagcgcttcagagaacaggagcgcagccgggagcagggccagcccaggcccctgaaagctctgtggcgctcacccaagtacgacaaggtggagtcccgggtcaaggcccagctccaggagccaggcctgggggtggacttcattcgtcaca

SEQ ID NO: 129927 - DNA, 3382 bp, Homo sapiens
  Payload ID: 5416
  Gene Symbol: ENKUR
  Gene Name: enkurin, TRPC channel interacting protein
  Uniprot ID: Q8TC29
  ENST ID: ENST00000331161
  CDS Start-End: 221-991
agtcaacgacgcttagcaatccggagagaaatagggtgttttcttcccgagagaggactgctaagagggggttaaagggggacgatgtgaaggagagaacctgtggtccttcagaaggcgaagaagaaagaaaggggaagcagtgaagaaagggacggagatactgggacagggagaaaaaagttgtggagagtagcttttaaggagtcatttggtggccatggatccaacgtgctcttctgagtgcatttataacctcatacccagtgacttgaaggagcctccccagcctcctaggtacatatccatttttaaggcaactgtaaaagatgacatgcaaaaagctaaaactgcaatgaaaactatgggaccagcaaaagttgaagtaccttctccaaaggatttcctaaagaaacattcaaaggaaaaaactctaccacccaaaaaaaactttgatcggaacgtgcccaaaaagcctgctgtgccattgaagactgatcatcctgtcatgggaatacagagtggaaaaaattttataaatacaaatgcagctgatatcatcatgggagtggctaaaaagcctaaaccaatttatgttgataaaagaactggagacaagcatgatcttgagccttcaggactagttccaaagtacatcaataaaaaggattatggtgtcacacctgaatacatatgtaagcgaaacgaggaaataaagaaagcccaagaagactatgatcgttatatccaggaaaaccttaagaaagcagctatgaaaaggctctccgatgaagaaagggaggcagttttgcaggggctgaaaaagaactgggaagaggtgcataaagaattccagtccctctcggtctttatagattctataccaaagaagatccgcaagcagaggctggaagaagaaatgaaacaactagaacacgacattggcataattgaaaagcacaagattatttatattgccaataacgcatgataccaacagcacaactttgaaaactgttaagtattttgaactggaaatagtaacacgtgccttcttgctactctaaactgtctccaacacattgtttctgagctccacaaatgcaaaagatgtattttcctgtggcccatgacatttgcagttattcccagtgagaaatattttcagtattcgtaacactgtatatgatgaaaggcttctatttggaggaagaaaaattaagaagacaacttacaaaatcaagatgacaacttataaaggcatcattgaggatgattaaggagaatagcctcctttctagcataccaacctcgatactcttattttattccacaactcactatgcatatcttatttaaatgtttttttccttttggtcctttctacttatctattttgtgaattctaaagttacatttgtaagattacataatctattaagcaataagtttatgttagtagagctgttttcaacccaaaaataagaaaaaatagctctaaatatctaaaaggaaaaggttattttatgaaattttaaattagaaaaatttggtaaaatatatgcaactataaaatatcagagaaataacaatttctactgcttacactggtttttatcctctggacaacataaaaaacaaaatatgggagtctttcaggcttttttcacaaacacagaatttggaagccttatagaaaagcttattttggttacttaaagaaaagtagtttatatacaattattttttgaaaattcacttgaaacttgtccatatgagtatctttattcctttattaacttagggcagatataaaataaaggataatatatgacaaattctcacttaccaagaatggttggttgctatttagggtaggctaacagctgtgacagtacactccaaaatgtataattacgtaaacacatattcaattcttgctaacatagcagtactttgctgtgagcaggtcagcaggaacccttttctgcagtcactcagggacccagacttacagagtgggtaggatgcatctgatccagagttagggagaggcacgtacaggccaggcctagaaatgatgcatatcattcccgtttgcatcgctaagtaagcaacttaagttgctttaacaaactaactccaaatctcagtttcctgataaagatacatttttcatttacatcactgtgcaatgtgactaagggtaggggtataagtctgttccatgcagtcactcagggacccagtctccttttgtctggtgactctgttgatccaggcagtctttctctgccaattcaggatgagatgtttaggtaagtattttatttgtgaaatgattgctatacatactcatttttaaataattcaaaatcagtagcaatgcaaaaatattctgattactttagccttatggatattatgctttgaagtcatgagtgggagttgccttaaatgttaaaatgaaaactttgtggttttaacagctaattcttttgctttctgtaaatgtctactaaagaatctagacttttctctatggtctacagtgttgtcctagatgaacattgttgcctttctttcacagagccttcagagggaaacattcccatccattgttcctggaaaggtgatccctaccacgggatcccaaacttggatagagccagttcaacctcccccaatccatacacatacatacctaggtcatcctatcacccaaaagagggacaaacatctgacttggacagctgaccagtgactgatcagattctctctctcttgagagcatgaattaagagacatggagactgcagtcacttgggagtagacacctgaaactaaaaagtcaaacttcattatgcagctagtttgacttggtttctcttcctgttcaaaggaagaatgggtagaataaagatttgatgtggtctggccccttgtctatgatctttttagcttgatttcttgaaatgctgcttcttccctacccactgtaactggcattcccatagtactgaggtactagagacctctgagatctgcacacatggttccctccacccagaaaactgcccttttctttctctcatcctacatagctgcctggcaaatccctagtcttcatcagctcacatcacatttccatgacaatcccctttgattcctcagaatctggccttcctttatagcactggtcatattgtattgtgcatatctggttatttgcctgttttccatgaacatttcaagcttatgggggagaagacactgtatacattttcatctgcattccttagaatctgcataacagctggtatagagaaggtactcaaaaaatccttaatgaataaagtaatggatcgtacccaaacatgta

SEQ ID NO: 129928 - DNA, 1318 bp, Homo sapiens
  Payload ID: 5416
  Gene Symbol: ENKUR
  Gene Name: enkurin, TRPC channel interacting protein
  ENST ID: ENST00000376363
  CDS Start-End: 221-988
agtcaacgacgcttagcaatccggagagaaatagggtgttttcttcccgagagaggactgctaagagggggttaaagggggacgatgtgaaggagagaacctgtggtccttcagaaggcgaagaagaaagaaaggggaagcagtgaagaaagggacggagatactgggacagggagaaaaaagttgtggagagtagcttttaaggagtcatttggtggccatggatccaacgtgctcttctgagtgcatttataacctcatacccagtgacttgaaggagcctccccagcctcctaggtacatatccatttttaaggcaactgtaaaagatgacatgcaaaaagctaaaactgcaatgaaaactatgggaccagcaaaagttgaagtaccttctccaaaggatttcctaaagaaacattcaaaggaaaaaactctaccacccaaaaaaaactttgatcggaacgtgcccaaaaagcctgctgtgccattgaagactgatcatcctgtcatgggaatacagagtggaaaaaattttataaatacaaatgcagctgatatcatcatgggagtggctaaaaagcctaaaccaatttatgttgataaaagaactggagacaagcatgatcttgagccttcaggactagttccaaagtacatcaataaaaaggattatggtgtcacacctgaatacatatgtaagcgaaacgaggaaataaagaaagcccaagaagactatgatcgttatatccaggaaaaccttaagaaagcagctatgaaaaggctctccgatgaagaaagggaggcagttttgcaggggctgaaaaagaactgggaagaggtgcataaagaattccagtccctctcggtctttatagattctataccaaagaagatccgcaagcagaggctggaagaagaaatgaaacaactagaacacgacattggcataattgaaaagcacaagattatttatattgccaataagtaagaatggatctttaaagtataacaatttcaatgtaggggaaaaaaacatggaaaatataaaaaactccaagtttttcaaaaaggaaaatactatgaagagaataaaaatagtcttaatcagaatgcttaggcaatatgcaaagaataattgagttattcacttacacaagaagaaattttgtttttactagtgtcacgttttccacatataaactattaaatttgagaatatgtgttccagttccacaatgtaattcattattattatgtacttgtttcacataaacattaatttctaggtcctgaaaaataaagtcagcactcagaactt

SEQ ID NO: 129929 - DNA, 1947 bp, Homo sapiens
  Payload ID: 5416
  Gene Symbol: ENKUR
  Gene Name: enkurin, TRPC channel interacting protein
  Uniprot ID: Q8TC29
  ENST ID: ENST00000496261
  CDS Start-End: 225-995
gcacagtcaacgacgcttagcaatccggagagaaatagggtgttttcttcccgagagaggactgctaagagggggttaaagggggacgatgtgaaggagagaacctgtggtccttcagaaggcgaagaagaaagaaaggggaagcagtgaagaaagggacggagatactgggacagggagaaaaaagttgtggagagtagcttttaaggagtcatttggtggccatggatccaacgtgctcttctgagtgcatttataacctcatacccagtgacttgaaggagcctccccagcctcctaggtacatatccatttttaaggcaactgtaaaagatgacatgcaaaaagctaaaactgcaatgaaaactatgggaccagcaaaagttgaagtaccttctccaaaggatttcctaaagaaacattcaaaggaaaaaactctaccacccaaaaaaaactttgatcggaacgtgcccaaaaagcctgctgtgccattgaagactgatcatcctgtcatgggaatacagagtggaaaaaattttataaatacaaatgcagctgatatcatcatgggagtggctaaaaagcctaaaccaatttatgttgataaaagaactggagacaagcatgatcttgagccttcaggactagttccaaagtacatcaataaaaaggattatggtgtcacacctgaatacatatgtaagcgaaacgaggaaataaagaaagcccaagaagactatgatcgttatatccaggaaaaccttaagaaagcagctatgaaaaggctctccgatgaagaaagggaggcagttttgcaggggctgaaaaagaactgggaagaggtgcataaagaattccagtccctctcggtctttatagattctataccaaagaagatccgcaagcagaggctggaagaagaaatgaaacaactagaacacgacattggcataattgaaaagcacaagattatttatattgccaataacgcatgataccaacagcacaactttgaaaactgttaagtattttgaactggaaatagtaacacgtgccttcttgctactctaaactgtctccaacacattgtttctgagctccacaaatgcaaaagatgtattttcctgtggcccatgacatttgcagttattcccaagccttcagagggaaacattcccatccattgttcctggaaaggtgatccctaccacgggatcccaaacttggatagagccagttcaacctcccccaatccatacacatacatacctaggtcatcctatcacccaaaagagggacaaacatctgacttggacagctgaccagtgactgatcagattctctctctcttgagagcatgaattaagagacatggagactgcagtcacttgggagtagacacctgaaactaaaaagtcaaacttcattatgcagctagtttgacttggtttctcttcctgttcaaaggaagaatgggtagaataaagatttgatgtggtctggccccttgtctatgatctttttagcttgatttcttgaaatgctgcttcttccctacccactgtaactggcattcccatagtactgaggtactagagacctctgagatctgcacacatggttccctccacccagaaaactgcccttttctttctctcatcctacatagctgcctggcaaatccctagtcttcatcagctcacatcacatttccatgacaatcccctttgattcctcagaatctggccttcctttatagcactggtcatattgtattgtgcatatctggttatttgcctgttttccatgaacatttcaagcttatgggggagaagacactgtatacattttcatctgcattccttagaatctgcataacagctggtatagagaaggtactcaaaaaatccttaatgaataaagtaatggatcgtacccaaacatgta

SEQ ID NO: 129930 - DNA, 542 bp, Homo sapiens
  Payload ID: 5416
  Gene Symbol: ENKUR
  Gene Name: enkurin, TRPC channel interacting protein
  ENST ID: ENST00000483339
  CDS Start-End: 167-542
cttttaaggagtcatttggtggccatggatccaacgtgctcttctgagtgcatttataacctcatacccagtgacttgaaggagcctccccagcctcctagaaaaaaactttgatcggaacgtgcccaaaaagcctgctgtgccattgaagactgatcatcctgtcatgggaatacagagtggaaaaaattttataaatacaaatgcagctgatatcatcatgggagtggctaaaaagcctaaaccaatttatgttgataaaagaactggagacaagcatgatcttgagccttcaggactagttccaaagtacatcaataaaaaggattatggtgtcacacctgaatacatatgtaagcgaaacgaggaaataaagaaagcccaagaagactatgatcgttatatccaggaaaaccttaagaaagcagctatgaaaaggctctccgatgaagaaagggaggcagttttgcaggggctgaaaaagaactgggaagaggtgcataaagaattccagtccctctcggtctttatagattctatac

SEQ ID NO: 129931 - DNA, 3294 bp, Homo sapiens
  Payload ID: 5416
  Gene Symbol: ENKUR
  Gene Name: enkurin, TRPC channel interacting protein
  ENST ID: ENST00000615958
  CDS Start-End: 320-904
cccttaagagaggaacactggtggaaaagtgacaagagagcaacaagtcctacttgctcaagaagagaatgactcaatacgcaggattaggcttatagagcccatgaagcaaaatggaacagaaggagctgcacccaacagagcaggcggctggaggagcggcacaagaaagcctgggataaagttgattttccatatctggatgtgtctggcagcatcaaccatatagctgcaaaccagggtcgatttcaaagcccagggcctggccacacgtgtccaacacctatgaacttcttatggagattgttcaccacggagcatgaagacagagcgggtgactggaggtggctccccagaaaaaaactttgatcggaacgtgcccaaaaagcctgctgtgccattgaagactgatcatcctgtcatgggaatacagagtggaaaaaattttataaatacaaatgcagctgatatcatcatgggagtggctaaaaagcctaaaccaatttatgttgataaaagaactggagacaagcatgatcttgagccttcaggactagttccaaagtacatcaataaaaaggattatggtgtcacacctgaatacatatgtaagcgaaacgaggaaataaagaaagcccaagaagactatgatcgttatatccaggaaaaccttaagaaagcagctatgaaaaggctctccgatgaagaaagggaggcagttttgcaggggctgaaaaagaactgggaagaggtgcataaagaattccagtccctctcggtctttatagattctataccaaagaagatccgcaagcagaggctggaagaagaaatgaaacaactagaacacgacattggcataattgaaaagcacaagattatttatattgccaataacgcatgataccaacagcacaactttgaaaactgttaagtattttgaactggaaatagtaacacgtgccttcttgctactctaaactgtctccaacacattgtttctgagctccacaaatgcaaaagatgtattttcctgtggcccatgacatttgcagttattcccagtgagaaatattttcagtattcgtaacactgtatatgatgaaaggcttctatttggaggaagaaaaattaagaagacaacttacaaaatcaagatgacaacttataaaggcatcattgaggatgattaaggagaatagcctcctttctagcataccaacctcgatactcttattttattccacaactcactatgcatatcttatttaaatgtttttttccttttggtcctttctacttatctattttgtgaattctaaagttacatttgtaagattacataatctattaagcaataagtttatgttagtagagctgttttcaacccaaaaataagaaaaaatagctctaaatatctaaaaggaaaaggttattttatgaaattttaaattagaaaaatttggtaaaatatatgcaactataaaatatcagagaaataacaatttctactgcttacactggtttttatcctctggacaacataaaaaacaaaatatgggagtctttcaggcttttttcacaaacacagaatttggaagccttatagaaaagcttattttggttacttaaagaaaagtagtttatatacaattattttttgaaaattcacttgaaacttgtccatatgagtatctttattcctttattaacttagggcagatataaaataaaggataatatatgacaaattctcacttaccaagaatggttggttgctatttagggtaggctaacagctgtgacagtacactccaaaatgtataattacgtaaacacatattcaattcttgctaacatagcagtactttgctgtgagcaggtcagcaggaacccttttctgcagtcactcagggacccagacttacagagtgggtaggatgcatctgatccagagttagggagaggcacgtacaggccaggcctagaaatgatgcatatcattcccgtttgcatcgctaagtaagcaacttaagttgctttaacaaactaactccaaatctcagtttcctgataaagatacatttttcatttacatcactgtgcaatgtgactaagggtaggggtataagtctgttccatgcagtcactcagggacccagtctccttttgtctggtgactctgttgatccaggcagtctttctctgccaattcaggatgagatgtttaggtaagtattttatttgtgaaatgattgctatacatactcatttttaaataattcaaaatcagtagcaatgcaaaaatattctgattactttagccttatggatattatgctttgaagtcatgagtgggagttgccttaaatgttaaaatgaaaactttgtggttttaacagctaattcttttgctttctgtaaatgtctactaaagaatctagacttttctctatggtctacagtgttgtcctagatgaacattgttgcctttctttcacagagccttcagagggaaacattcccatccattgttcctggaaaggtgatccctaccacgggatcccaaacttggatagagccagttcaacctcccccaatccatacacatacatacctaggtcatcctatcacccaaaagagggacaaacatctgacttggacagctgaccagtgactgatcagattctctctctcttgagagcatgaattaagagacatggagactgcagtcacttgggagtagacacctgaaactaaaaagtcaaacttcattatgcagctagtttgacttggtttctcttcctgttcaaaggaagaatgggtagaataaagatttgatgtggtctggccccttgtctatgatctttttagcttgatttcttgaaatgctgcttcttccctacccactgtaactggcattcccatagtactgaggtactagagacctctgagatctgcacacatggttccctccacccagaaaactgcccttttctttctctcatcctacatagctgcctggcaaatccctagtcttcatcagctcacatcacatttccatgacaatcccctttgattcctcagaatctggccttcctttatagcactggtcatattgtattgtgcatatctggttatttgcctgttttccatgaacatttcaagcttatgggggagaagacactgtatacattttcatctgcattccttagaatctgcataacagctggtatagagaaggtactcaaaaaatccttaatgaataaagtaatggatcgtacccaaacatgt

SEQ ID NO: 129932 - DNA, 1783 bp, Homo sapiens
  Payload ID: 5417
  Gene Symbol: ENO1
  Gene Name: enolase 1, (alpha)
  Uniprot ID: P06733
  ENST ID: ENST00000234590
  CDS Start-End: 121-1425
ggacagtatctgtgggtacccggagcacggagatctcgccggctttacgttcacctcggtgtctgcagcaccctccgcttcctctcctaggcgacgagacccagtggctagaagttcaccatgtctattctcaagatccatgccagggagatctttgactctcgcgggaatcccactgttgaggttgatctcttcacctcaaaaggtctcttcagagctgctgtgcccagtggtgcttcaactggtatctatgaggccctagagctccgggacaatgataagactcgctatatggggaagggtgtctcaaaggctgttgagcacatcaataaaactattgcgcctgccctggttagcaagaaactgaacgtcacagaacaagagaagattgacaaactgatgatcgagatggatggaacagaaaataaatctaagtttggtgcgaacgccattctgggggtgtcccttgccgtctgcaaagctggtgccgttgagaagggggtccccctgtaccgccacatcgctgacttggctggcaactctgaagtcatcctgccagtcccggcgttcaatgtcatcaatggcggttctcatgctggcaacaagctggccatgcaggagttcatgatcctcccagtcggtgcagcaaacttcagggaagccatgcgcattggagcagaggtttaccacaacctgaagaatgtcatcaaggagaaatatgggaaagatgccaccaatgtgggggatgaaggcgggtttgctcccaacatcctggagaataaagaaggcctggagctgctgaagactgctattgggaaagctggctacactgataaggtggtcatcggcatggacgtagcggcctccgagttcttcaggtctgggaagtatgacctggacttcaagtctcccgatgaccccagcaggtacatctcgcctgaccagctggctgacctgtacaagtccttcatcaaggactacccagtggtgtctatcgaagatccctttgaccaggatgactggggagcttggcagaagttcacagccagtgcaggaatccaggtagtgggggatgatctcacagtgaccaacccaaagaggatcgccaaggccgtgaacgagaagtcctgcaactgcctcctgctcaaagtcaaccagattggctccgtgaccgagtctcttcaggcgtgcaagctggcccaggccaatggttggggcgtcatggtgtctcatcgttcgggggagactgaagataccttcatcgctgacctggttgtggggctgtgcactgggcagatcaagactggtgccccttgccgatctgagcgcttggccaagtacaaccagctcctcagaattgaagaggagctgggcagcaaggctaagtttgccggcaggaacttcagaaaccccttggccaagtaagctgtgggcaggcaagcccttcggtcacctgttggctacacagacccctcccctcgtgtcagctcaggcagctcgaggcccccgaccaacacttgcaggggtccctgctagttagcgccccaccgccgtggagttcgtaccgcttccttagaacttctacagaagccaagctccctggagccctgttggcagctctagctttgcagtcgtgtaattggcccaagtcattgtttttctcgcctcactttccaccaagtgtctagagtcatgtgagcctcgtgtcatctccggggtggccacaggctagatccccggtggttttgtgctcaaaataaaaagcctcagtgacccatgagaa

SEQ ID NO: 129933 - DNA, 647 bp, Homo sapiens
  Payload ID: 5417
  Gene Symbol: ENO1
  Gene Name: enolase 1, (alpha)
  ENST ID: ENST00000497492
  CDS Start-End: 63-647
gcttagcacagcgggagttgggagtggaagttgcttttccatcgtagccaagtaagttcaccatgtctattctcaagatccatgccagggagatctttgactctcgcgggaatcccactgttgaggttgatctcttcacctcaaaaggtctcttcagagctgctgtgcccagtggtgcttcaactggtatctatgaggccctagagctccgggacaatgataagactcgctatatggggaagggtgtctcaaaggctgttgagcacatcaataaaactattgcgcctgccctggttagcaagaaactgaacgtcacagaacaagagaagattgacaaactgatgatcgagatggatggaacagaaaataaatctaagtttggtgcgaacgccattctgggggtgtcccttgccgtctgcaaagctggtgccgttgagaagggggtccccctgtaccgccacatcgctgacttggctggcaactctgaagtcatcctgccagtcccggcgttcaatgtcatcaatggcggttctcatgctggcaacaagctggccatgcaggagttcatgatcctcccagtcggtgcagcaaacttcagggaagccatgcgcattggagcagaggtttaccacaacctgaagaatgtc

SEQ ID NO: 129934 - DNA, 732 bp, Homo sapiens
  Payload ID: 5417
  Gene Symbol: ENO1
  Gene Name: enolase 1, (alpha)
  ENST ID: ENST00000489867
  CDS Start-End: 680-732
agcgccccaaccccggagtggggccgaggcgcgcagcctctcaacgactcgacgccaacggggtctctcggatcgcggcgcgaggcaggaggggcggggcaggagggccgcggcaggcccgggccgccaaagttgtcagcaaggtcgagggccggacgtggggccccagagcgacgctgagtgcgtgcgggactcggagtacgtgacggagccccgagctctcatgcccgccacgccgccccgggccatcccccggagccccggctccgcacaccccagttcggctcaccggtcctatctggggccagagtttcgcccgcaccactacagggccgctggggagtcggggccccccagatctgcccgcctcaagtccgcgggacgtcacccccctttccacgctactgcagccgtcgcagtcccacccctttccgggaggtgagggaatgagtgacggctctcccgacgaatggcgaggcggagctgagggggcgtgccccggaggcgggaagtgggtggggctcgccttagctaggcaggaagtcggcgcgggcggcgcggacagtatctgtgggtacccggagcacggagatctcgccggctttacgttcacctcggtgtctgcagcaccctccgcttcctctcctaggcgacgagacccagtggctagaagttcaccatgtctattctcaagatccatgccagggagatctttgactctcgcgggaatcc

SEQ ID NO: 129935 - DNA, 2423 bp, Homo sapiens
  Payload ID: 5418
  Gene Symbol: ENO2
  Gene Name: enolase 2 (gamma, neuronal)
  Uniprot ID: P09104
  ENST ID: ENST00000229277
  CDS Start-End: 223-1527
acccgcgctcgtacgtgcgcctccgccggcagctcctgactcatcgggggctccgggtcacatgcgcccgcgcggccctataggcgcctcctccgcccgccgcccgggagccgcagccgccgccgccactgccactcccgctctctcagcgccgccgtcgccaccgccaccgccaccgccactaccaccgtctgagtctgcagtcccgagatcccagccatcatgtccatagagaagatctgggcccgggagatcctggactcccgcgggaaccccacagtggaggtggatctctatactgccaaaggtcttttccgggctgcagtgcccagtggagcctctacgggcatctatgaggccctggagctgagggatggagacaaacagcgttacttaggcaaaggtgtcctgaaggcagtggaccacatcaactccaccatcgcgccagccctcatcagctcaggtctctctgtggtggagcaagagaaactggacaacctgatgctggagttggatgggactgagaacaaatccaagtttggggccaatgccatcctgggtgtgtctctggccgtgtgtaaggcaggggcagctgagcgggaactgcccctgtatcgccacattgctcagctggccgggaactcagacctcatcctgcctgtgccggccttcaacgtgatcaatggtggctctcatgctggcaacaagctggccatgcaggagttcatgatcctcccagtgggagctgagagctttcgggatgccatgcgactaggtgcagaggtctaccatacactcaagggagtcatcaaggacaaatacggcaaggatgccaccaatgtgggggatgaaggtggctttgcccccaatatcctggagaacagtgaagccttggagctggtgaaggaagccatcgacaaggctggctacacggaaaagatcgttattggcatggatgttgctgcctcagagttttatcgtgatggcaaatatgacttggacttcaagtctcccactgatccttcccgatacatcactggggaccagctgggggcactctaccaggactttgtcagggactatcctgtggtctccattgaggacccatttgaccaggatgattgggctgcctggtccaagttcacagccaatgtagggatccagattgtgggtgatgacctgacagtgaccaacccaaaacgtattgagcgggcagtggaagaaaaggcctgcaactgtctgctgctcaaggtcaaccagatcggctcggtcactgaagccatccaagcgtgcaagctggcccaggagaatggctggggggtcatggtgagtcatcgctcaggagagactgaggacacattcattgctgacctggtggtggggctgtgcacaggccagatcaagactggtgccccgtgccgttctgaacgtctggctaaatacaaccagctcatgagaattgaggaagagctgggggatgaagctcgctttgccggacataacttccgtaatcccagtgtgctgtgattcctctgcttgcctggagacgtggaacctctgtctcatcctcctggaaccttgctgtcctgatctgtgatagttcaccccctgagatcccctgagccccagggtgcccagaacttccctgattgacctgctccgctgctccttggcttacctgacctcttgctgtctctgctcgccctcctttctgtgccctactcattggggttccgcactttccacttcttcctttctctttctctcttccctcagaaactagaaatgtgaatgaggattattataaaagggggtccgtggaagaatgatcagcatctgtgatgggagcgtcagggttggtgtgctgaggtgttagagagggaccatgtgtcacttgtgctttgctcttgtcccacgtgtcttccactttgcatatgagccgtgaactgtgcatagtgctgggatggaggggagtgttgggcatgtgatcacgcctggctaataaggctttagtgtatttatttatttatttattttatttgtttttcattcatcccattaatcatttccccataactcaatggcctaaaactggcctgacttgggggaacgatgtgtctgtatttcatgtggctgtagatcccaagatgactggggtgggaggtcttgctagaatgggaagggtcatagaaagggccttgacatcagttcctttgtgtgtactcactgaagcctgcgttggtccagagcggaggctgtgtgcctgggggagttttcctctatacatctctccccaaccctaggttccctgttcttcctccagctgcaccagagcaacctctcactccccatgccacgttccacagttgccaccacctctgtggcattgaaatgagcacctccattaaagtctgaatcagtgc

SEQ ID NO: 129936 - DNA, 2827 bp, Homo sapiens
  Payload ID: 5418
  Gene Symbol: ENO2
  Gene Name: enolase 2 (gamma, neuronal)
  Uniprot ID: P09104
  ENST ID: ENST00000535366
  CDS Start-End: 627-1931
ctcttcacttcccgctgcaacccccagggactgcagggcctttctcaggaccctcttccccgacacctgtattgcatgcgcctttcgcgggaagaggagggatacacgtttgggagagagtgggaccttggggaaggggcagtgttcaggcagctggggtgttaagttggggaggtatgggggctctggaagagaggcccaggcagcccatcctcttcttggctcccaggagaaatgcaagcctggcagccattccgctctgaggagatctgggggaaccccaccggctggccaagctgcaaagaggcgcgggaaccactgtcgtgcccctcccctcctcactgcagtgttctcccatctcatcatttgatcttaccccgccccccactgcagtgacctccccttcctcactgcattgaccttctcctcttcccaggggggagggggaatcccttctacagccctagactgcagccagcgcctccctacccaccccccacccactgcagtaacctctttcccatccctcccagcctcccgccccgcccattgatctcaggctccacccctctaagcctcttatctttctccttccttcccttccacccgaggagatcccagccatcatgtccatagagaagatctgggcccgggagatcctggactcccgcgggaaccccacagtggaggtggatctctatactgccaaaggtcttttccgggctgcagtgcccagtggagcctctacgggcatctatgaggccctggagctgagggatggagacaaacagcgttacttaggcaaaggtgtcctgaaggcagtggaccacatcaactccaccatcgcgccagccctcatcagctcaggtctctctgtggtggagcaagagaaactggacaacctgatgctggagttggatgggactgagaacaaatccaagtttggggccaatgccatcctgggtgtgtctctggccgtgtgtaaggcaggggcagctgagcgggaactgcccctgtatcgccacattgctcagctggccgggaactcagacctcatcctgcctgtgccggccttcaacgtgatcaatggtggctctcatgctggcaacaagctggccatgcaggagttcatgatcctcccagtgggagctgagagctttcgggatgccatgcgactaggtgcagaggtctaccatacactcaagggagtcatcaaggacaaatacggcaaggatgccaccaatgtgggggatgaaggtggctttgcccccaatatcctggagaacagtgaagccttggagctggtgaaggaagccatcgacaaggctggctacacggaaaagatcgttattggcatggatgttgctgcctcagagttttatcgtgatggcaaatatgacttggacttcaagtctcccactgatccttcccgatacatcactggggaccagctgggggcactctaccaggactttgtcagggactatcctgtggtctccattgaggacccatttgaccaggatgattgggctgcctggtccaagttcacagccaatgtagggatccagattgtgggtgatgacctgacagtgaccaacccaaaacgtattgagcgggcagtggaagaaaaggcctgcaactgtctgctgctcaaggtcaaccagatcggctcggtcactgaagccatccaagcgtgcaagctggcccaggagaatggctggggggtcatggtgagtcatcgctcaggagagactgaggacacattcattgctgacctggtggtggggctgtgcacaggccagatcaagactggtgccccgtgccgttctgaacgtctggctaaatacaaccagctcatgagaattgaggaagagctgggggatgaagctcgctttgccggacataacttccgtaatcccagtgtgctgtgattcctctgcttgcctggagacgtggaacctctgtctcatcctcctggaaccttgctgtcctgatctgtgatagttcaccccctgagatcccctgagccccagggtgcccagaacttccctgattgacctgctccgctgctccttggcttacctgacctcttgctgtctctgctcgccctcctttctgtgccctactcattggggttccgcactttccacttcttcctttctctttctctcttccctcagaaactagaaatgtgaatgaggattattataaaagggggtccgtggaagaatgatcagcatctgtgatgggagcgtcagggttggtgtgctgaggtgttagagagggaccatgtgtcacttgtgctttgctcttgtcccacgtgtcttccactttgcatatgagccgtgaactgtgcatagtgctgggatggaggggagtgttgggcatgtgatcacgcctggctaataaggctttagtgtatttatttatttatttattttatttgtttttcattcatcccattaatcatttccccataactcaatggcctaaaactggcctgacttgggggaacgatgtgtctgtatttcatgtggctgtagatcccaagatgactggggtgggaggtcttgctagaatgggaagggtcatagaaagggccttgacatcagttcctttgtgtgtactcactgaagcctgcgttggtccagagcggaggctgtgtgcctgggggagttttcctctatacatctctccccaaccctaggttccctgttcttcctccagctgcaccagagcaacctctcactccccatgccacgttccacagttgccaccacctctgtggcattgaaatgagcacctccattaaagtctgaatcagtgc

SEQ ID NO: 129937 - DNA, 1911 bp, Homo sapiens
  Payload ID: 5418
  Gene Symbol: ENO2
  Gene Name: enolase 2 (gamma, neuronal)
  ENST ID: ENST00000545045
  CDS Start-End: 66-1013
ccaccgccaccgccaccgccactaccaccgtctgagtctgcagtcccgaggagatcccagccatcatgtccatagagaagatctgggcccgggagatcctggactcccgcgggaaccccacagtggaggtggatctctatactgccaaaggtcttttccgggctgcagtgcccagtggagcctctacgggcatctatgaggccctggagctgagggatggagacaaacagcgttacttaggcaaaggtgtcctgaaggcagtggaccacatcaactccaccatcgcgccagccctcatcagctcaggtctctctgtggtggagcaagagaaactggacaacctgatgctggagttggatgggactgagaacaaatccttggagctggtgaaggaagccatcgacaaggctggctacacggaaaagatcgttattggcatggatgttgctgcctcagagttttatcgtgatggcaaatatgacttggacttcaagtctcccactgatccttcccgatacatcactggggaccagctgggggcactctaccaggactttgtcagggactatcctgtggtctccattgaggacccatttgaccaggatgattgggctgcctggtccaagttcacagccaatgtagggatccagattgtgggtgatgacctgacagtgaccaacccaaaacgtattgagcgggcagtggaagaaaaggcctgcaactgtctgctgctcaaggtcaaccagatcggctcggtcactgaagccatccaagcgtgcaagctggcccaggagaatggctggggggtcatggtgagtcatcgctcaggagagactgaggacacattcattgctgacctggtggtggggctgtgcacaggccagatcaagactggtgccccgtgccgttctgaacgtctggctaaatacaaccagctcatgagaattgaggaagagctgggggatgaagctcgctttgccggacataacttccgtaatcccagtgtgctgtgattcctctgcttgcctggagacgtggaacctctgtctcatcctcctggaaccttgctgtcctgatctgtgatagttcaccccctgagatcccctgagccccagggtgcccagaacttccctgattgacctgctccgctgctccttggcttacctgacctcttgctgtctctgctcgccctcctttctgtgccctactcattggggttccgcactttccacttcttcctttctctttctctcttccctcagaaactagaaatgtgaatgaggattattataaaagggggtccgtggaagaatgatcagcatctgtgatgggagcgtcagggttggtgtgctgaggtgttagagagggaccatgtgtcacttgtgctttgctcttgtcccacgtgtcttccactttgcatatgagccgtgaactgtgcatagtgctgggatggaggggagtgttgggcatgtgatcacgcctggctaataaggctttagtgtatttatttatttatttattttatttgtttttcattcatcccattaatcatttccccataactcaatggcctaaaactggcctgacttgggggaacgatgtgtctgtatttcatgtggctgtagatcccaagatgactggggtgggaggtcttgctagaatgggaagggtcatagaaagggccttgacatcagttcctttgtgtgtactcactgaagcctgcgttggtccagagcggaggctgtgtgcctgggggagttttcctctatacatctctccccaaccctaggttccctgttcttcctccagctgcaccagagcaacctctcactccccatgccacgttccacagttgccaccacctctgtggcattgaaatgagcacctccattaaagtctgaatcagtgcac

SEQ ID NO: 129938 - DNA, 2549 bp, Homo sapiens
  Payload ID: 5418
  Gene Symbol: ENO2
  Gene Name: enolase 2 (gamma, neuronal)
  Uniprot ID: P09104
  ENST ID: ENST00000541477
  CDS Start-End: 349-1653
ctgttactgtcgagtgggtcgggccgtgggtatgagcgcttgtgtgcgctggggccaggtcgtgggtgcccccacccttcccccatcctcctcccttccccactccaccctcgtcggtcccccacccgcgctcgtacgtgcgcctccgccggcagctcctgactcatcgggggctccgggtcacatgcgcccgcgcggccctataggcgcctcctccgcccgccgcccgggagccgcagccgccgccgccactgccactcccgctctctcagcgccgccgtcgccaccgccaccgccaccgccactaccaccgtctgagtctgcagtcccgaggagatcccagccatcatgtccatagagaagatctgggcccgggagatcctggactcccgcgggaaccccacagtggaggtggatctctatactgccaaaggtcttttccgggctgcagtgcccagtggagcctctacgggcatctatgaggccctggagctgagggatggagacaaacagcgttacttaggcaaaggtgtcctgaaggcagtggaccacatcaactccaccatcgcgccagccctcatcagctcaggtctctctgtggtggagcaagagaaactggacaacctgatgctggagttggatgggactgagaacaaatccaagtttggggccaatgccatcctgggtgtgtctctggccgtgtgtaaggcaggggcagctgagcgggaactgcccctgtatcgccacattgctcagctggccgggaactcagacctcatcctgcctgtgccggccttcaacgtgatcaatggtggctctcatgctggcaacaagctggccatgcaggagttcatgatcctcccagtgggagctgagagctttcgggatgccatgcgactaggtgcagaggtctaccatacactcaagggagtcatcaaggacaaatacggcaaggatgccaccaatgtgggggatgaaggtggctttgcccccaatatcctggagaacagtgaagccttggagctggtgaaggaagccatcgacaaggctggctacacggaaaagatcgttattggcatggatgttgctgcctcagagttttatcgtgatggcaaatatgacttggacttcaagtctcccactgatccttcccgatacatcactggggaccagctgggggcactctaccaggactttgtcagggactatcctgtggtctccattgaggacccatttgaccaggatgattgggctgcctggtccaagttcacagccaatgtagggatccagattgtgggtgatgacctgacagtgaccaacccaaaacgtattgagcgggcagtggaagaaaaggcctgcaactgtctgctgctcaaggtcaaccagatcggctcggtcactgaagccatccaagcgtgcaagctggcccaggagaatggctggggggtcatggtgagtcatcgctcaggagagactgaggacacattcattgctgacctggtggtggggctgtgcacaggccagatcaagactggtgccccgtgccgttctgaacgtctggctaaatacaaccagctcatgagaattgaggaagagctgggggatgaagctcgctttgccggacataacttccgtaatcccagtgtgctgtgattcctctgcttgcctggagacgtggaacctctgtctcatcctcctggaaccttgctgtcctgatctgtgatagttcaccccctgagatcccctgagccccagggtgcccagaacttccctgattgacctgctccgctgctccttggcttacctgacctcttgctgtctctgctcgccctcctttctgtgccctactcattggggttccgcactttccacttcttcctttctctttctctcttccctcagaaactagaaatgtgaatgaggattattataaaagggggtccgtggaagaatgatcagcatctgtgatgggagcgtcagggttggtgtgctgaggtgttagagagggaccatgtgtcacttgtgctttgctcttgtcccacgtgtcttccactttgcatatgagccgtgaactgtgcatagtgctgggatggaggggagtgttgggcatgtgatcacgcctggctaataaggctttagtgtatttatttatttatttattttatttgtttttcattcatcccattaatcatttccccataactcaatggcctaaaactggcctgacttgggggaacgatgtgtctgtatttcatgtggctgtagatcccaagatgactggggtgggaggtcttgctagaatgggaagggtcatagaaagggccttgacatcagttcctttgtgtgtactcactgaagcctgcgttggtccagagcggaggctgtgtgcctgggggagttttcctctatacatctctccccaaccctaggttccctgttcttcctccagctgcaccagagcaacctctcactccccatgccacgttccacagttgccaccacctctgtggcattgaaatgagcacctccattaaagtctgaatcagtgc

SEQ ID NO: 129939 - DNA, 1646 bp, Homo sapiens
  Payload ID: 5418
  Gene Symbol: ENO2
  Gene Name: enolase 2 (gamma, neuronal)
  Uniprot ID: P09104
  ENST ID: ENST00000538763
  CDS Start-End: 87-1262
gctctctcagcgccgccgtcgccaccgccaccgccaccgccactaccaccgtctgagtctgcagtcccgaggagatcccagccatcatgtccatagagaagatctgggcccgggagatcctggactcccgcgggaaccccacagtggaggtggatctctatactgccaaaggtcttttccgggctgcagtgcccagtggagcctctacgggcatctatgaggccctggagctgagggatggagacaaacagcgttacttaggcaaagccaagtttggggccaatgccatcctgggtgtgtctctggccgtgtgtaaggcaggggcagctgagcgggaactgcccctgtatcgccacattgctcagctggccgggaactcagacctcatcctgcctgtgccggccttcaacgtgatcaatggtggctctcatgctggcaacaagctggccatgcaggagttcatgatcctcccagtgggagctgagagctttcgggatgccatgcgactaggtgcagaggtctaccatacactcaagggagtcatcaaggacaaatacggcaaggatgccaccaatgtgggggatgaaggtggctttgcccccaatatcctggagaacagtgaagccttggagctggtgaaggaagccatcgacaaggctggctacacggaaaagatcgttattggcatggatgttgctgcctcagagttttatcgtgatggcaaatatgacttggacttcaagtctcccactgatccttcccgatacatcactggggaccagctgggggcactctaccaggactttgtcagggactatcctgtggtctccattgaggacccatttgaccaggatgattgggctgcctggtccaagttcacagccaatgtagggatccagattgtgggtgatgacctgacagtgaccaacccaaaacgtattgagcgggcagtggaagaaaaggcctgcaactgtctgctgctcaaggtcaaccagatcggctcggtcactgaagccatccaagcgtgcaagctggcccaggagaatggctggggggtcatggtgagtcatcgctcaggagagactgaggacacattcattgctgacctggtggtggggctgtgcacaggccagatcaagactggtgccccgtgccgttctgaacgtctggctaaatacaaccagctcatgagaattgaggaagagctgggggatgaagctcgctttgccggacataacttccgtaatcccagtgtgctgtgattcctctgcttgcctggagacgtggaacctctgtctcatcctcctggaaccttgctgtcctgatctgtgatagttcaccccctgagatcccctgagccccagggtgcccagaacttccctgattgacctgctccgctgctccttggcttacctgacctcttgctgtctctgctcgccctcctttctgtgccctactcattggggttccgcactttccacttcttcctttctctttctctcttccctcagaaactagaaatgtgaatgaggattattataaaagggggtccgtggaagaatgatcagcatctgtgatgggagcgtcagggttggtgtgctgaggtgttagagagggaccatgtgtcacttgtgctttgctcttgt

SEQ ID NO: 129940 - DNA, 547 bp, Homo sapiens
  Payload ID: 5418
  Gene Symbol: ENO2
  Gene Name: enolase 2 (gamma, neuronal)
  ENST ID: ENST00000537688
  CDS Start-End: 238-547
agtagaaacggggtttcaccacgttagccaggatggtctggatctcctgacctcgtgatctgcccgcctccgccttccaaagtgctgggattacaggggcgcctcctccgcccgccgcccgggagccgcagccgccgccgccactgccactcccgctctctcagcgccgccgtcgccaccgccaccgccaccgccactaccaccgtctgagtctgcagtcccgagatcccagccatcatgtccatagagaagatctgggcccgggagatcctggactcccgcgggaaccccacagtggaggtggatctctatactgccaaaggtcttttccgggctgcagtgcccagtggagcctctacgggcatctatgaggccctggagctgagggatggagacaaacagcgttacttaggcaaaggtgtcctgaaggcagtggaccacatcaactccaccatcgcgccagccctcatcagctcaggtctctctgtggtggagcaagagaaactggacaacctgatgctggagttggatgggactgagaacaaat

SEQ ID NO: 129941 - DNA, 724 bp, Homo sapiens
  Payload ID: 5418
  Gene Symbol: ENO2
  Gene Name: enolase 2 (gamma, neuronal)
  ENST ID: ENST00000535275
  CDS Start-End: 1-222
ctggtgaaggaagccatcgacaaggctggctacacggaaaagatcgttattggcatggatgttgctgcctcagagttttatcgtgatggcaaatatgacttggacttcaagtctcccactgatccttcccgatacatcactggggaccagctgggggcactctaccaggactttgtcagggactatcctgggaataaaggggcatgttcctgcctgatgtagagacccagggaagatgaacacctcccccctccccaccatgctctctctgcagtggtctccattgaggacccatttgaccaggatgattgggctgcctggtccaagttcacagccaatgtagggatccagattgtgggtgatgacctgacagtgaccaacccaaaacgtattgagcgggcagtggaagaaaaggcctgcaactgtctgctgctcaaggtcaaccagatcggctcggtcactgaagccatccaagcgtgcaagctggcccaggagaatggctggggggtcatggtgagtcatcgctcaggagagactgaggacacattcattgctgacctggtggtggggctgtgcacaggccagatcaagactggtgccccgtgccgttctgaacgtctggctaaatacaaccagctcatgagaattgaggaagagctgggggatgaagctcgctttgccggacataacttccgtaatcccagtgtgctgtgattcctctgct

SEQ ID NO: 129942 - DNA, 416 bp, Homo sapiens
  Payload ID: 5418
  Gene Symbol: ENO2
  Gene Name: enolase 2 (gamma, neuronal)
  ENST ID: ENST00000543975
  CDS Start-End: 1-260
tggtctccattgaggacccatttgaccaggatgattgggctgcctggtccaagttcacagccaatgtagggatccagattgtgggtgatgacctgacagtgaccaacccaaaacgtattgagcgggcagtggaagaaaaggcctgcaactgtctgctgctcaaggtcaaccagatcggctcggtcactgaagccatccaagcatcaagactggtgccccgtgccgttctgaacgtctggctaaatacaaccagctcatgagaattgaggaagagctgggggatgaagctcgctttgccggacataacttccgtaatcccagtgtgctgtgattcctctgcttgcctggagacgtggaacctctgtctcatcctcctggaaccttgctgtcctgatctgtgatagttcaccccctga

SEQ ID NO: 129943 - DNA, 1521 bp, Homo sapiens
  Payload ID: 5419
  Gene Symbol: ENO3
  Gene Name: enolase 3 (beta, muscle)
  Uniprot ID: P13929
  ENST ID: ENST00000323997
  CDS Start-End: 133-1437
gcgcagcctgagagggggtgagctgacactgtcccagctgccacctagactcggagctccatccaaacctccagcgaagacatcccaggtcgggtgaatcttccagccctgggggtggaggtagtaaaggccatggccatgcagaaaatctttgcccgggaaatcttggactccaggggcaaccccacggtggaggtggacctgcacacggccaagggccgattccgagcagctgtgcccagtggggcttccacgggtatctatgaggctctggaactaagagacggagacaaaggccgctacctggggaaaggagtcctgaaggctgtggagaacatcaacaatactctgggccctgctctgctgcaaaagaaactaagcgttgtggatcaagaaaaagttgacaaatttatgattgagctagatgggaccgagaataagtccaagtttggggccaatgccatcctgggcgtgtccttggccgtgtgtaaggcgggagcagctgagaagggggtccccctgtaccgccacatcgcagatctcgctgggaaccctgacctcatactcccagtgccagccttcaatgtgatcaacgggggctcccatgctggaaacaagctggccatgcaggagttcatgattctgcctgtgggagccagctccttcaaggaagccatgcgcattggcgccgaggtctaccaccacctcaagggggtcatcaaggccaagtatgggaaggatgccaccaatgtgggtgatgaaggtggcttcgcacccaacatcctggagaacaatgaggccctggagctgctgaagacggccatccaggcggctggttacccagacaaggtggtgatcggcatggatgtggcagcatctgagttctatcgcaatgggaagtacgatcttgacttcaagtcgcctgatgatcccgcacggcacatcactggggagaagctcggagagctgtataagagctttatcaagaactatcctgtggtctccatcgaagacccctttgaccaggatgactgggccacttggacctccttcctctcgggggtgaacatccagattgtgggggatgacttgacagtcaccaaccccaagaggattgcccaggccgttgagaagaaggcctgcaactgtctgctgctgaaggtcaaccagatcggctcggtgaccgaatcgatccaggcgtgcaaactggctcagtctaatggctggggggtgatggtgagccaccgctctggggagactgaggacacattcattgctgaccttgtggtggggctctgcacaggacagatcaagactggcgccccctgccgctcggagcgtctggccaaatacaaccaactcatgaggatcgaggaggctcttggggacaaggcaatctttgctggacgcaagttccgtaacccgaaggccaagtgagaagctggaggctccaggactccactggacagacccaggtcttccagacctgcttcctgaaataaacactggtgccaaccaaga

SEQ ID NO: 129944 - DNA, 563 bp, Homo sapiens
  Payload ID: 5419
  Gene Symbol: ENO3
  Gene Name: enolase 3 (beta, muscle)
  ENST ID: ENST00000522798
  CDS Start-End: 120-563
acttattcaagtaataagaaagcaaagaagagtttggccaaatcctctagtcgctctcatagctgaaggcacccaccggggccacttctgtccccagcgtcttctcgggtcgtgcagccatggccatgcagaaaatctttgcccgggaaatcttggactccaggggcaaccccacggtggaggtggacctgcacacggccaagggccgattccgagcagctgtgcccagtggggcttccacgggtatctatgaggctctggaactaagagacggagacaaaggccgctacctggggaaaggagtcctgaaggctgtggagaacatcaacaatactctgggccctgctctgctgcaaaagaaactaagcgttgtggatcaagaaaaagttgacaaatttatgattgagctagatgggaccgagaataagtccaagtttggggccaatgccatcctgggcgtgtccttggccgtgtgtaaggcgggagcagctgagaagggggtccccctgtaccgccacatcgcagatctcgctgggaaccctgacctcatactcccagtgcca

SEQ ID NO: 129945 - DNA, 561 bp, Homo sapiens
  Payload ID: 5419
  Gene Symbol: ENO3
  Gene Name: enolase 3 (beta, muscle)
  ENST ID: ENST00000522249
  CDS Start-End: 99-561
gacactgtcccagctgccacctagactcggagctccatccaaacctccagcgaagacatcccaggtcgggtgaatcttccagccctgggggtggagccatggccatgcagaaaatctttgcccgggaaatcttggactccaggggcaaccccacggtggaggtggacctgcacacggccaagggccgattccgagcagctgtgcccagtggggcttccacgggtatctatgaggctctggaactaagagacggagacaaaggccgctacctggggaaaggagtcctgaaggctgtggagaacatcaacaatactctgggccctgctctgctgcaaaagaaactaagcgttgtggatcaagaaaaagttgacaaatttatgattgagctagatgggaccgagaataagtccaagtttggggccaatgccatcctgggcgtgtccttggccgtgtgtaaggcgggagcagctgagaagggggtccccctgtaccgccacatcgcagatctcgctgggaaccctgacctcatactcccagtgccagccttcaatgtgatcaacg

SEQ ID NO: 129946 - DNA, 945 bp, Homo sapiens
  Payload ID: 5419
  Gene Symbol: ENO3
  Gene Name: enolase 3 (beta, muscle)
  ENST ID: ENST00000519602
  CDS Start-End: 97-945
ataaatgcgcagcctgagagggggtgagctgacactgtcccagctgccacctagactcggagctccatccaaacctccagcgaagacatcccagccatggccatgcagaaaatctttgcccgggaaatcttggactccaggggcaaccccacggtggaggtggacctgcacacggccaagggccgattccgagcagctgtgcccagtggggcttccacgggtatctatgaggctctggaactaagagacggagacaaaggccgctacctggggaaaggagtcctgaaggctgtggagaacatcaacaatactctgggccctgctctgctgcaaaagaaactaagcgttgtggatcaagaaaaagttgacaaatttatgattgagctagatgggaccgagaataagtccaagtttggggccaatgccatcctgggcgtgtccttggccgtgtgtaaggcgggagcagctgagaagggggtccccctgtaccgccacatcgcagatctcgctgggaaccctgacctcatactcccagtgccagccttcaatgtgatcaacgggggctcccatgctggaaacaagctggccatgcaggagttcatgattctgcctgtgggagccagctccttcaaggaagccatgcgcattggcgccgaggtctaccaccacctcaagggggtcatcaaggccaagtatgggaaggatgccaccaatgtgggtgatgaaggtggcttcgcacccaacatcctggagaacaatgaggccctggagctgctgaagacggccatccaggcggctggttacccagacaaggtggtgatcggcatggatgtggcagcatctgagttctatcgcaatgggaagtacgatcttgacttcaagtcgcctgatgatcccgcacggcacatcactggggagaagctcggagagctgtataagagcttt

SEQ ID NO: 129947 - DNA, 1312 bp, Homo sapiens
  Payload ID: 5419
  Gene Symbol: ENO3
  Gene Name: enolase 3 (beta, muscle)
  ENST ID: ENST00000521659
  CDS Start-End: 67-243
gacactgtcccagctgccacctagactcggagctccatccaaacctccagcgaagacatcccagccatggccatgcagaaaatctttgcccgggaaatcttggactccaggggcaaccccacggtggaggtggacctgcacacggccaaggacttcttcccaagcccccttcttccaacgtggaaccagagctggaagctaggagaagcaggagtctctctctgcactgcctcctgtccctgagctcagagaggacacctcagccctttgagaggccgattccgagcagctgtgcccagtggggcttccacgggtatctatgaggctctggaactaagagacggagacaaaggccgctacctggggaaaggagtcctgaaggctgtggagaacatcaacaatactctgggccctgctctgctgcaaaagaaactaagcgttgtggatcaagaaaaagttgacaaatttatgattgagctagatgggaccgagaataagtccaagtttggggccaatgccatcctgggcgtgtccttggccgtgtgtaaggcgggagcagctgagaagggggtccccctgtaccgccacatcgcagatctcgctgggaaccctgacctcatactcccagtgccagccttcaatgtgatcaacgggggctcccatgctggaaacaagctggccatgcaggagttcatgattctgcctgtgggagccagctccttcaaggaagccatgcgcattggcgccgaggtctaccaccacctcaagggggtcatcaaggccaagtatgggaaggatgccaccaatgtgggtgatgaaggtggcttcgcacccaacatcctggagaacaatgaggccctggagctgctgaagacggccatccaggcggctggttacccagacaaggtggtgatcggcatggatgtggcagcatctgagttctatcgcaatgggaagtacgatcttgacttcaagtcgcctgatgatcccgcacggcacatcactggggagaagctcggagagctgtataagagctttatcaagaactatcctggtgaggcgttcgggtgtcccagtgttcctgcccgaatcccgtgcagctgcctaatatactgatttcagtgacctgctttgccatcgacttggatccttccaattcttagccccattaaaatccccatttaagctcttctgccctgtcacccctccatgaggctccttctgacctctagccgtgtctctgccctgtctctgccttgtctctgccctgtctctgctctgtctctgccctgtctctgccctgtctctgccc

SEQ ID NO: 129948 - DNA, 1322 bp, Homo sapiens
  Payload ID: 5419
  Gene Symbol: ENO3
  Gene Name: enolase 3 (beta, muscle)
  Uniprot ID: P13929
  ENST ID: ENST00000519584
  CDS Start-End: 67-1242
gacactgtcccagctgccacctagactcggagctccatccaaacctccagcgaagacatcccagccatggccatgcagaaaatctttgcccgggaaatcttggactccaggggcaaccccacggtggaggtggacctgcacacggccaagggccgattccgagcagctgtgcccagtggggcttccacgggtatctatgaggctctggaactaagagacggagacaaaggccgctacctggggaaagccaagtttggggccaatgccatcctgggcgtgtccttggccgtgtgtaaggcgggagcagctgagaagggggtccccctgtaccgccacatcgcagatctcgctgggaaccctgacctcatactcccagtgccagccttcaatgtgatcaacgggggctcccatgctggaaacaagctggccatgcaggagttcatgattctgcctgtgggagccagctccttcaaggaagccatgcgcattggcgccgaggtctaccaccacctcaagggggtcatcaaggccaagtatgggaaggatgccaccaatgtgggtgatgaaggtggcttcgcacccaacatcctggagaacaatgaggccctggagctgctgaagacggccatccaggcggctggttacccagacaaggtggtgatcggcatggatgtggcagcatctgagttctatcgcaatgggaagtacgatcttgacttcaagtcgcctgatgatcccgcacggcacatcactggggagaagctcggagagctgtataagagctttatcaagaactatcctgtggtctccatcgaagacccctttgaccaggatgactgggccacttggacctccttcctctcgggggtgaacatccagattgtgggggatgacttgacagtcaccaaccccaagaggattgcccaggccgttgagaagaaggcctgcaactgtctgctgctgaaggtcaaccagatcggctcggtgaccgaatcgatccaggcgtgcaaactggctcagtctaatggctggggggtgatggtgagccaccgctctggggagactgaggacacattcattgctgaccttgtggtggggctctgcacaggacagatcaagactggcgccccctgccgctcggagcgtctggccaaatacaaccaactcatgaggatcgaggaggctcttggggacaaggcaatctttgctggacgcaagttccgtaacccgaaggccaagtgagaagctggaggctccaggactccactggacagacccaggtcttccagacctgcttcctgaaataaacactggtgccaacc

SEQ ID NO: 129949 - DNA, 1448 bp, Homo sapiens
  Payload ID: 5419
  Gene Symbol: ENO3
  Gene Name: enolase 3 (beta, muscle)
  Uniprot ID: P13929
  ENST ID: ENST00000518175
  CDS Start-End: 73-1377
aaagggcaagggatttctggttccttaagagatcaactgtctacactcactcacacctcctgtcctgcagccatggccatgcagaaaatctttgcccgggaaatcttggactccaggggcaaccccacggtggaggtggacctgcacacggccaagggccgattccgagcagctgtgcccagtggggcttccacgggtatctatgaggctctggaactaagagacggagacaaaggccgctacctggggaaaggagtcctgaaggctgtggagaacatcaacaatactctgggccctgctctgctgcaaaagaaactaagcgttgtggatcaagaaaaagttgacaaatttatgattgagctagatgggaccgagaataagtccaagtttggggccaatgccatcctgggcgtgtccttggccgtgtgtaaggcgggagcagctgagaagggggtccccctgtaccgccacatcgcagatctcgctgggaaccctgacctcatactcccagtgccagccttcaatgtgatcaacgggggctcccatgctggaaacaagctggccatgcaggagttcatgattctgcctgtgggagccagctccttcaaggaagccatgcgcattggcgccgaggtctaccaccacctcaagggggtcatcaaggccaagtatgggaaggatgccaccaatgtgggtgatgaaggtggcttcgcacccaacatcctggagaacaatgaggccctggagctgctgaagacggccatccaggcggctggttacccagacaaggtggtgatcggcatggatgtggcagcatctgagttctatcgcaatgggaagtacgatcttgacttcaagtcgcctgatgatcccgcacggcacatcactggggagaagctcggagagctgtataagagctttatcaagaactatcctgtggtctccatcgaagacccctttgaccaggatgactgggccacttggacctccttcctctcgggggtgaacatccagattgtgggggatgacttgacagtcaccaaccccaagaggattgcccaggccgttgagaagaaggcctgcaactgtctgctgctgaaggtcaaccagatcggctcggtgaccgaatcgatccaggcgtgcaaactggctcagtctaatggctggggggtgatggtgagccaccgctctggggagactgaggacacattcattgctgaccttgtggtggggctctgcacaggacagatcaagactggcgccccctgccgctcggagcgtctggccaaatacaaccaactcatgaggatcgaggaggctcttggggacaaggcaatctttgctggacgcaagttccgtaacccgaaggccaagtgagaagctggaggctccaggactccactggacagacccaggtcttccagacctgcttcctgaaataaacactg

SEQ ID NO: 129950 - DNA, 656 bp, Homo sapiens
  Payload ID: 5419
  Gene Symbol: ENO3
  Gene Name: enolase 3 (beta, muscle)
  ENST ID: ENST00000521811
  CDS Start-End: 213-656
ggctcagggataaatgcgcagcctgagagggggtgagctgacactgtcccagctgccacctagactcggagctccatccaaacctccagcgaagacatcccagctccagcacctgccttcttggagtggggaagaatcttaaagggcaagggatttctggttccttaagagatcaactgtctacactcactcacacctcctgtcctgcagccatggccatgcagaaaatctttgcccgggaaatcttggactccaggggcaaccccacggtggaggtggacctgcacacggccaagggccgattccgagcagctgtgcccagtggggcttccacgggtatctatgaggctctggaactaagagacggagacaaaggccgctacctggggaaaggagtcctgaaggctgtggagaacatcaacaatactctgggccctgctctgctgcaaaagaaactaagcgttgtggatcaagaaaaagttgacaaatttatgattgagctagatgggaccgagaataagtccaagtttggggccaatgccatcctgggcgtgtccttggccgtgtgtaaggcgggagcagctgagaagggggtccccctgtaccgccacatcgcagatctcgctgggaaccctgacctcatactcccagtgcca

SEQ ID NO: 129951 - DNA, 1081 bp, Homo sapiens
  Payload ID: 5419
  Gene Symbol: ENO3
  Gene Name: enolase 3 (beta, muscle)
  ENST ID: ENST00000522301
  CDS Start-End: 444-1081
gctggtatggctgcagaggagctcggggcagaccccgcactggccccagagccggcaaagtggagatctctaccgagggcagagacctacctccccgcagtgctacaagtggggcgccggaagagccccaggcgtgcagaagctcacaaaaggccacccgtcctcggtccattcatttttgttcactgttgattcagccccattcattgatgggctggggccgtgcgctgagcgcccacagtcgatggggaaaggggctctgaccgacagtccccacgccgggcgacaagtgctgtcccagcgttatcagtcgggcgccttgccagccgaaagggcctgtctaaattcgtttcctgtcccctaactcatcccggcgctggctggcctggagagggtaggatggggcggcgccgagaatggccgttatgaggaccctaagagccatggccatgcagaaaatctttgcccgggaaatcttggactccaggggcaaccccacggtggaggtggacctgcacacggccaagggccgattccgagcagctgtgcccagtggggcttccacgggtatctatgaggctctggaactaagagacggagacaaaggccgctacctggggaaaggagtcctgaaggctgtggagaacatcaacaatactctgggccctgctctgctgcaaaagaaactaagcgttgtggatcaagaaaaagttgacaaatttatgattgagctagatgggaccgagaataagtccaagtttggggccaatgccatcctgggcgtgtccttggccgtgtgtaaggcgggagcagctgagaagggggtccccctgtaccgccacatcgcagatctcgctgggaaccctgacctcatactcccagtgccagccttcaatgtgatcaacgggggctcccatgctggaaacaagctggccatgcaggagttcatgattctgcctgtgggagccagctccttcaaggaagccatgcgcattggcgccgaggtctaccaccacctcaagggggtcatcaaggccaagtatgggaaggatgccaccaatgtgggtgatgaaggtggctt

SEQ ID NO: 129952 - DNA, 343 bp, Homo sapiens
  Payload ID: 5419
  Gene Symbol: ENO3
  Gene Name: enolase 3 (beta, muscle)
  ENST ID: ENST00000519266
  CDS Start-End: 259-343
cgggcaactgagggacccactcacgtgcagccgccattcgcgccgcttccagggcaagcacccagtcagggcctctcgctgcgcgccctagaccgcgcccgcccccacccaagtccctccctcagggtccaaaccggagcagtgccccggaccgcgcaggcctcgcagtaccgtgatgttgacgaacgttttcccggggacggcggcccagacggagggcgagtccttgtagcccacgatggccgcgtcctgacagccatggccatgcagaaaatctttgcccgggaaatcttggactccaggggcaaccccacggtggaggtggacctgcacacggccaagg

SEQ ID NO: 129953 - DNA, 714 bp, Homo sapiens
  Payload ID: 5419
  Gene Symbol: ENO3
  Gene Name: enolase 3 (beta, muscle)
  ENST ID: ENST00000520221
  CDS Start-End: 125-714
cctcgcagtaccgtgatgttgacgaacgttttcccggggacggcggcccagacggagggcgagtccttgtagcccacgatggccgcgtcctgacaggtcccgtccgccatgaggttgtcgatccatggccatgcagaaaatctttgcccgggaaatcttggactccaggggcaaccccacggtggaggtggacctgcacacggccaagggccgattccgagcagctgtgcccagtggggcttccacgggtatctatgaggctctggaactaagagacggagacaaaggccgctacctggggaaaggagtcctgaaggctgtggagaacatcaacaatactctgggccctgctctgctgcaaaagaaactaagcgttgtggatcaagaaaaagttgacaaatttatgattgagctagatgggaccgagaataagtccaagtttggggccaatgccatcctgggcgtgtccttggccgtgtgtaaggcgggagcagctgagaagggggtccccctgtaccgccacatcgcagatctcgctgggaaccctgacctcatactcccagtgccagccttcaatgtgatcaacgggggctcccatgctggaaacaagctggccatgcaggagttcatgattctgcctgtgggagccagctccttcaaggaagccatgcgcattggcgccgaggtctaccaccacctcaagggggtcatcaa

SEQ ID NO: 129954 - DNA, 2865 bp, Homo sapiens
  Payload ID: 5420
  Gene Symbol: ENO4
  Gene Name: enolase family member 4
  ENST ID: ENST00000341276
  CDS Start-End: 56-1933
agggacgctcgtgggaccccaggctaaaccccgctgtagccttaaatctcctaccatggaggaagaaggcggcggccgcagctgtgggaccactagggagctgcagaagctgaagcagcaggcgatggagtactaccgggagaacgacgttccgcgcaggctggaagagctgctcaactccaccttctacctccagcctgccgacgtctacgggcacctggcaaactgcttttctaaacttgcaaagcctcccaccatatgcaaaatagtggggaaagacgtactagatggactggggcttccaaccctgcaagtggacatattctgcaccattcaaaactttcccaagaacgtatgttctgtggtgatctcgactcattttgaagtccatgagaatgctctgcccgagctggccaaggcggaggaggcagagagggccagcgcggtgagcaccgccgtgcagtgggtcaacagcaccatcacgcacgagctccaggggatggcaccctctgaccaggcagaggtggatcacctactcaggatattcttcgcaagtaaagtacaagaagataaggggagaaaagaattggaaaagagcctggaatactcaacagtgcctacacctctacctccagtaccaccaccaccaccccctccacctcctaccaaaaaaaaggggcaaaagccagggaggaaggatactattacagagaaacctattgcgcctgcagagcctgttgagcctgtactcagtggcagtatggccataggggccgtgtcactagctgttgccaaagcctgtgccatgctgcttaataaacctctgtacttaaatatcgctctactgaagcacaatcaggaacagccaacaacgctatctatgcctttgctgatggtatcgctggtcagctgtgggaagtcatcatctgggaagctaaatttaatgaaagaagtgatttgtataccccatcctgaattaacaaccaaacaaggtgtcgagatgcttatggaaatgcagaaacatatcaacaaaataattgaaatgccctctcctccaaaagcagagacaaaaaaagggcacgatggaagcaaaagaggtcaacagcagatcactggcaagatgtctcatcttggctgtttaaccattaactgtgactccatagaacagccactgcttctaatacaggaaatctgtgccaacctggggctagaactgggaacaaatctgcatctagctatcaactgtgctggacatgagctgatggactacaataaaggaaagtatgaagtgatcatgggcacatacaaaaatgcagcggagatggttgacctgtatgtggatctgatcaacaagtacccttcaattattgccttaattgatcctttcaggaaggaggactctgaacagtgggacagcatctatcacgcacttggttccaggtgttacataattgcaggaactgcttccaaaagcatttctaaacttctagagcaaggaaacatcagcatccccaaatccaatgggctgatcataaaacacacaaaccaaactacaatgtctgacttggtggaaataaccaatctgattgacagtaagaagcacatcactgtctttggaagtacagaaggagaatcatctgatgacagccttgtcgatttggctgttgggcttggtgtccggttcatcaagttggggggtctttcccgtggtgaacgagtgactaaatacaaccgccttctcactatagaggaagaacttgtccagaatggaacactgggtttcaaagaagaacacacttttttttactttaatgaggaagctgaaaaggctgcggaggcacttgaggctgctgcggctagggagccgctggtgcccaccttccccacacaaggtgtagaggaatcagccgaaacaggagcatcctctggatagggctgtacacaccccaggttccagccacaccatcagtattagtagaccgggaggtctgaagtacggcgccgtgtctccacatggagtttcctcttcaacttcaccaactcttgtggtttttattcttctaattccactgtttggtaaattacatatatgatgtttttgcctgaaattctgtgaacttcgttttgcagccaccacacttccatgtggattttgtttgtctattagctctcctgtccatttttcagggacacgctccagtaaaagaggccaatatttttgttgccaactccacactcagtcaaacaccccatcctttaccaatcagaatatctctgagaacaaaaacctaatgaccctagaagctctctgtgctgggaacagatgtccatcttctgtgtttattctacatgtctgtgctgaaaagcactgacacatttttgtaaccaacctcacgtagaagtgtgagagcatcaccattttttgtaagagccaatttcatctcactttcctacccttgattccttttttcctaattccctctcctttttaaattttagtttttcttgtattatttttatctttgcgagtcttcttagatcctttttggagtaagaatgagtataaatgaataagcacatcagtaaatgaattaatattctcaaggttattaaatgcccagttattcataccacagcatttaaaaagcaatccgcaagtgataaaaaaaaaaaaaaaaaatgatgtgacatatccattgcctgaattgctcttttgtaagccagtgttgggattatagcagaggagtagcagaaataaatatattcagacacaaacatatagatataataatatccaaccactttatatgatttagggtctcgttaaaatggttaccatttgcttctcctaaaaattatataaat

SEQ ID NO: 129955 - DNA, 1484 bp, Homo sapiens
  Payload ID: 5420
  Gene Symbol: ENO4
  Gene Name: enolase family member 4
  ENST ID: ENST00000369207
  CDS Start-End: 177-1268
aattggaaaagagcctggaatactcaacagtgcctacacctctacctccagtaccaccaccaccaccccctccacctcctaccaaaaaaaaggggcaaaagccagggaggaaggatactattacagagaaacctattgcgcctgcagagcctgttgagcctgtactcagtggcagtatggccataggggccgtgtcactagctgttgccaaagcctgtgccatgctgcttaataaacctctgtacttaaatatcgctctactgaagcacaatcaggaacagccaacaacgctatctatgcctttgctgatggtatcgctggtcagctgtgggaagtcatcatctgggaagctaaatttaatgaaagaagtgatttgtataccccatcctgaattaacaaccaaacaaggtgtcgagatgcttatggaaatgcagaaacatatcaacaaaataattgaaatgccctctcctccaaaagcagagacaaaaaaagggcacgatggaagcaaaagaggtcaacagcagatcactggcaagatgtctcatcttggctgtttaaccattaactgtgactccatagaacagccactgcttctaatacaggaaatctgtgccaacctggggctagaactgggaacaaatctgcatctagctatcaactgtgctggacatgagctgatggactacaataaaggaaagtatgaagtgatcatgggcacatacaaaaatgcagcggagatggttgacctgtatgtggatctgatcaacaagtacccttcaattattgccttaattgatcctttcaggaaggaggactctgaacagtgggacagcatctatcacgcacttggttccaggtgttacataattgcaggaactgcttccaaaagcatttctaaacttctagagcaaggaaacatcagcatccccaaatccaatgggctgatcataaaacacacaaaccaaactacaatgtctgacttggtggaaataaccaatctgattgacagtaagaagcacatcactgtctttggaagtacagaaggagaatcatctgatgacagccttgtcgatttggctgttgggcttggtgtccggttcatcaagttggggggtctttcccgtggtgaacgagtgactaaatacaaccgccttctcactatagaggaagaacttgtccagaatggaacactggccacttcatcttcaagctgtgatgccaggattggagggcaagaacaggaaacaatgactttggtgaaagtgtaaccactcttttagaacaaaaacagcacagtgttatttgaaaaattattaacatatgtgatggagcagtctgtaagcacgatcaaataaactggccaaagatgaggctaattgtaaatgggaataaaacacaccacaaacaattcacaaaaaacagattttaaaatactctcctttcatttccccattagctaaacaataaactgaaatctattctta

SEQ ID NO: 129956 - DNA, 1840 bp, Homo sapiens
  Payload ID: 5420
  Gene Symbol: ENO4
  Gene Name: enolase family member 4
  Uniprot ID: A6NNW6
  ENST ID: ENST00000409522
  CDS Start-End: 56-982
agggacgctcgtgggaccccaggctaaaccccgctgtagccttaaatctcctaccatggaggaagaaggcggcggccgcagctgtgggaccactagggagctgcagaagctgaagcagcaggcgatggagtactaccgggagaacgacgttccgcgcaggctggaagagctgctcaactccaccttctacctccagcctgccgacgtctacgggcacctgccctctcctccaaaagcagagacaaaaaaagggcacgatggaagcaaaagaggtcaacagcagatcactggcaagatgtctcatcttggctgtttaaccattaactgtgactccatagaacagccactgcttctaatacaggaaatctgtgccaacctggggctagaactgggaacaaatctgcatctagctatcaactgtgctggacatgagctgatggactacgactctgaacagtgggacagcatctatcacgcacttggttccaggtgttacataattgcaggaactgcttccaaaagcatttctaaacttctagagcaaggaaacatcagcatccccaaatccaatgggctgatcataaaacacacaaaccaaactacaatgtctgacttggtggaaataaccaatctgattgacagtaagaagcacatcactgtctttggaagtacagaaggagaatcatctgatgacagccttgtcgatttggctgttgggcttggtgtccggttcatcaagttggggggtctttcccgtggtgaacgagtgactaaatacaaccgccttctcactatagaggaagaacttgtccagaatggaacactgggtttcaaagaagaacacacttttttttactttaatgaggaagctgaaaaggctgcggaggcacttgaggctgctgcggctagggagccgctggtgcccaccttccccacacaaggtgtagaggaatcagccgaaacaggagcatcctctggatagggctgtacacaccccaggttccagccacaccatcagtattagtagaccgggaggtctgaagtacggcgccgtgtctccacatggagtttcctcttcaacttcaccaactcttgtggtttttattcttctaattccactgtttggtaaattacatatatgatgtttttgcctgaaattctgtgaacttcgttttgcagccaccacacttccatgtggattttgtttgtctattagctctcctgtccatttttcagggacacgctccagtaaaagaggccaatatttttgttgccaactccacactcagtcaaacaccccatcctttaccaatcagaatatctctgagaacaaaaacctaatgaccctagaagctctctgtgctgggaacagatgtccatcttctgtgtttattctacatgtctgtgctgaaaagcactgacacatttttgtaaccaacctcacgtagaagtgtgagagcatcaccattttttgtaagagccaatttcatctcactttcctacccttgattccttttttcctaattccctctcctttttaaattttagtttttcttgtattatttttatctttgcgagtcttcttagatcctttttggagtaagaatgagtataaatgaataagcacatcagtaaatgaattaatattctcaaggttattaaatgcccagttattcataccacagcatttaaaaagcaatccgcaagtgataaaaaaaaaaaaaaaaaatgatgtgacatatccattgcctgaattgctcttttgtaagccagtgttgggattatagcagaggagtagcagaaataaatatattcagacacaaacatatagatataataa

SEQ ID NO: 129957 - DNA, 415 bp, Homo sapiens
  Payload ID: 5420
  Gene Symbol: ENO4
  Gene Name: enolase family member 4
  ENST ID: ENST00000512864
  CDS Start-End: 1-415
gcggccgcagctgtgggaccactagggagctgcagaagctgaagcagcaggcgatggagtactaccgggagaacgacgttccgcgcaggctggaagagctgctcaactccaccttctacctccagcctgccgacgtctacgggcacctggcaaactgcttttctaaacttgcaaagcctcccaccatatgcaaaatagtggggaaagacgtactagatggactggggcttccaaccctgcaagtggacatattctgcaccattcaaaactttcccaagaacgtatgttctgtggtgatctcgactcattttgaagtccatgagaatgctctgcccgagctggccaaggcggaggaggcagagagggccagcgcggtgagcaccgccgtgcagtgggtcaacagcaccatcacgca

SEQ ID NO: 129958 - DNA, 2874 bp, Homo sapiens
  Payload ID: 5420
  Gene Symbol: ENO4
  Gene Name: enolase family member 4
  ENST ID: ENST00000622726
  CDS Start-End: 56-1942
agggacgctcgtgggaccccaggctaaaccccgctgtagccttaaatctcctaccatggaggaagaaggcggcggccgcagctgtgggaccactagggagctgcagaagctgaagcagcaggcgatggagtactaccgggagaacgacgttccgcgcaggctggaagagctgctcaactccaccttctacctccagcctgccgacgtctacgggcacctgaaagcaaactgcttttctaaacttgcaaagcctcccaccatatgcaaaatagtggggaaagacgtactagatggactggggcttccaaccctgcaagtggacatattctgcaccattcaaaactttcccaagaacgtatgttctgtggtgatctcgactcattttgaagtccatgagaatgctctgcccgagctggccaaggcggaggaggcagagagggccagcgcggtgagcaccgccgtgcagtgggtcaacagcaccatcacgcacgagctccaggggatggcaccctctgaccaggcagaggtggatcacctactcaggatattcttcgcaagtaaagtacaagaagataaggggagaaaagaattggaaaagagcctggaatactcaacagtgcctacacctctacctccagtaccaccaccaccaccccctccacctcctaccaaaaaaaaggggcaaaagccagggaggaaggatactattacagagaaacctattgcgcctgcagagcctgttgagcctgtactcagtggcagtatggccataggggccgtgtcactagctgttgccaaagcctgtgccatgctgcttaataaacctctgtacttaaatatcgctctactgaagcacaatcaggaacagccaacaacgctatctatgcctttgctgatggtatcgctggtcagctgtgggaagtcatcatctgggaagctaaatttaatgaaagaagtgatttgtataccccatcctgaattaacaaccaaacaaggtgtcgagatgcttatggaaatgcagaaacatatcaacaaaataattgaaatggcgcctccctctcctccaaaagcagagacaaaaaaagggcacgatggaagcaaaagaggtcaacagcagatcactggcaagatgtctcatcttggctgtttaaccattaactgtgactccatagaacagccactgcttctaatacaggaaatctgtgccaacctggggctagaactgggaacaaatctgcatctagctatcaactgtgctggacatgagctgatggactacaataaaggaaagtatgaagtgatcatgggcacatacaaaaatgcagcggagatggttgacctgtatgtggatctgatcaacaagtacccttcaattattgccttaattgatcctttcaggaaggaggactctgaacagtgggacagcatctatcacgcacttggttccaggtgttacataattgcaggaactgcttccaaaagcatttctaaacttctagagcaaggaaacatcagcatccccaaatccaatgggctgatcataaaacacacaaaccaaactacaatgtctgacttggtggaaataaccaatctgattgacagtaagaagcacatcactgtctttggaagtacagaaggagaatcatctgatgacagccttgtcgatttggctgttgggcttggtgtccggttcatcaagttggggggtctttcccgtggtgaacgagtgactaaatacaaccgccttctcactatagaggaagaacttgtccagaatggaacactgggtttcaaagaagaacacacttttttttactttaatgaggaagctgaaaaggctgcggaggcacttgaggctgctgcggctagggagccgctggtgcccaccttccccacacaaggtgtagaggaatcagccgaaacaggagcatcctctggatagggctgtacacaccccaggttccagccacaccatcagtattagtagaccgggaggtctgaagtacggcgccgtgtctccacatggagtttcctcttcaacttcaccaactcttgtggtttttattcttctaattccactgtttggtaaattacatatatgatgtttttgcctgaaattctgtgaacttcgttttgcagccaccacacttccatgtggattttgtttgtctattagctctcctgtccatttttcagggacacgctccagtaaaagaggccaatatttttgttgccaactccacactcagtcaaacaccccatcctttaccaatcagaatatctctgagaacaaaaacctaatgaccctagaagctctctgtgctgggaacagatgtccatcttctgtgtttattctacatgtctgtgctgaaaagcactgacacatttttgtaaccaacctcacgtagaagtgtgagagcatcaccattttttgtaagagccaatttcatctcactttcctacccttgattccttttttcctaattccctctcctttttaaattttagtttttcttgtattatttttatctttgcgagtcttcttagatcctttttggagtaagaatgagtataaatgaataagcacatcagtaaatgaattaatattctcaaggttattaaatgcccagttattcataccacagcatttaaaaagcaatccgcaagtgataaaaaaaaaaaaaaaaaatgatgtgacatatccattgcctgaattgctcttttgtaagccagtgttgggattatagcagaggagtagcagaaataaatatattcagacacaaacatatagatataataatatccaaccactttatatgatttagggtctcgttaaaatggttaccatttgcttctcctaaaaattatataaat

SEQ ID NO: 129959 - DNA, 1867 bp, Homo sapiens
  Payload ID: 5421
  Gene Symbol: ENOSF1
  Gene Name: enolase superfamily member 1
  Uniprot ID: Q7L5Y1
  ENST ID: ENST00000251101
  CDS Start-End: 90-1421
cgctcccgccctcccgccctcccgccgcgcgctcgggatcccgaccagtcctgaccgcacgggggccgcggccacggggcgcaggggccatggtgcgcggcaggatctcccggctctcggtccgggacgtgcgcttccccacgtcgcttgggggccacggcgcggacgccatgcacacggaccctgactactcggctgcctatgtcgtcatagaaactgatgcagaagatggaatcaaggggtgtggaattaccttcactctgggaaaaggcactgaagttgttgtctgtgctgtgaatgccctcgcccaccatgtgctcaacaaggacctcaaggacattgttggtgacttcagaggcttctataggcagctcacaagtgatgggcagctcagatggattggtccagaaaagggcgtggtgcacctggcgacagcggccgtcctaaacgcggtgtgggacttgtgggccaagcaggagggaaagcctgtctggaagttacttgtggacatggatcccaggatgctggtatcctgcatagatttcaggtacatcactgatgtcctgactgaggaggatgccctagaaatactgcagaaaggtcaaattggtaaaaaagaaagagagaagcaaatgctggcacaaggataccctgcttacacgacatcgtgcgcctggctggggtactcagatgacacgttgaagcagctctgtgcccaggcgctgaaggatggctggaccaggtttaaagtaaaggtgggtgctgatctccaggatgacatgcgaagatgccaaatcatccgagacatgattggaccggaaaagactttgatgatggatgccaaccagcgctgggatgtgcctgaggcggtggagtggatgtccaagctggccaagttcaagccattgtggattgaggagccaacctcccctgatgacattctggggcacgccaccatttccaaggcactggtcccattaggaattggcattgccacaggagaacagtgccacaatagagtgatatttaagcaactcctacaggcgaaggccctgcagttcctccagattgacagttgcagactgggcagtgtcaatgagaacctctcagtattgctgatggccaaaaagtttgaaattcctgtttgcccccatgctggtggagttggcctctgtgaactggtgcagcacctgattatatttgactacatatcagtttctgcaagccttgaaaatagggtgtgtgagtatgttgaccacctgcatgagcatttcaagtatcccgtgatgatccagcgggcttcctacatgcctcccaaggatcccggctactcaacagaaatgaaggaggaatctgtaaagaaacaccagtatccagatggtgaagtttggaagaaactccttcctgctcaagaaaattaagtgctcagccccaacaacttttttctttctgaagtgaaagggcttaaaatttcttggaaatagttttacaaaaatggatttaaaaaatcctaccgatcaagatgagttcagctagaagtcataccaccctcaggaatcagctaagtaattattacttgattcttttagcaaatcaatgcacgttatcctacttaatccttaaataagtttagatttaactaacccaaagtccaggaggatgttcttacaaaaatagctatatcaagggctggcacctagacattaaactgtaatttgaaaataagcaacatgttgcataacttgttggaataattccttgttctgtttaacacttgtcataaattagcagaataaaaatagtcgtgcaacaccgggggtatctggtatgcaacgaagggaaaaatatttcactgattaaccccgaa

SEQ ID NO: 129960 - DNA, 1658 bp, Homo sapiens
  Payload ID: 5421
  Gene Symbol: ENOSF1
  Gene Name: enolase superfamily member 1
  Uniprot ID: Q7L5Y1
  ENST ID: ENST00000340116
  CDS Start-End: 39-1391
gcttccccacgtcgcttgggggccacggcgcggacgccatggtaagcgcggacgccatggtaagcgcggacgccatggtaagcgcggacgccatggtaagcgcggacgccatggtaagcgcggacgccatggtaagcgcggacgccatggtaagcgcggacgccatggtaagcgcggacgccatgcacacggaccctgactactcggctgcctatgtcgtcatagaaactgatgcagaagatggaatcaaggggtgtggaattaccttcactctgggaaaaggcactgaagttgttgtctgtgctgtgaatgccctcgcccaccatgtgctcaacaaggacctcaaggacattgttggtgacttcagaggcttctataggcagctcacaagtgatgggcagctcagatggattggtccagaaaagggcgtggtgcacctggcgacagcggccgtcctaaacgcggtgtgggacttgtgggccaagcaggagggaaagcctgtctggaagttacttgtggacatggatcccaggatgctggtatcctgcatagatttcaggtacatcactgatgtcctgactgaggaggatgccctagaaatactgcagaaaggtcaaattggtaaaaaagaaagagagaagcaaatgctggcacaaggataccctgcttacacgacatcgtgcgcctggctggggtactcagatgacacgttgaagcagctctgtgcccaggcgctgaaggatggctggaccaggtttaaagtaaaggtgggtgctgatctccaggatgacatgcgaagatgccaaatcatccgagacatgattggaccggaaaagactttgatgatggatgccaaccagcgctgggatgtgcctgaggcggtggagtggatgtccaagctggccaagttcaagccattgtggattgaggagccaacctcccctgatgacattctggggcacgccaccatttccaagtgccacaatagagtgatatttaagcaactcctacaggcgaaggccctgcagttcctccagattgacagttgcagactgggcagtgtcaatgagaacctctcagtattgctgatggccaaaaagtttgaaattcctgtttgcccccatgctggtggagttggcctctgtgaactggtgcagcacctgattatatttgactacatatcagtttctgcaagccttgaaaatagggtgtgtgagtatgttgaccacctgcatgagcatttcaagtatcccgtgatgatccagcgggcttcctacatgcctcccaaggatcccggctactcaacagaaatgaaggaggaatctgtaaagaaacaccagtatccagatggtgaagtttggaagaaactccttcctgctcaagaaaattaagtgctcagccccaacaacttttttctttctgaagtgaaagggcttaaaatttcttggaaatagttttacaaaaatggatttaaaaaatcctaccgatcaagatgagttcagctagaagtcataccaccctcaggaatcagctaagtaattattacttgattcttttagcaaatcaatgcacgttatcctacttaatccttaaataagtttagatttaactaacccaaagtccaggaggatgttcttacaaaaatagctatatcaagg

SEQ ID NO: 129961 - DNA, 4188 bp, Homo sapiens
  Payload ID: 5421
  Gene Symbol: ENOSF1
  Gene Name: enolase superfamily member 1
  Uniprot ID: Q7L5Y1
  ENST ID: ENST00000383578
  CDS Start-End: 206-1291
cgccctcccgccgcgcgctcgggatcccgaccagtcctgaccgcacgggggccgcggccacggggcgcaggggccatggtgcgcggcaggatctcccggctctcggtccgggacgtgcgcttccccacgtcgcttgggggccacggcgcggacgccatgcacacggaccctgactactcggctgcctatgtcgtcatagaaactgatgcagaagatggaatcaaggggtgtggaattaccttcactctgggaaaaggcactgaagttgattggtccagaaaagggcgtggtgcacctggcgacagcggccgtcctaaacgcggtgtgggacttgtgggccaagcaggagggaaagcctgtctggaagttacttgtggacatggatcccaggatgctggtatcctgcatagatttcaggtacatcactgatgtcctgactgaggaggatgccctagaaatactgcagaaaggtcaaattggtaaaaaagaaagagagaagcaaatgctggcacaaggataccctgcttacacgacatcgtgcgcctggctggggtactcagatgacacgttgaagcagctctgtgcccaggcgctgaaggatggctggaccaggtttaaagtaaaggtgggtgctgatctccaggatgacatgcgaagatgccaaatcatccgagacatgattggaccggaaaagactttgatgatggatgccaaccagcgctgggatgtgcctgaggcggtggagtggatgtccaagctggccaagttcaagccattgtggattgaggagccaacctcccctgatgacattctggggcacgccaccatttccaaggcactggtcccattaggaattggcattgccacaggagaacagtgccacaatagagtgatatttaagcaactcctacaggcgaaggccctgcagttcctccagattgacagttgcagactgggcagtgtcaatgagaacctctcagtattgctgatggccaaaaagtttgaaattcctgtttgcccccatgctggtggagttggcctctgtgaactggtgcagcacctgattatatttgactacatatcagtttctgcaagccttgaaaatagggtgtgtgagtatgttgaccacctgcatgagcatttcaagtatcccgtgatgatccagcgggcttcctacatgcctcccaaggatcccggctactcaacagaaatgaaggaggaatctgtaaagaaacaccagtatccagatggtgaagtttggaagaaactccttcctgctcaagaaaattaagtgctcagccccaacaacttttttctttctgaagtgaaagggcttaaaatttcttggaaatagttttacaaaaatggatttaaaaaatcctaccgatcaagatgagttcagctagaagtcataccaccctcaggaatcagctaaagcaaaaagaacttttacctcggcatccagcccaacccctaaagactgacaatatccttcgagctcctttgaaagcaccctaaacagccatttccattttaatagttggatgcggattgtacccttcaatctgaaagtcttcagctttgaagtcatcaattttctcaacttttcgaagaatcctgagctttgggaaaggtctgggttctcgctgaagctaaaaacaaaataaggccattattttgccataattgtacgacctgttgtaattgctcctcatgtccgtgaaacaagtacacaggatgtgatcaacaaagttctattttacaggagtatgatcctgtcgataccttgccgtaggttatgtaacatgattggagcgcaaccagctgttctcttgcacagatcgagagtgaggggtattttgtgacattacacagcatcaggagcctggtgcctcatcaggtgtaagttcttataaccactcttggcaaatttattaaagacaggaacacagtcaatctgtaactcatagtagctctacgtttacttgaattccacaatccctaacccatctgtccctggcagaaagaaggaaagatgacatgcatggacagtgaacagaaagggatgaaagccaggattcctgggatgaacagacagtggcaattaggatgtgaagacaggtcacaacctattactatgtctaaaaacgaccagagcagagagccagagagaataagcctgaagtcacctccactcaaaagcagccaaactccctcaaaggagtaacttttaaaacctggatctaacctggaaggggctaaaaagtgtctggttctgagtttttttccttaaggctcatgaagcagatgaacttacatttttattgccatttcatatcaattgttggctgctataacttagggatttcaacagacttttgaagtttggacctaaatattgtacttaatgtaaaattaacaaaaaatatttatggccagggtggtggcttatgcctgtaattccagaattttcggaggctgaggcaggtggatcacttgaagtcaggagtttgagactagcctggccaacatgatgaaaccccatctctactaataatacaaaaattagctgggtgtggtggcatgtgcctgtaatcccagctacctgggaggctgaggcagaagaattgcttgaacccgggaggtggaggttgcagtgagctgagatcgcaccacggcacactccagcctggccgacagagaaagactccatctcaaaaaaaaaagaaaaggaaaaacatttgcacttcaattctccttcaagttaaaatgagttaaaatgcccccttttggacaatcccctggcttgaatgtggctcttccctctctggtactggtgcttagtacctcacagcacctgacatgttaagtgcccatggttgctgaggcagatgcctgccttgtcctgcccacctgcccaccacttctccctaaactgaagccccacatttggagcagtcatctttatcttggacacagcattgagcagatgcctgttccacagtcaaccttttatcaagagaaggtaccaaacccaaaagtataacatctaattcttacctgaattttcagtggctcgatgtgattcaggtaaatatgtgcatctcccaaagtgtgtataaagtcacctggctataaacccgggggagaaagcagaacagtatgttagtttcaattctttaaaacatcatttaaaaacattagaatatgcagacaccgcaaggctttttttaaaaaaataatttagtgtagcttttccatttttttgtagcaacagcatcttgttatgttgcccaggctggtattgaactccagacctcaagcaattgctcctgtctcagtctcccaaagtgctgggattacaggcatgagccaccatacccaacctcagcatagcttttgagaaaatccatagaagctgtatcacaaacaacctgtatagatctgttagtgcgtataccacagggccagaaaaccttccagaagaggaaggtttcaaagtaaaagctggttcatttcttacttacacatatcaaatttaaaagctaatcagagactaaactctgcaatttgttttcccatattaaagaactgaagagctcagtgtggtaggctggcaagtcacccttcccgagacagcccaccttcaggcccgtgatgtgcgcaatcatgtacgtgagcagggcgtagctggcgatgttgaaaggcacaccgaggcccatgtctcccgatctctggtacagctggcaggacagctcactgttcaccacatagaactggcagagggcatggcatggaggcagcgccatcagaggaagatctgaggaaccagcagaggaagataaggagggatggtggtttgaaagaccacagctaaaggcaaagtaaaacaggagagaaacagaagccaactcatatggtggagaccaggagagagagccactgggctgcagtgatgtccataacagcctctgcagcgatggcacggagctgagggagactatccatcggtgcaaggtttctgcaggtgtccatttacggctgaagcaatgctcttccatcagagctgaagggatctgggctacctcgtggcaccagattacaaatacagcaggaataattctgtttgccacaggaaactggtgcttctggtacaccctcctatattaaaagtctctattacatggc

SEQ ID NO: 129962 - DNA, 1296 bp, Homo sapiens
  Payload ID: 5421
  Gene Symbol: ENOSF1
  Gene Name: enolase superfamily member 1
  ENST ID: ENST00000585128
  CDS Start-End: 1-290
gccacggcgcggacgccatgcacacggaccctgactactcggctgcctatgtcgtcatagaaactgatgcagaagatggaatcaaggggtgtggaattaccttcactctgggaaaaggcactgaagttgattggtccagaaaagggcgtggtgcacctggcgacagcggccgtcctaaacgcggtgtgggacttgtgggccaagcaggagggaaagcctgtctggaagttacttgtggacatggatcccaggatgctggtatcctgcatagatttcaggtacatcactgatgtcctgactgaggaggatgccctagaaatactgcagaaaggtcaaattggtaaaaaagaaagagagaagcaaatgctggcacaaggataccctgcttacacgacatcgtgcgcctggctggggtactcagatgacacgttgaagcagctctgtgcccaggcgctgaaggatggctggaccaggtttaaagtaaaggtgggtgctgatctccaggatgacatgcgaagatgccaaatcatccgagacatgattggaccggaaaagactttgatgatggatgccaaccagcgctgggatgtgcctgaggcggtggagtggatgtccaagctggccaagttcaagccattgtggattgaggagccaacctcccctgatgacattctggggcacgccaccatttccaaggcactggtcccattaggaattggcattgccacaggagaacagtgccacaatagagtgatatttaagcaactcctacaggcgaaggccctgcagttcctccagattgacagttgcagactgggcagtgtcaatgagaacctctcagtattgctgatggccaaaaagtttgaaattcctgtttgcccccatgctggtggagttggcctctgtgaactggtgcagcacctgattatatttgactacatatcagtttctgcaagccttgaaaatagggtgtgtgagtatgttgaccacctgcatgagcatttcaagtatcccgtgatgatccagcgggcttcctacatgcctcccaaggatcccggctactcaacagaaatgaaggaggaatctgtaaagaaacaccagtatccagatggtgaagtttggaagaaactccttcctgctcaagaaaattaagtgctcagccccaacaacttttttctttctgaagtgaaagggcttaaaatttcttggaaatagttttacaaaaatggatttaaaaaatcctaccgatcaagatgagttcagctagaagtcataccaccctcaggaatcagctaa

SEQ ID NO: 129963 - DNA, 1397 bp, Homo sapiens
  Payload ID: 5421
  Gene Symbol: ENOSF1
  Gene Name: enolase superfamily member 1
  ENST ID: ENST00000580982
  CDS Start-End: 29-1132
ggggccgcggccacggggcgcaggggccatggtgcgcggcaggatctcccggctctcggtccgggacgtgcgcttccccacgtcgcttgggggccacggcgcggacgccatgcacacggaccctgactactcggctgcctatgtcgtcatagaaactgatgcagaagatggaatcaaggggtgtggaattaccttcactctgggaaaaggcactgaagttgattggtccagaaaagggcgtggtgcacctggcgacagcggccgtcctaaacgcggtgtgggacttgtgggccaagcaggagggaaagcctgtctggaagttacttgtggacatgagaagcaaatgctggcacaaggataccctgcttacacgacatcgtgcgcctggctggggtactcagatgacacgttgaagcagctctgtgcccaggcgctgaaggatggctggaccaggtttaaagtaaaggtgggtgctgatctccaggatgacatgcgaagatgccaaatcatccgagacatgattggaccggaaaagactttgatgatggatgccaaccagcgctgggatgtgcctgaggcggtggagtggatgtccaagctggccaagttcaagccattgtggattgaggagccaacctcccctgatgacattctggggcacgccaccatttccaaggcactggtcccattaggaattggcattgccacaggagaacagtgccacaatagagtgatatttaagcaactcctacaggcgaaggccctgcagttcctccagattgacagttgcagactgggcagtgtcaatgagaacctctcagtattgctgatggccaaaaagtttgaaattcctgtttgcccccatgctggtggagttggcctctgtgaactggtgcagcacctgattatatttgactacatatcagtttctgcaagccttgaaaatagggtgtgtgagtatgttgaccacctgcatgagcatttcaagtatcccgtgatgatccagcgggcttcctacatgcctcccaaggatcccggctactcaacagaaatgaaggaggaatctgtaaagaaacaccagtatccagatggtgaagtttggaagaaactccttcctgctcaagaaaattaagtgctcagccccaacaacttttttctttctgaagtgaaagggcttaaaatttcttggaaatagttttacaaaaatggatttaaaaaatcctaccgatcaagatgagttcagctagaagtcataccaccctcaggaatcagctaagtaattattacttgattcttttagcaaatcaatgcacgttatcctacttaatccttaaataagtttagatttaactaacccaaagtccaggaggatgttcttacaaaaatagctatatcaa

SEQ ID NO: 129964 - DNA, 1230 bp, Homo sapiens
  Payload ID: 5421
  Gene Symbol: ENOSF1
  Gene Name: enolase superfamily member 1
  ENST ID: ENST00000584453
  CDS Start-End: 38-577
gaccgcacgggggccgcggccacggggcgcaggggccatggtgcgcggcaggatctcccggctctcggtccgggacgtgcgcttccccacgtcgcttgggggccacggcgcggacgccatgcacacggaccctgactactcggctgcctatgtcgtcatagaaactgatgcagaagatggaatcaaggggtgtggaattaccttcactctgggaaaaggcactgaagttgttgtctgtgctgtgaatgccctcgcccaccatgtgctcaacaaggacctcaaggacattgttggtgacttcagaggcttctataggcagctcacaagtgatgggcagctcagatggattggtccagaaaagggcgtggtgcacctggcgacagcggccgtcctaaacgcggtgtgggacttgtgggccaagcaggagggaaagcctgtctggaagttacttgtggacatgaaatactgcagaaaggtcaaattggtaaaaaagaaagagagaagcaaatgctggcacaaggataccctgcttacacgacatcgtgcgcctggctggggtactcagatgacacgttgaagcagctctgtgcccaggcgctgaaggatggctggaccaggtttaaagtaaaggtgggtgctgatctccaggatgacatgcgaagatgccaaatcatccgagacatgattggaccggaaaagactttgatgatggatgccaaccagcgctgggatgtgcctgaggcggtggagtggatgtccaagctggccaagttcaagccattgtggattgaggagccaacctcccctgatgacattctggggcacgccaccatttccaaggcactggtcccattaggaattggcattgccacaggagaacagtgccacaatagagtgatatttaagcaactcctacaggcgaaggccctgcagttcctccagattgacagttgcagactgggcagtgtcaatgagaacctctcagtattgctgatggccaaaaagtttgaaattcctgtttgcccccatgctggtggagttggcctctgtgaactggtgcagcacctgattatatttgactacatatcagtttctgcaagccttgaaaatagggtgtgtgagtatgttgaccacctgcatgagcatttcaagtatcccgtgatgatccagcgggcttcctacatgcctcccaaggatcccggctactcaacagaaatgaaggaggaatct

SEQ ID NO: 129965 - DNA, 1745 bp, Homo sapiens
  Payload ID: 5421
  Gene Symbol: ENOSF1
  Gene Name: enolase superfamily member 1
  ENST ID: ENST00000581475
  CDS Start-End: 21-635
ggccacggggcgcaggggccatggtgcgcggcaggatctcccggctctcggtccgggacgtgcgcttccccacgtcgcttgggggccacggcgcggacgccatgcacacggaccctgactactcggctgcctatgtcgtcatagaaactgatgcagaagatggaatcaaggggtgtggaattaccttcactctgggaaaaggcactgaagttgttgtctgtgctgtgaatgccctcgcccaccatgtgctcaacaaggacctcaaggacattgttggtgacttcagaggcttctataggcagctcacaagtgatgggcagctcagatggattggtccagaaaagggcgtggtgcacctggcgacagcggccgtcctaaacgcggtgtgggacttgtgggccaagcaggagggaaagcctgtctggaagttacttgtggacatgggccggatcaggagaacagctggactctccaggggaaacagcttagctacaggcacttccaattccgaagggccctggaaagtgcaaaatgttgacggcgctgtgttttcacagagaagcaaatgctggcacaaggataccctgcttacacgacatcgtgcgcctggctggggtactcagatgacacgttgaagcagctctgtgcccaggcgctgaaggatggctggaccaggtttaaagtaaaggtgggtgctgatctccaggatgacatgcgaagatgccaaatcatccgagacatgattggaccggaaaagactttgatgatggatgccaaccagcgctgggatgtgcctgaggcggtggagtggatgtccaagctggccaagttcaagccattgtggattgaggagccaacctcccctgatgacattctggggcacgccaccatttccaaggcactggtcccattaggaattggcattgccacaggagaacagtgccacaatagagtgatatttaagcaactcctacaggcgaaggccctgcagttcctccagattgacagttgcagactgggcagtgtcaatgagaacctctcagtattgctgatggccaaaaagtttgaaattcctgtttgcccccatgctggtggagttggcctctgtgaactggtgcagcacctgattatatttgactacatatcagtttctgcaagccttgaaaatagggtgtgtgagtatgttgaccacctgcatgagcatttcaagtatcccgtgatgatccagcgggcttcctacatgcctcccaaggatcccggctactcaacagaaatgaaggaggaatctgtaaagaaacaccagtatccagatggtgaagtttggaagaaactccttcctgctcaagaaaattaagtgctcagccccaacaacttttttctttctgaagtgaaagggcttaaaatttcttggaaatagttttacaaaaatggatttaaaaaatcctaccgatcaagatgagttcagctagaagtcataccaccctcaggaatcagctaagtaattattacttgattcttttagcaaatcaatgcacgttatcctacttaatccttaaataagtttagatttaactaacccaaagtccaggaggatgttcttacaaaaatagctatatcaagggctggcacctagacattaaactgtaatttgaaaataagcaacatgttgcataacttgttggaataattccttgttctgtttaacacttgtcataaattagcagaataaaaatagtcgtgcaaca

SEQ ID NO: 129966 - DNA, 436 bp, Homo sapiens
  Payload ID: 5421
  Gene Symbol: ENOSF1
  Gene Name: enolase superfamily member 1
  ENST ID: ENST00000583771
  CDS Start-End: 143-436
gcgctcgggatcccgaccagtcctgaccgcacgggggccgcggccacggggcgcaggggccatggtgcgcggcaggatctcccggctctcggtccgggacgtgcgcttccccacgtcgcttgggggccacggcgcggacgccatgattggtccagaaaagggcgtggtgcacctggcgacagcggccgtcctaaacgcggtgtgggacttgtgggccaagcaggagggaaagcctgtctggaagttacttgtggacatggatcccaggatgctggtatcctgcatagatttcaggtacatcactgatgtcctgactgaggaggatgccctagaaatactgcagaaaggtcaaattggtaaaaaagaaagagagaagcaaatgctggcacaaggataccctgcttacacgacatcgtgcgcctggctggggtactca

SEQ ID NO: 129967 - DNA, 2025 bp, Homo sapiens
  Payload ID: 5422
  Gene Symbol: ENOPH1
  Gene Name: enolase-phosphatase 1
  Uniprot ID: Q9UHY7
  ENST ID: ENST00000273920
  CDS Start-End: 269-1054
aagggccgccccttttcctgcccacgtggtctcgggctcctgccccgtcctgctcacgagttcagggctcctgggcggccgccttttccagttccaggtgtgcagaagtgtcctctccccacgcgcggcgggctgcacttggtcgctggctccgagatcgcgcggggccgccggaagcccaagacggtaccgggggccgcagccgcagccggcgccgccctccgccctccccaacagcaggccgagtcccgtagcatccggtagggaaatggtcgtgctttcggtccccgccgaagtcaccgtgatcctgttagatatcgaaggtaccacaaccccgattgctttcgtgaaggacattttatttccttacatcgaagaaaatgttaaagagtatctgcagacacattgggaagaagaggagtgccagcaggatgtcagtcttttgaggaaacaggctgaagaggacgcccacctggatggggctgttcctatccctgcagcatctgggaatggagtggatgatctgcaacagatgatccaggccgtggtagataatgtgtgctggcagatgtccctggatcgaaagaccactgcactcaaacagctgcagggccacatgtggagggcggcattcacagctgggcgcatgaaagcagagttctttgcagatgtagttccagcagtcaggaagtggagagaggccggaatgaaggtgtacatctattcctcagggagtgtggaggcacagaaactgttattcgggcattctacggagggagatattcttgagcttgttgatggtcactttgataccaagattggacacaaagtagagagtgaaagttaccgaaagattgcagacagcattgggtgctcaaccaacaacattttgtttctgacagatgttactcgagaggccagtgctgctgaggaagcagatgtgcacgtagctgtggtggtgagaccaggcaacgcaggattaacagatgatgagaagacttactacagcctcatcacatccttcagtgaactatacctgccttcctcaacctagagaagggttgttaaggcagaccgccctgttccccagagttgtccctgtagtgtctaggtttattctaatggtaaaagtaacttacttaaaaaacatatgtacacatatgtatgcaagtatgtatatatgtgtatgctcagattaacttccataggtacataagtgaaagaagtctcagttcagtgaacacaaaacttatttaaagatgctttatatgtagaaattgtttcaaatcatactctaacccttagtgagggcaaagtgtagttggtagaagaaattgctaaatacctatctaatgtgctatgtttatcaaatcgtgtactaaaatggaaagctagttttgagaaattattcagaagccttgttattttaaaaatgaaatatttcaaagactgaatattttcaaagaaaatgaataattcattgcccttgtgatttagaagattataacagctgtatttcatatttgcctccttatatatatcaaagaccaaggtatttccttctgcttcaaaagaacaaaattgggaaagaaaactcacttgagtcttgatcaaacaagtgtcttttacttaagaagaaacttggtaatcattgtggcacccacagcaagcagttgccttaccagtgaaaaaggtgcactgaggtaacatctaaaacagagatgtggttcttaatgtttaacagaacagttctaatcctgccacgtgttatcattatagattttatagttgcctttctaactacttagcacagtttgagaatacgttaattgctatttactatttaaaaagttttactgaaatcagtccataacattaagatgagccctaatatgtaagattttcctctggaatggatgtgagaaatgtaaattttataacagcagtatttatcctggtttaattctaatacgatgtcatgttaatttcatgttgtgattaataaaagcattttttcttcactca

SEQ ID NO: 129968 - DNA, 1874 bp, Homo sapiens
  Payload ID: 5422
  Gene Symbol: ENOPH1
  Gene Name: enolase-phosphatase 1
  ENST ID: ENST00000509635
  CDS Start-End: 418-939
tccagttccaggtgtgcagaagtgtcctctccccacgcgcggcgggctgcacttggtcgctggctccgagatcgcgcggggccgccggaagcccaagacggtaccgggggccgcagccgcagccggcgccgccctccgccctccccaacagcaggccgagtcccgtagcatccggtagggaaatggtcgtgctttcggtccccgccgaagtcaccgtgatcctgttagatatcgaaggacattttatttccttacatcgaagaaaatgttaaagagtatctgcagacacattgggaagaagaggagtgccagcaggatgtcagtcttttgaggaaacaggctgaagaggacgcccacctggatggggctgttcctatccctgcagcatctgggaatggagtggatgatctgcaacagatgatccaggccgtggtagataatgtgtgctggcagatgtccctggatcgaaagaccactgcactcaaacagctgcagggccacatgtggagggcggcattcacagctgggcgcatgaaagcagagttctttgcagatgtagttccagcagtcaggaagtggagagaggccggaatgaaggtgtacatctattcctcagggagtgtggaggcacagaaactgttattcgggcattctacggagggagatattcttgagcttgttgatggtcactttgataccaagattggacacaaagtagagagtgaaagttaccgaaagattgcagacagcattgggtgctcaaccaacaacattttgtttctgacagatgttactcgagaggccagtgctgctgaggaagcagatgtgcacgtagctgtggtggtgagaccaggcaacgcaggattaacagatgatgagaagacttactacagcctcatcacatccttcagtgaactatacctgccttcctcaacctagagaagggttgttaaggcagaccgccctgttccccagagttgtccctgtagtgtctaggtttattctaatggtaaaagtaacttacttaaaaaacatatgtacacatatgtatgcaagtatgtatatatgtgtatgctcagattaacttccataggtacataagtgaaagaagtctcagttcagtgaacacaaaacttatttaaagatgctttatatgtagaaattgtttcaaatcatactctaacccttagtgagggcaaagtgtagttggtagaagaaattgctaaatacctatctaatgtgctatgtttatcaaatcgtgtactaaaatggaaagctagttttgagaaattattcagaagccttgttattttaaaaatgaaatatttcaaagactgaatattttcaaagaaaatgaataattcattgcccttgtgatttagaagattataacagctgtatttcatatttgcctccttatatatatcaaagaccaaggtatttccttctgcttcaaaagaacaaaattgggaaagaaaactcacttgagtcttgatcaaacaagtgtcttttacttaagaagaaacttggtaatcattgtggcacccacagcaagcagttgccttaccagtgaaaaaggtgcactgaggtaacatctaaaacagagatgtggttcttaatgtttaacagaacagttctaatcctgccacgtgttatcattatagattttatagttgcctttctaactacttagcacagtttgagaatacgttaattgctatttactatttaaaaagttttactgaaatcagtccataacattaagatgagccctaatatgtaagattttcctctggaatggatgtgagaaatgtaaattttataacagcagtatttatcctggtttaattctaatacgatgtcatgttaatttc

SEQ ID NO: 129969 - DNA, 1689 bp, Homo sapiens
  Payload ID: 5422
  Gene Symbol: ENOPH1
  Gene Name: enolase-phosphatase 1
  Uniprot ID: Q9UHY7
  ENST ID: ENST00000505846
  CDS Start-End: 375-722
tgcagaagtgtcctctccccacgcgcggcgggctgcacttggtcgctggctccgagatcgcgcggggccgccggaagcccaagacggtaccgggggccgcagccgcagccggcgccgccctccgccctccccaacagcaggccgagtcccgtagcatccggtagggaaatggtcgtgctttcggtccccgccgaagtcaccgtgatcctgttagatatcgaaggacattttatttccttacatcgaagaaaatgttaaagagtatctgcagacacattgggaagaagaggagtgccagcaggatgtcagtcttttgaggaaacaggttctttgcagatgtagttccagcagtcaggaagtggagagaggccggaatgaaggtgtacatctattcctcagggagtgtggaggcacagaaactgttattcgggcattctacggagggagatattcttgagcttgttgatggtcactttgataccaagattggacacaaagtagagagtgaaagttaccgaaagattgcagacagcattgggtgctcaaccaacaacattttgtttctgacagatgttactcgagaggccagtgctgctgaggaagcagatgtgcacgtagctgtggtggtgagaccaggcaacgcaggattaacagatgatgagaagacttactacagcctcatcacatccttcagtgaactatacctgccttcctcaacctagagaagggttgttaaggcagaccgccctgttccccagagttgtccctgtagtgtctaggtttattctaatggtaaaagtaacttacttaaaaaacatatgtacacatatgtatgcaagtatgtatatatgtgtatgctcagattaacttccataggtacataagtgaaagaagtctcagttcagtgaacacaaaacttatttaaagatgctttatatgtagaaattgtttcaaatcatactctaacccttagtgagggcaaagtgtagttggtagaagaaattgctaaatacctatctaatgtgctatgtttatcaaatcgtgtactaaaatggaaagctagttttgagaaattattcagaagccttgttattttaaaaatgaaatatttcaaagactgaatattttcaaagaaaatgaataattcattgcccttgtgatttagaagattataacagctgtatttcatatttgcctccttatatatatcaaagaccaaggtatttccttctgcttcaaaagaacaaaattgggaaagaaaactcacttgagtcttgatcaaacaagtgtcttttacttaagaagaaacttggtaatcattgtggcacccacagcaagcagttgccttaccagtgaaaaaggtgcactgaggtaacatctaaaacagagatgtggttcttaatgtttaacagaacagttctaatcctgccacgtgttatcattatagattttatagttgcctttctaactacttagcacagtttgagaatacgttaattgctatttactatttaaaaagttttactgaaatcagtccataacattaagatgagccctaatatgtaagattttcctctggaatggatgtgagaaatgtaaattttataacagcagtatttatcctggtttaattctaatacgatgtcatgttaatttcatgttgtgattaataaaagcattttttcttca

SEQ ID NO: 129970 - DNA, 979 bp, Homo sapiens
  Payload ID: 5422
  Gene Symbol: ENOPH1
  Gene Name: enolase-phosphatase 1
  ENST ID: ENST00000618400
  CDS Start-End: 221-844
cctgctcacgagttcagggctcctgggcggccgccttttccagttccaggtgtgcagaagtgtcctctccccacgcgcggcgggctgcacttggtcgctggctccgagatcgcgcggggccgccggaagcccaagacggtaccgggggccgcagccgcagccggcgccgccctccgccctccccaacagcaggccgagtcccgtagcatccggtagggaaatggtcgtgctttcggtccccgccgaagtcaccgtgatcctgttagatatcgaaggtaccacaaccccgattgctttcgtgaaggacattttatttccttacatcgaagaaaatgttaaagagtatctgcagacacattgggaagaagaggagtgccagcaggatgtcagtcttttgaggaaacaggctgaagaggacgcccacctggatggggctgttcctatccctgcagcatctgggaatggagtggatgatctgcaacagatgatccaggccgtggtagataatgtgtgctggcagatgtccctggatcgaaagaccactgcactcaaacagctgcagggccacatgtggagggcggcattcacagctgggcgcatgaaagcagagttctttgcagatgtagttccagcagtcaggaagtggagagaggccggaatgaaggtgtacatctattcctcagggagtgtggaggcacagaaactgttattcgggcattctacggagggagatattcttgagcttgttgatggtcactttgataccaagattggacacaaagtagagagtttaccgaaagattgcagacagcattgggtgctcaaccaaacattttgtttctgacagatgttactcgagaggccagtgctgctgaggaagcagatgtgcacgtagctgtggtggtgagaccaggcaacgcaggattaacagatgatgagaagacttactacagcctcatcacatccttcagtgaactat

SEQ ID NO: 129971 - DNA, 1542 bp, Homo sapiens
  Payload ID: 5422
  Gene Symbol: ENOPH1
  Gene Name: enolase-phosphatase 1
  ENST ID: ENST00000610545
  CDS Start-End: 52-501
gctgttcctatccctgcagcatctgggaatggagtggatgatctgcaacagatgatccaggccgtggtagataatgtgtgctggcagatgtccctggatcgaaagaccactgcactcaaacagctgcagggccacatgtggagggcggcattcacagctgggcgcatgaaagcagagttctttgcagatgtagttccagcagtcaggaagtggagagaggccggaatgaaggtgtacatctattcctcagggagtgtggaggcacagaaactgttattcgggcattctacggagggagatattcttgagcttgttgatggtcactttgataccaagattggacacaaagtagagagtgaaagttaccgaaagattgcagacagcattgggtgctcaaccaacaacattttgtttctgacagatgttactcgagaggccagtgctgctgaggaagcagatgtgcacgtagctgtggtggtgagaccaggcacgcaggattaacagatgatgagaagacttactacagcctcatcacatccttcagtgaactatacctgccttcctcaacctagagaagggttgttaaggcagaccgccctgttccccagagttgtccctgtagtgtctaggtttattctaatggtaaaagtaacttacttaaaaaacatatgtacacatatgtatgcaagtatgtatatatgtgtatgctcagattaacttccataggtacataagtgaaagaagtctcagttcagtgaacacaaaacttatttaaagatgctttatatgtagaaattgtttcaaatcatactctaacccttagtgagggcaaagtgtagttggtagaagaaattgctaaatacctatctaatgtgctatgtttatcaaatcgtgtactaaaatggaaagctagttttgagaaattattcagaagccttgttattttaaaaatgaaatatttcaaagactgaatattttcaaagaaaatgaataattcattgcccttgtgatttagaagattataacagctgtatttcatatttgcctccttatatatatcaaagaccaaggtatttccttctgcttcaaaagaacaaaattgggaaagaaaactcacttgagtcttgatcaaacaagtgtcttttacttaagaagaaacttggtaatcattgtggcacccacagcaagcagttgccttaccagtgaaaaaggtgcactgaggtaacatctaaaacagagatgtggttcttaatgtttaacagaacagttctaatcctgccacgtgttatcattatagattttatagttgcctttctaactacttagcacagtttgagaatacgttaattgctatttactatttaaaaagttttactgaaatcagtccataacattaagatgagccctaatatgtaagattttcctctggaatggatgtgagaaatgtaaattttataacagcagtatttatcctggtttaattctaatacgatgtcatgttaatttcatgttgtgattaataaaagcattttttcttcactc

SEQ ID NO: 129972 - DNA, 1411 bp, Homo sapiens
  Payload ID: 5423
  Gene Symbol: ECH1
  Gene Name: enoyl CoA hydratase 1, peroxisomal
  Uniprot ID: Q13011
  ENST ID: ENST00000221418
  CDS Start-End: 234-1220
gctattttctttggccaggttcccactggggcaaagggtccatttctgagcctggctctatgtaaggcaaccggaaatcgactgcccttagtaaagatggcggaaagaacggcgtcattgcctgtcaggttgcggcatcggtgccctcgctcaacatggcggccttctgtgcccgccccctccgctaacgggcacgttactccgtccgaacgcagtagacgaaggcggcggcgatggcggcggggatagtggcttctcgcagactccgcgacctactgacccggcgactgacaggctccaactacccgggactcagtattagccttcgcctcactggctcctctgcacaagaggaggcttccggagtagccctcggtgaagccccagaccacagctatgagtcccttcgtgtgacgtctgcgcagaaacatgttctgcatgtccagctcaaccggcccaacaagaggaatgccatgaacaaggtcttctggagagagatggtagagtgcttcaacaagatttcgagagacgctgactgtcgggcggtggtgatctctggtgcaggaaaaatgttcactgcaggtattgacctgatggacatggcttcggacatcctgcagcccaaaggagatgatgtggcccggatcagctggtacctccgtgacatcatcactcgataccaggagaccttcaacgtcatcgagaggtgccccaagcccgtgattgctgccgtccatgggggctgcattggcggaggtgtggaccttgtcaccgcctgtgacatccggtactgtgcccaggatgctttcttccaggtgaaggaggtggacgtgggtttggctgccgatgtaggaacactgcagcgcctgcccaaggtcatcgggaaccagagcctggtcaacgagctggccttcaccgcccgcaagatgatggctgacgaggccctgggcagtgggctggtcagccgggtgttcccagacaaagaggtcatgctggatgctgccttagcgctggcggccgagatttccagcaagagccccgtggcggtgcagagcaccaaggtcaacctgctgtattcccgcgaccattcggtggccgagagcctcaactacgtggcgtcctggaacatgagcatgctgcagacccaagacctcgtgaagtcggtccaggccacgactgagaacaaggaactgaaaaccgtcaccttctccaagctctgagagccctcgcgtcccaggccccagccagggggccggccttgtcccgcctcatccacagaaagggaggatgggcgatgacagttgtttctatgccttctgacccagtttcccagtttataactttatgacaatgagtttctcaagcccaaggccttatcttcaccccacaaacaataaagcaaagtaaagaa

SEQ ID NO: 129973 - DNA, 440 bp, Homo sapiens
  Payload ID: 5423
  Gene Symbol: ECH1
  Gene Name: enoyl CoA hydratase 1, peroxisomal
  ENST ID: ENST00000601094
  CDS Start-End: 332-440
gacggggagggctatccggggtcacgaagggcccgagtcccctaaattcaggggtgcgtgtgctcccttttgaaggactccctaattcgataggcctgtgtcttgcagtctggggtcatcaaaggctgttcctttctccccaggactgacaggctccaactacccgggactcagtattagccttcgcctcactggctcctctgcacaagaggaggcttccggagtagccctcggtgaagccccagaccacagctatgagtcccttcgtgtgacgtctgcgcagaaacatgttctgcatgtccagctcaaccggcccaacaagaggaatgccatgaacaaggtcttctggagagagatggtagagtgcttcaacaagatttcgagagacgctgactgtcgggcggtggtgatctctggtgcaggaaaaatgttcactgcag

SEQ ID NO: 129974 - DNA, 209 bp, Homo sapiens
  Payload ID: 5423
  Gene Symbol: ECH1
  Gene Name: enoyl CoA hydratase 1, peroxisomal
  ENST ID: ENST00000602115
  CDS Start-End: 1-209
cgcagactccgcgacctactgacccggcgtgagtcacctcttgccttatgggggtgcgtcgcgctgtcgtgctgttatagcagatgtaggacggggagggctatccggggtcacgaagggcccgagtcccctaaattcaggggactgacaggctccaactacccgggactcagtattagccttcgcctcactggctcctctgcacaaga

SEQ ID NO: 129975 - DNA, 560 bp, Homo sapiens
  Payload ID: 5423
  Gene Symbol: ECH1
  Gene Name: enoyl CoA hydratase 1, peroxisomal
  ENST ID: ENST00000595470
  CDS Start-End: 18-560
agacgaaggcggcggcgatggcggcggggatagtggcttctcgcagactccgcgacctactgacccggcgactgacaggctccaactacccgggactcagtattagccttcgcctcactggctcctctgcacaagaggaggcttccggagtagccctcggtgaagccccagaccacagctatgagtcccttcgtgtgacgtctgcgcagaaacatgttctgcatgtccagctcaaccggcccaacaagaggaatgccatgaacaaggtcttctggagagagatggtagagtgcttcaacaagatttcgagagacgctgactgtcgggcggtggtgatctctggtgcaggaaaaatgttcactgcaggtattgacctgatggacatggcttcggacatcctgcagcccaaaggagatgatgtggcccggatcagctggtacctccgtgacatcatcactcgataccaggagaccttcaacgtcatcgagaggtgccccaagcccgtgattgctgccgtccatgggggctgcattggcggaggtgagtctgcggctatcctc

SEQ ID NO: 129976 - DNA, 677 bp, Homo sapiens
  Payload ID: 5423
  Gene Symbol: ECH1
  Gene Name: enoyl CoA hydratase 1, peroxisomal
  ENST ID: ENST00000594164
  CDS Start-End: 11-124
ggcggcggcgatggcggcggggatagtggcttctcgcagactccgcgacctactgacccggcgtgagtcacctcttgccttatgggggactgacaggctccaactacccgggactcagtattagccttcgcctcactggctcctctgcacaagaggaggcttccggagtagccctcggtgaagccccagaccacagctatgagtcccttcgtgtgacgtctgcgcagaaacatgttctgcatgtccagctcaaccggcccaacaagaggaatgccatgaacaaggtcttctggagagagatggtagagtgcttcaacaagatttcgagagacgctgactgtcgggcggtggtgatctctggtgcaggaaaaatgttcactgcaggtattgacctgatggacatggcttcggacatcctgcagcccaaaggagatgatgtggcccggatcagctggtacctccgtgacatcatcactcgataccaggagaccttcaacgtcatcgagaggtgccccaagcccgtgattgctgccgtccatgggggctgcattggcggaggtgtggaccttgtcaccgcctgtgacatccggtactgtgcccaggatgctttcttccaggtgaaggaggtggacgtgggtttggctgccgatgtaggaacactgcagcgcctgcccaag

SEQ ID NO: 129977 - DNA, 169 bp, Homo sapiens
  Payload ID: 5423
  Gene Symbol: ECH1
  Gene Name: enoyl CoA hydratase 1, peroxisomal
  ENST ID: ENST00000597205
  CDS Start-End: 4-169
gcgatggcggcggggatagtggcttctcgcagactccgcgacctactgacccggcgtgagtcacctcttgccttatggggagagatggtagagtgcttcaacaagatttcgagagacgctgactgtcgggcggtggtgatctctggtgcaggaaaaatgttcactgcag

SEQ ID NO: 129978 - DNA, 799 bp, Homo sapiens
  Payload ID: 5423
  Gene Symbol: ECH1
  Gene Name: enoyl CoA hydratase 1, peroxisomal
  ENST ID: ENST00000601778
  CDS Start-End: 1-799
gatagtggcttctcgcagactccgcgacctactgacccggcgactgacaggctccaactacccgggactcagtattagccttcgcctcactggctcctctgcacaagaggaggcttccggagtagccctcggtgaagccccagaccacagctatgagtcccttcgtgtgacgtctgcgcagaaacatgttctgcatgtccagctcaaccggcccaacaagaggaatgccatgaacaaggtcttctggagagagatggtagagtgcttcaacaagatttcgagagacgctgactgtcgggcggtggtgatctctggtgcaggaaaaatgttcactgcaggtattgacctgatggacatggcttcggacatcctgcagcccaaaggagatgatgtggcccggatcagctggtacctccgtgacatcatcactcgataccaggagaccttcaacgtcatcgagaggtgccccaagcccgtgattgctgccgtccatgggggctgcattggcggaggtgtggaccttgtcaccgcctgtgacatccggtactgtgcccaggatgctttcttccaggtgaaggaggtggacgtgggtttggctgccgatgtaggaacactgcagcgcctgcccaaggtcatcgggaaccagagccgggtgttcccagacaaagaggtcatgctggatgctgccttagcgctggcggccgagatttccagcaagagccccgtggcggtgcagagcaccaaggtcaacctgctgtattcccgcgaccattcggtggccgagagcctcaactacgtg

SEQ ID NO: 129979 - DNA, 308 bp, Homo sapiens
  Payload ID: 5423
  Gene Symbol: ECH1
  Gene Name: enoyl CoA hydratase 1, peroxisomal
  ENST ID: ENST00000595567
  CDS Start-End: 257-308
ttatagcagatgtaggacggggagggctatccggggtcacgaagggcccgagtcccctaaattcaggggactgacaggctccaactacccgggactcagtattagccttcgcctcactggctcctctgcacaagaggaggcttccggagtagccctcggtgaagccccagaccacagctatgagtcccttcgtgtgacgtctgcgcagaaacatgttctgcatgtccagctcaaccggcccaacaagaggaatgccatgaacaaggtcttctggagagagatggtagagtgcttcaacaagatttcga

SEQ ID NO: 129980 - DNA, 1126 bp, Homo sapiens
  Payload ID: 5424
  Gene Symbol: ECHDC2
  Gene Name: enoyl CoA hydratase domain containing 2
  Uniprot ID: Q86YB7
  ENST ID: ENST00000358358
  CDS Start-End: 54-839
agccgagacggtgcagggccggagaagcaccttcactcccagcctgcgccccgatgctgcgcgttctgtgcctcctgcgcccctggaggccccttcgggcccgcggctgcgcttccgacggggcggccgggggctcagagatccaagtgcgcgccctggcgggtccggaccaagggatcactgagattctgatgaacagaccttctgcccgcaatgccttggggaatgtcttcgtcagtgagctgctggaaactctggcccagctgcgggaggaccggcaagtgcgtgtcctgctcttcagaagtggagtgaagggcgtgttctgtgcaggtgcagacctgaaggagcgggaacagatgagtgaagcagaggtgggggtgtttgtccagcgactccggggcctgatgaatgacatcgcttcctcggcagtcatgggactgattgagaccacgcgagggctcctcccgggggcaggagggactcagaggctgccccgttgtctgggggtggccctggcgaaggagctcatcttcacgggccgacgactgagtggaactgaggcccacgtactggggctggtgaatcacgctgtggcccagaacgaggagggggacgccgcctaccagcgggcacgagcactggcccaggagatcctgccccaggcccccattgccgtgcggctgggcaaagtagccattgaccgaggaacggaggtggacattgcatctgggatggccattgaagggatgtgctatgcccagaatattccaacccgggaccggctagagggcatggcagccttcagggagaagcggactcccaaatttgttggcaaatgacccccattttaaccttcagcatgggagatgcatgccctgaagagcaggatccagaaggaagatttgtggccagattgccttcatcatttcacctctccagacttccatttcttcacaaggatgatgatggaaataaaatgactggcgtgatgcctggaaccaaggtgctgatcctaccacctactgctaccttccttagcttcaccctggctagaaataatcacgagggttgggtttgctttggaaaatgcctgtctctctacttgaatgataaagaattaaattag

SEQ ID NO: 129981 - DNA, 1606 bp, Homo sapiens
  Payload ID: 5424
  Gene Symbol: ECHDC2
  Gene Name: enoyl CoA hydratase domain containing 2
  ENST ID: ENST00000371520
  CDS Start-End: 31-228
gaagcaccttcactcccagcctgcgccccgatgctgcgcgttctgtgcctcctgcgcccctggaggccccttcgggcccgcggctgcgcttccgacggggcggccgggggctcagagatccaagtgcgcgccctggcgggtccggaccaaggtaaatgtgcagttccggggcggcgcatgacgcgactgggactaggccggaggcagcgggggaccggcaggctgtaggttccatgaggacaggccttgagtctgtcctggtctctggaatcacggtgtctagtagaggccagcacacagcaaatatataaatgtacaaatgagtgaatgaagagaatctgattggccttaaggaacttacgcacttaaaataattgggcagaagagaagcagtgaaggagtgcagaggcatcacctgaaagtttacaagtccttccactttctctctgaggcagaaagagcaagggtttttctctccattttatggttgggaaaattgaggcctgcctgagtgtgtgacttgtggcaagtcactctggtcatctagggcagaggctccccagatcccaggcctcctgcctccagtccccagcccgcagcccaggattaggcagagccagctgctttcccgtggctgccctgactccttacagggatcactgagattctgatgaacagaccttctgcccgcaatgccttggggaatgtcttcgtcagtgagctgctggaaactctggcccagctgcgggaggaccggcaagtgcgtgtcctgctcttcagaagtggagtgaagggcgtgttctgtgcaggtgcagacctgaaggagcgggaacagatgagtgaagcagaggtgggggtgtttgtccagcgactccggggcctgatgaatgacatcgcttcctcggcagtcatgggactgattgagaccacgcgagggctcctcccgggggcaggagggactcagaggctgccccgttgtctgggggtggccctggcgaaggagctcatcttcacgggccgacgactgagtggaactgaggcccacgtactggggctggtgaatcacgctgtggcccagaacgaggagggggacgccgcctaccagcgggcacgagcactggcccaggagatcctgccccaggcccccattgccgtgcggctgggcaaagtagccattgaccgaggaacggaggtggacattgcatctgggatggccattgaagggatgtgctatgcccagaatattccaacccgggaccggctagagggcatggcagccttcagggagaagcggactcccaaatttgttggcaaatgacccccattttaaccttcagcatgggagatgcatgccctgaagagcaggatccagaaggaagatttgtggccagattgccttcatcatttcacctctccagacttccatttcttcacaaggatgatgatggaaataaaatgactggcgtgatgcctggaaccaaggtgctgatcctaccacctactgctaccttccttagcttcaccctggctagaaataatcacgagggttgggtttgctttggaaaatgcctgtctctctacttgaatgataaagaattaaattaga

SEQ ID NO: 129982 - DNA, 1509 bp, Homo sapiens
  Payload ID: 5424
  Gene Symbol: ECHDC2
  Gene Name: enoyl CoA hydratase domain containing 2
  Uniprot ID: Q86YB7
  ENST ID: ENST00000371522
  CDS Start-End: 95-973
gaaggcttcgcccgacgccggaactgcgagctctcagcgggagccgagacggtgcagggccggagaagcaccttcactcccagcctgcgccccgatgctgcgcgttctgtgcctcctgcgcccctggaggccccttcgggcccgcggctgcgcttccgacggggcggccgggggctcagagatccaagtgcgcgccctggcgggtccggaccaagggatcactgagattctgatgaacagaccttctgcccgcaatgccttggggaatgtcttcgtcagtgagctgctggaaactctggcccagctgcgggaggaccggcaagtgcgtgtcctgctcttcagaagtggagtgaagggcgtgttctgtgcaggtgcagacctgaaggagcgggaacagatgagtgaagcagaggtgggggtgtttgtccagcgactccggggcctgatgaatgacatcgcagccttccctgcacccaccattgcggctatggatgggtttgccttgggcggaggcctagagcttgccctggcctgtgacctccgagtggcagcttcctcggcagtcatgggactgattgagaccacgcgagggctcctcccgggggcaggagggactcagaggctgccccgttgtctgggggtggccctggcgaaggagctcatcttcacgggccgacgactgagtggaactgaggcccacgtactggggctggtgaatcacgctgtggcccagaacgaggagggggacgccgcctaccagcgggcacgagcactggcccaggagatcctgccccaggcccccattgccgtgcggctgggcaaagtagccattgaccgaggaacggaggtggacattgcatctgggatggccattgaagggatgtgctatgcccagaatattccaacccgggaccggctagagggcatggcagccttcagggagaagcggactcccaaatttgttggcaaatgacccccattttaaccttcagcatgggagatgcatgccctgaagagcaggatccagaaggaagatttgtggccagattgccttcatcatttcacctctccagacttccatttcttcacaaggatgatgatggaaataaaatgactggcgtgatgcctggaaccaaggtgctgatcctaccacctactgctaccttccttagcttcaccctggctagaaataatcacgagggttgggtttgctttggaaaatgcctgtctctctacttgaatgataaagaattaaattagatctctctgagtcttggtatcattggctctcagcccctgacctctctcagttatcaggcactcattagagatgtcagaagattttaagatacccctagtttcttcctgtgaacaacagaggtaataaataaactctgacatcggttgaacatgtgtcaggggtcagactgcagatcccagtctctgccagttacttgctgtataaccgtggacaaattgtttaaatgctctgggcctcagcttcctcac

SEQ ID NO: 129983 - DNA, 981 bp, Homo sapiens
  Payload ID: 5424
  Gene Symbol: ECHDC2
  Gene Name: enoyl CoA hydratase domain containing 2
  ENST ID: ENST00000542552
  CDS Start-End: 113-244
ataggtggagcaattggcgaaggcttcgcccgacgccggaactgcgagctctcagcgggagccgagacggtgcagggccggagaagcaccttcactcccagcctgcgccccgatgctgcgcgttctgtgcctcctgcgcccctggaggccccttcgggcccgcggctgcgcttccgacggggcggccgggggctcagagatccaagtgcgcgccctggcgggtccggaccaagctgggcactaaggttctccaccacaagctgacctttccatcctccctcctctacccatgggctcatttgaaggctgtaggttccatgaggacaggccttgagtctgtcctggtctctggaatcacggtgtctagtagaggccagcacacagcaaatatataaatgtacaaatgagtgaatgaagagaatctgattggccttaaggaacttacgcacttaaaataattgggcagaagagaagcagtgaaggagtgcagaggcatcacctgaaaggtaggaggaaggagaatgggggcctgccaaagccaaggcagatacgtgtcattatgcatctgtgtaaacccacagagtgtacaccaccaagagcgaaccccagtgtacactagggcccccgggtggcgacagtgcatcagtgtaggttcgtcagttgcaacacgtgcctctggtgggggatggggattgcggaaggggctgtgcctgtgtagggccagggagtataggtgaactgtattgaattgtattttccactccattttgctgtgaccctaaaactgctctaagaaaatcatctatttataaacaaataaatattcttctaagaagccaaagcagaaaacgatcaagtggagtgtgttaatgtcagcaaaggtttttgctgccacgaggttgaggcaaggagagaaacgtgtcccttggttagtgatgtggctatattcatcactttaatgagaataatgtctgctgagtg

SEQ ID NO: 129984 - DNA, 1446 bp, Homo sapiens
  Payload ID: 5424
  Gene Symbol: ECHDC2
  Gene Name: enoyl CoA hydratase domain containing 2
  ENST ID: ENST00000536120
  CDS Start-End: 102-836
aattggcgaaggcttcgcccgacgccggaactgcgagctctcagcgggagccgagacggtgcagggccggagaagcaccttcactcccagcctgcgccccgatgctgcgcgttctgtgcctcctgcgcccctggaggccccttcgggcccgcggctgcgcttccgacggggcggccgggggctcagagatccaagtgcgcgccctggcgggtccggaccaagggatcactgagattctgatgaacagaccttctgcccgcaatgccttggggaatgtcttcgtcagtgagctgctggaaactctggcccagctgcgggaggaccggcaagtgcgtgtcctgctcttcagaagtggagtgaagggcgtgttctgtgcaggtgcagacctgaaggagcgggaacagatgagtgaagcagaggtgggggtgtttgtccagcgactccggggcctgatgaatgacatcgcttcctcggcagtcatgggactgattgagaccacgcgagggctcctcccgggggcaggagggactcagaggctgccccgttgtctgggggtggccctggcgaaggagctcatcttcacgggccgacgactgagtggaactgaggcccacgtactggggctggtgaatcacgctgtggcccagaacgaggagggggacgccgcctaccagcgggcacgagcactggcccaggagatcctgccccaggtggacattgcatctgggatggccattgaagggatgtgctatgcccagaatattccaacccgggaccggctagagggcatggcagccttcagggagaagcggactcccaaatttgttggcaaatgacccccattttaaccttcagcatgggagatgcatgccctgaagagcaggatccagaaggaagatttgtggccagattgccttcatcatttcacctctccagacttccatttcttcacaaggatgatgatggaaataaaatgactggcgtgatgcctggaaccaaggtgctgatcctaccacctactgctaccttccttagcttcaccctggctagaaataatcacgagggttgggtttgctttggaaaatgcctgtctctctacttgaatgataaagaattaaattagatctctctgagtcttggtatcattggctctcagcccctgacctctctcagttatcaggcactcattagagatgtcagaagattttaagatacccctagtttcttcctgtgaacaacagaggtaataaataaactctgacatcggttgaacatgtgtcaggggtcagactgcagatcccagtctctgccagttacttgctgtataaccgtggacaaattgtttaaatgctctgggcctcagcttcctcacctacaaaacaaaacttgtgaagatttagcaaaataaaaacacttcatattcaataaatatgttttaattgttaa

SEQ ID NO: 129985 - DNA, 1335 bp, Homo sapiens
  Payload ID: 5424
  Gene Symbol: ECHDC2
  Gene Name: enoyl CoA hydratase domain containing 2
  ENST ID: ENST00000544365
  CDS Start-End: 351-500
agcgttctctagcccttaggcagccgaatccctaatttgcggacttgggcatgggactgagtcaacctgtccccatctctgatcctgtgcttaggttctgtacggattaaaacactgacgctgggaggttgacagagttacaccaaatcacacagaggagctgggcttcccccgacctcctccgctcaagtctccctgtccccgggaggtgcggaaggaggcaacagacgcttggcccataggtggagcaattggcgaaggcttcgcccgacgccggaactgcgagctctcagcgggagccgagacggtgcagggccggagaagcaccttcactcccagcctgcgccccgatgctgcgcgttctgtgcctcctgcgcccctggaggccccttcgggcccgcggctgcgcttccgacggggcggccgggggctcagagatccaagtgcgcgccctggcgggtccggaccaaggctgtaggttccatgaggacaggccttgagtctgtcctggtctctggaatcacggtgtctagtagaggccagcacacagcaaatatataaatgtacaaatgagtgaatgaagagaatctgattggccttaaggaacttacgcacttaaaataattgggcagaagagaagcagtgaaggagtgcagaggcatcacctgaaagggatcactgagattctgatgaacagaccttctgcccgcaatgccttggggaatgtcttcgtcagtgagctgctggaaactctggcccagctgcgggaggaccggcaagtgcgtgtcctgctcttcagaagtggagtgaagggcgtgttctgtgcaggtgcagacctgaaggagcgggaacagatgagtgaagcagaggtgggggtgtttgtccagcgactccggggcctgatgaatgacatcggtgaggatctgggtgtggggtggaggagggggtttgggggtccctgccgatgacagtcccgctacccccaccagcatctaaggagagtcttctttctgtttggagttctgtgataagacagatgactcacccagggggatggaggaggatgaccgagggcagttctctcagagagggagttctggctcttcagcttttgtgtcccgccccaccctcagggttcaagcctggccattccaaagcagttaagtttccccaagcatgctttcaagttttgacaattgctgttacctttgcctgagataccccttcttggttacttgaacttttacttgtccttcaagccctccagtacctcctcctccaggaagccttcccaacccaccctctgagctttttattggagcactgatgatcctg

SEQ ID NO: 129986 - DNA, 702 bp, Homo sapiens
  Payload ID: 5424
  Gene Symbol: ECHDC2
  Gene Name: enoyl CoA hydratase domain containing 2
  ENST ID: ENST00000467988
  CDS Start-End: 46-702
cggtgcagggccggagaagcaccttcactcccagcctgcgccccgatgctgcgcgttctgtgcctcctgcgcccctggaggccccttcgggcccgcggctgcgcttccgacggggcggccgggggctcagagatccaagtgcgcgccctggcgggtccggaccaagggatcactgagattctgatgaacagaccttctgcccgcaatgccttggggaatgtcttcgtcagtgagctgctggaaactctggcccagctgcgggaggaccggcaagtgcgtgtcctgctcttcagaagtggagtgaagggcgtgttctgtgcaggtgcagacctgaaggagcgggaacagatgagtgaagcagaggtgggggtgtttgtccagcgactccggggcctgatgaatgacatcgcttcctcggcagtcatgggactgattgagaccacgcgagggctcctcccgggggcaggagggactcagaggctgccccgttgtctgggggtggccctggcgaaggagctcatcttcacgggccgacgactgagtggaactgaggcccacgtactggggctggtgaatcacgctgtggcccagaacgaggagggggacgccgcctaccagcgggcacgagcactggcccaggagatcctgccccaggtggacattgcatctgggatggccattgaagggatgtgctatgcccag

SEQ ID NO: 129987 - DNA, 1676 bp, Homo sapiens
  Payload ID: 5424
  Gene Symbol: ECHDC2
  Gene Name: enoyl CoA hydratase domain containing 2
  ENST ID: ENST00000476477
  CDS Start-End: 318-464
aatttgcggacttgggcatgggactgagtcaacctgtccccatctctgatcctgtgcttaggttctgtacggattaaaacactgacgctgggaggttgacagagttacaccaaatcacacagaggagctgggcttcccccgacctcctccgctcaagtctccctgtccccgggaggtgcggaaggaggcaacagacgcttggcccataggtggagcaattggcgaaggcttcgcccgacgccggaactgcgagctctcagcgggagccgagacggtgcagggccggagaagcaccttcactcccagcctgcgccccgatgctgcgcgttctgtgcctcctgcgcccctggaggccccttcgggcccgcggctgcgcttccgacggggcggccgggggctcagagatccaagtgcgcgccctggcgggtccggaccaagacaaagctgaggaccctgggagataataataaggggtctttgaaggccaaaggattgggaaacactcctctgggcacctgctggatttcagccctgggaagacctgaaatgtccatcctgatttttcgtaggaggagaaacagcctagaagggatgataagggctgtaggttccatgaggacaggccttgagtctgtcctggtctctggaatcacggtgtctagtagaggccagcacacagcaaatatataaatgtacaaatgagtgaatgaagagaatctgattggccttaaggaacttacgcacttaaaataattgggcagaagagaagcagtgaaggagtgcagaggcatcacctgaaagggatcactgagattctgatgaacagaccttctgcccgcaatgccttggggaatgtcttcgtcagtgagctgctggaaactctggcccagctgcgggaggaccggcaagtgcgtgtcctgctcttcagaagtggagtgaagggcgtgttctgtgcaggtgcagacctgaaggagcgggaacagatgagtgaagcagaggtgggggtgtttgtccagcgactccggggcctgatgaatgacatcgcagccttccctgcacccaccattgcggctatggatgggtttgccttgggcggaggcctagagcttgccctggcctgtgacctccgagtggcagcttcctcggcagtcatgggactgattgagaccacgcgagggctcctcccgggggcaggagggactcagaggctgccccgttgtctgggggtggccctggcgaaggagctcatcttcacgggccgacgactgagtggaactgaggcccacgtactggggctggtgaatcacgctgtggcccagaacgaggagggggacgccgcctaccagcgggcacgagcactggcccaggagatcctgccccaggcccccattgccgtgcggctgggcaaagtagccattgaccgaggaacggaggtggacattgcatctgggatggccattgaagggatgtgctatgcccagaatattccaacccgggaccggctagagggcatggcagccttcagggagaagcggactcccaaatttgttggcaaatgacccccattttaaccttcagcatgggagatgcatgccctgaagagcaggatccagaaggaagatttgtggccagattgccttcatcatttcacctctccagacttccatttcttcaca

SEQ ID NO: 129988 - DNA, 1649 bp, Homo sapiens
  Payload ID: 5425
  Gene Symbol: ECHDC3
  Gene Name: enoyl CoA hydratase domain containing 3
  Uniprot ID: Q96DC8
  ENST ID: ENST00000379215
  CDS Start-End: 212-1123
cgtgccggggcggggcgtagtacggactgggcctggcctggggcgtccccgcgaagcctgggcctgtcaggcggttccgtccgggtctcggccaccgtcgagttccgtcgagttccgtcccggccctgctcacagcagcgccctcggagcgcccagcacctgcggccggccaggcagcgcgatcctgcggcgtctggccatcccgaatgctatggccgccgtcgccgtcttgcgggccttcggggcaagtgggcccatgtgtctccggcgcggcccctgggcccagctccccgcccgcttctgcagccgggacccggccggggcggggcggcgggagtcggagccgcggcccaccagcgcgcggcagctggacggcataaggaacatcgtcttgagcaatcccaagaagaggaacgcgttgtcacttgcaatgctgaagtctctccaaagtgacattcttcatgacgctgacagcaacgatctgaaagtcattatcatctcggctgaggggcctgtgttttcttctgggcatgacttaaaggagctgacagaggagcaaggccgtgattaccatgccgaagtatttcagacctgttccaaggtcatgatgcacatccggaaccaccccgttcccgtcattgccatggtcaatggcctggccgcggctgccggctgtcaactggttgccagctgcgacattgccgtggcgagcgacaagtcctcttttgccactcctggggtgaacgtcgggctcttctgttctacccctggggttgccttggcaagagcagtgcctagaaaggtggccttggagatgctctttactggtgagcccatttctgcccaggaggccctgctccacgggctgcttagcaaggtggtgccagaggcggagctgcaggaggagaccatgcggatcgctaggaagatcgcatcgctgagccgtccggtggtgtccctgggcaaagccaccttctacaagcagctgccccaggacctggggacggcttactacctcacctcccaggccatggtggacaacctggccctgcgggacgggcaggagggcatcacggccttcctccagaagagaaaacctgtctggtcacacgagccagtgtgagtggaggcagaggagtgaggcccacgggcagcgcccaggagcccaccttcccctctggcccagccaccactgcctctcagcttcaacaggtgacaggctgctttcgtgacttgatattggtgtcatagcatttggcctacattaaaagccacaatttcatggggaaaggacaaaatggagagtgactgaggtgctgacctcagtgcaaggctggtgaaccctgcagcgggccagctatggtgggaagcctggcatttggggtgctccttgcaacgtcttaagcaagcgaccccccgacatagcaaaaggtggcaacccatggaggcagaaagaaggacgccagcctgacccttatctgaaacgtcctaagcagagttaatcctggctgctcaggagaggcgacacatttcaaatctccacgagatattctccacacagaaaatcttcttgattctatagagacttaatcatgcctatggctttgaataatcttatgtgatttaaataaattaaatctttatagaga

SEQ ID NO: 129989 - DNA, 623 bp, Homo sapiens
  Payload ID: 5425
  Gene Symbol: ECHDC3
  Gene Name: enoyl CoA hydratase domain containing 3
  ENST ID: ENST00000422887
  CDS Start-End: 124-623
tagacaggaatcgcaggggtcctcacttgttttgactggtgtgtgaccctgtgattgtaaaatgttcttcacaggaacatcgtcttgagcaatcccaagaagaggaacgcgttgtcacttgcaatgctgaagtctctccaaagtgacattcttcatgacgctgacagcaacgatctgaaagtcattatcatctcggctgaggggcctgtgttttcttctgggcatgacttaaaggagctgacagaggagcaaggccgtgattaccatgccgaagtatttcagacctgttccaaggtcatgatgcacatccggaaccaccccgttcccgtcattgccatggtcaatggcctggccgcggctgccggctgtcaactggttgccagctgcgacattgccgtggcgagcgacaagtcctcttttgccactcctggggtgaacgtcgggctcttctgttctacccctggggttgccttggcaagagcagtgcctagaaaggtggccttggagatgctctttactggtgagcccatttctgcccaggaggccctgctccacgggctgcttagcaaggtggtgccagaggcggagctgcaggaggagaccatgcggatcgctaggaagat

SEQ ID NO: 129990 - DNA, 854 bp, Homo sapiens
  Payload ID: 5425
  Gene Symbol: ECHDC3
  Gene Name: enoyl CoA hydratase domain containing 3
  ENST ID: ENST00000420401
  CDS Start-End: 132-854
ccgggtctcggccaccgtcgagttccgtcgagttccgtcccggccctgctcacagcagcgccctcggagcgcccagcacctgcggccggccaggcagcgcgatcctgcggcgtctggccatcccgaatgctatggccgccgtcgccgtcttgcgggccttcggggcaagtgggcccatgtgtctccggcgcggcccctgggcccagctccccgcccgcttctgcagccgggacccggccggggcggggcggcgggagtcggagccgcggcccaccagcgcgcggcagctggacggcataaggtcagccccgggccgcgcgggctcctcgcgttggtgccgagtcggggtcagggcgccgccattgacccggggaggacccggggaaccggagccccgtttacgcccctggggagggaactccccgtgtcccggacccgggcctggcagcgagacgcgcaggaacatcgtcttgagcaatcccaagaagaggaacgcgttgtcacttgcaatgctgaagtctctccaaagtgacattcttcatgacgctgacagcaacgatctgaaagtcattatcatctcggctgaggggcctgtgttttcttctgggcatgacttaaaggagctgacagaggagcaaggccgtgattaccatgccgaagtatttcagacctgttccaaggtcatgatgcacatccggaaccaccccgttcccgtcattgccatggtcaatggcctggccgcggctgccggctgtcaactggttgccagctgcgacattgccgtggcgagcgacaagtcctcttttgccactcctggggtgaacgtcgggctcttctgttctacccctggggtt

SEQ ID NO: 129991 - DNA, 1617 bp, Homo sapiens
  Payload ID: 5426
  Gene Symbol: ECHS1
  Gene Name: enoyl CoA hydratase, short chain, 1, mitochondrial
  Uniprot ID: P30084
  ENST ID: ENST00000368547
  CDS Start-End: 357-1229
cggcgcagagcccggcaggcgccgccgttgcctccgcctccgcgcggtctccccggggccagctgggaccccgagggctggggcgggggcgggggcgcgggcgactgcggcggggcctggagggcgctggtcccagcccagggcggggtcccggggacgcccctcggccttagatccgcgagcggcagctcgggcctgggggcggggcctggcggagagcgacccgctcactctgcccgggctgatctcgcgagggccgcctggtctcgcggcgctggcctgtgggcggagcgagccctgaaaggctataggcgagggggcggctccgcggggccgggcgaggagtccagagagccatggccgccctgcgtgtcctgctgtcctgcgtccgcggcccgctgaggcccccggttcgctgtcccgcctggcgtcccttcgcctcgggtgctaactttgagtacatcatcgcagaaaaaagagggaagaataacaccgtggggttgatccaactgaaccgccccaaggccctcaatgcactttgcgatggcctgattgacgagctcaaccaggccctgaagaccttcgaggaggacccggccgtgggggccattgtcctcaccggcggggataaggcctttgcagctggagctgatatcaaggaaatgcagaacctgagtttccaggactgttactccagcaagttcttgaagcactgggaccacctcacccaggtcaagaagccagtcatcgctgctgtcaatggctatgcctttggcgggggctgtgagcttgccatgatgtgtgatatcatctatgccggtgagaaggcccagtttgcacagccggagatcttaataggaaccatcccaggtgcgggcggcacccagagactcacccgtgctgttgggaagtcgctggcgatggagatggtcctcactggtgaccggatctcagcccaggacgccaagcaagcaggtcttgtcagcaagatttgtcctgttgagacactggtggaagaagccatccagtgtgcagaaaaaattgccagcaattctaaaattgtagtagcgatggccaaagaatcagtgaatgcagcttttgaaatgacattaacagaaggaagtaagttggagaagaaactcttttattcaacctttgccactgatgaccggaaagaagggatgaccgcgtttgtggaaaagagaaaggccaacttcaaagaccagtgagaaccagctgcccctgcttcacacctctgcttggagaggacaagtgcagcctgtcagttttagaagcaagtaaatcatcctcttttcaagagcagtgtccgtggtgtgcagttcctctccaattgctgcgtggtcgtggcccgacctctcacggcatgacagccttcgtcacccagcctgtgagggtcctgactggagcaccttctaaatctaagattctgctgaggagcccccgctggtccctctgggcatgctgtgctcggacggaaagcggggcctgcgggtccttgtgtccctgccgctgaagaatggggctgctctgagggaaacgctgtctgctgccttcatacagatgctgattaaagtgatagcgattcagattacacca

SEQ ID NO: 129992 - DNA, 1541 bp, Homo sapiens
  Payload ID: 5427
  Gene Symbol: ECI1
  Gene Name: enoyl-CoA delta isomerase 1
  Uniprot ID: P42126
  ENST ID: ENST00000301729
  CDS Start-End: 49-957
aggaggcgagctcagcccgcgacctttatcccgcgcgttgcggtcaagatggcgctggtggcttctgtgcgagtcccggcgcgcgttctgctccgcgcgggggcccggctcccgggcgcggccctcgggcggacggagcgggcggccggcggcggagacggcgcgcggcgcttcgggagccagcgggtgctggtggagccggacgcgggcgcaggggtcgctgtgatgaaattcaagaaccccccagtgaacagcctgagcctggagtttctgacggagctggtcatcagcctggagaagctggagaatgacaagagcttccgcggtgtcattctgacctcggaccgcccgggtgtcttctcggccggcctggacctgacggagatgtgtgggaggagccccgcccactacgctgggtactggaaggccgttcaggagctgtggctgcggttgtaccagtccaacctggtgctggtctccgccatcaacggagcctgccccgctggaggctgcctggtggccctgacctgtgactaccgcatcctggcggacaaccccaggtactgcataggactcaatgagacccagctgggcatcatcgcccctttctggttgaaagacaccctggagaacaccatcgggcaccgggcggcggagcgtgccctgcagctggggctgctcttcccgccggcggaggccctgcaggtgggcatagtggaccaggtggtcccggaggagcaggtgcagagcactgcgctgtcagcgatagcccagtggatggccattccagaccatgctcgacagctgaccaaggccatgatgcgaaaggccacggccagccgcctggtcacgcagcgcgatgcggacgtgcagaacttcgtcagcttcatctccaaagactccatccagaagtccctgcagatgtacttagagaggctcaaagaagaaaaaggctaacgattgggctgccacaggcttacggccacacgtgcccctgtgggtcccagggaggtcttaaacaaggtatttttcaacttaaaagtactgccagcgtttcattttgctgatgttacgtagaagttcctgttcctcatagcccagtggcccaaggcccagccacacacaaacacacatgggtgcctgtgcccgtcaggcaaggggagttggagggcagccttttgacttgggattgtgactggcaggggatgccattctggacctggtgaggttgccacggagtgtctctgttcccaaggcagaatcgtaagtcaagtccctggtcatccattctggcctttggactgcctgctcttaggtgtaaggccaggtggtcttggcccccatgacccacacagaactccccagggaaaagccctttggtcactgcccttactcatcaggatgaagagcgcacagtgaatcagagcaactgggggatcctgagccagcgggagtgggactctggaggcagctgtgctgccagggatccaaatgtcccttaagaaggattttgcaagaaccaaactcatccaaacccttga

SEQ ID NO: 129993 - DNA, 948 bp, Homo sapiens
  Payload ID: 5427
  Gene Symbol: ECI1
  Gene Name: enoyl-CoA delta isomerase 1
  Uniprot ID: P42126
  ENST ID: ENST00000562238
  CDS Start-End: 7-864
gtcaagatggcgctggtggcttctgtgcgagtcccggcgcgcgttctgctccgcgcgggggcccggctcccgggcgcggccctcgggcggacggagcgggcggccggcggcggagacggcgcgcggcgcttcgggagccagcgggtgctggtggagccggacgcgggcgcaggggtcgctgtgatgaaattcaagaaccccccagtgaacagcctgagcctggagtttctgacggagctggtcatcagcctggagaagctggagaatgacaagagcttccgcggtgtcattctgacctcggaccgcccgggtgtcttctcggccggcctggacctgacggagatgtgtgggaggagccccgcccactacgctgggtactggaaggccgttcaggagctgtggctgcggttgtaccagtccaacctggtgctggtctccgccatcaacggagcctgccccgctggaggctgcctggtggccctgacctgtgactaccgcatcctggcggacaaccccaggttgaaagacaccctggagaacaccatcgggcaccgggcggcggagcgtgccctgcagctggggctgctcttcccgccggcggaggccctgcaggtgggcatagtggaccaggtggtcccggaggagcaggtgcagagcactgcgctgtcagcgatagcccagtggatggccattccagaccatgctcgacagctgaccaaggccatgatgcgaaaggccacggccagccgcctggtcacgcagcgcgatgcggacgtgcagaacttcgtcagcttcatctccaaagactccatccagaagtccctgcagatgtacttagagaggctcaaagaagaaaaaggctaacgattgggctgccacaggcttacggccacacgtgcccctgtgggtcccagggaggtcttaaacaaggtatttttcaacttaaaa

SEQ ID NO: 129994 - DNA, 961 bp, Homo sapiens
  Payload ID: 5427
  Gene Symbol: ECI1
  Gene Name: enoyl-CoA delta isomerase 1
  ENST ID: ENST00000566379
  CDS Start-End: 288-961
ctttatcccgcgcgttgcggtcaagatggcgctggtggcttctgtgcgagtcccggcgcgcgttctgctccgcgcgggtgcgaaacccggggtgggcagggatcgggccggggccggggccaggaccgggaactaacgggctcccccacgctgccttcgcaggggcccggctcccgggcgcggccctcgggcggacggagcgggcggccggcggcggagacggcgcgcggcgcttcgggagccagcgggtgctggtggagccggacgcgggcgcaggggtcgctgtgatgaaattcaagaaccccccagtgaacagcctgagcctggagtttctgacggagctggtcatcagcctggagaagctggagaatgacaagagcttccgcggtgtcattctgacctcggaccgcccgggtgtcttctcggccggcctggacctgacggagatgtgtgggaggagccccgcccactacgctgggtactggaaggccgttcaggagctgtggctgcggttgtaccagtccaacctggtgctggtctccgccatcaacggagcctgccccgctggaggctgcctggtggccctgacctgtgactaccgcatcctggcggacaaccccaggtactgcataggactcaatgagacccagctgggcatcatcgcccctttctggttgaaagacaccctggagaacaccatcgggcaccgggcggcggagcgtgccctgcagctggggctgctcttcccgccggcggaggccctgcaggtgggcatagtggaccaggtggtcccggaggagcaggtgcagagcactgcgctgtcagcgatagcccagtggatggccattccagaccatgctcgacagctgaccaaggccatgatgcgaaaggccacggccagccgcctggtcacgcagcgcgatgcggacgtgcagaacttcgtcagcttcatctccaaaga

SEQ ID NO: 129995 - DNA, 1512 bp, Homo sapiens
  Payload ID: 5427
  Gene Symbol: ECI1
  Gene Name: enoyl-CoA delta isomerase 1
  ENST ID: ENST00000570258
  CDS Start-End: 742-1473
aacacagctgggaccttactgcccagtgctcccagtggtctgaccaaaaccccacaccagacagtacaaaggcccactcccgagctgccgcttacggcccagcgggaacagactgtattcttatctttcggcatttctctgcaaataaaaaggtgccactgcggtccggcctttgtgcacttgcccttgtgctgagcaaggcgggtggcctgttcttaccgctgggttctgctgcccccacccccatttcggtgactaaacctgcagctctgatcctgttcccaaaggggcaggaggccgggctcaccccaggcagcccctggcctccctgacggccccctcgggaggggttccgtgctttgatcgcctttccagcgccgatactgcagtagctgggcccggccgagagctcgcggtcacgaacaccggcagcctcttgcctacagtgtcccgcgctgtagaagagcctgccctggcgctgagctggtcgtggctgcttcagcagtgggcctgcgcctccttgtaggccagccctggcccagatccaggtgcctgccccggaagcgcgcggctgcccggggtgaagccggagggcggcgagcggctgtttcggccggggcccggctcccgggcgcggccctcgggcggacggagcgggcggccggcggcggagacggcgcgcggcgcttcgggagccagcgggtgctggtggagccggacgcgggcgcaggggtcgctgtgatgaaattcaagaaccccccagtgaacagcctgagcctggagtttctgacggagctggtcatcagcctggagaagctggagaatgacaagagcttccgcggtgtcattctgacctcggaccgcccgggtgtcttctcggccggcctggacctgacggagatgtgtgggaggagccccgcccactacgctgggtactggaaggccgttcaggagctgtggctgcggttgtaccagtccaacctggtgctggtctccgccatcaacggagcctgccccgctggaggctgcctggtggccctgacctgtgactaccgcatcctggcggacaaccccaggtactgcataggactcaatgagacccagctgggcatcatcgcccctttctggttgaaagacaccctggagaacaccatcgggcaccgggcggcggagcgtgccctgcagctggggctgctcttcccgccggcggaggccctgcaggtgggcatagtggaccaggtggtcccggaggagcaggtgcagagcactgcgctgtcagcgatagcccagtggatggccattccagaccatgctcgacagctgaccaaggccatgatgcgaaaggccacggccagccgcctggtcacgcagcgcgatgcggacgtgcagaacttcgtcagcttcatctccaaagactccatccagaagtccctgcagatgtacttagagaggctcaaagaagaaaaaggctaacgattgggctgccacaggcttacggccacacgtgcccct

SEQ ID NO: 129996 - DNA, 1380 bp, Homo sapiens
  Payload ID: 5428
  Gene Symbol: ECI2
  Gene Name: enoyl-CoA delta isomerase 2
  ENST ID: ENST00000361538
  CDS Start-End: 118-1212
acccccgagcccccgcagccctagagccgcccaagggatggcgatggcgtacttggcttggagactggcgcggcgttcgtgtccgaggtcactagtttcccggtagttcagctgcacatgaatagaacagcaatgagagccagtcagaaggactttgaaaattcaatgaatcaagtgaaactcttgaaaaaggatccaggaaacgaagtgaagctaaaactctacgcgctatataagcaggccactgaaggaccttgtaacatgcccaaaccaggtgtatttgacttgatcaacaaggccaaatgggacgcatggaatgcccttggcagcctgcccaaggaagctgccaggcagaactatgtggatttggtgtccagtttgagtccttcattggaatcctctagtcaggtggagcctggaacagacaggaaatcaactgggtttgaaactctggtggtgacctccgaagatggcatcacaaagatcatgttcaaccggcccaaaaagaaaaatgccataaacactgagatgtatcatgaaattatgcgtgcacttaaagctgccagcaaggatgactcaatcatcactgttttaacaggaaatggtgactattacagtagtgggaatgatctgactaacttcactgatattccccctggtggagtagaggagaaagctaaaaataatgccgttttactgagggaatttgtgggctgttttatagattttcctaagcctctgattgcagtggtcaatggtccagctgtgggcatctccgtcaccctccttgggctattcgatgccgtgtatgcatctgacagggcaacatttcatacaccatttagtcacctaggccaaagtccggaaggatgctcctcttacacttttccgaagataatgagcccagccaaggcaacagagatgcttatttttggaaagaagttaacagcgggagaggcatgtgctcaaggacttgttactgaagttttccctgatagcacttttcagaaagaagtctggaccaggctgaaggcatttgcaaagcttcccccaaatgccttgagaatttcaaaagaggtaatcaggaaaagagagagagaaaaactacacgctgttaatgctgaagaatgcaatgtccttcagggaagatggctatcagatgaatgcacaaatgctgtggtgaacttcttatccagaaaatcaaaactgtgatgaccactacagcagagtaaagcatgtccaaggaaggatgtgctgttacctctgatttccagtactggaactaaataagcttcattgtgccttttgtagtgctagaatatcaattacaatgatgatatttcactacagctctgatgaataaaaagttttgtaaaacaa

SEQ ID NO: 129997 - DNA, 1407 bp, Homo sapiens
  Payload ID: 5428
  Gene Symbol: ECI2
  Gene Name: enoyl-CoA delta isomerase 2
  Uniprot ID: O75521
  ENST ID: ENST00000380118
  CDS Start-End: 38-1222
acccccgagcccccgcagccctagagccgcccaagggatggcgatggcgtacttggcttggagactggcgcggcgttcgtgtccgagttctctgcaggtcactagtttcccggtagttcagctgcacatgaatagaacagcaatgagagccagtcagaaggactttgaaaattcaatgaatcaagtgaaactcttgaaaaaggatccaggaaacgaagtgaagctaaaactctacgcgctatataagcaggccactgaaggaccttgtaacatgcccaaaccaggtgtatttgacttgatcaacaaggccaaatgggacgcatggaatgcccttggcagcctgcccaaggaagctgccaggcagaactatgtggatttggtgtccagtttgagtccttcattggaatcctctagtcaggtggagcctggaacagacaggaaatcaactgggtttgaaactctggtggtgacctccgaagatggcatcacaaagatcatgttcaaccggcccaaaaagaaaaatgccataaacactgagatgtatcatgaaattatgcgtgcacttaaagctgccagcaaggatgactcaatcatcactgttttaacaggaaatggtgactattacagtagtgggaatgatctgactaacttcactgatattccccctggtggagtagaggagaaagctaaaaataatgccgttttactgagggaatttgtgggctgttttatagattttcctaagcctctgattgcagtggtcaatggtccagctgtgggcatctccgtcaccctccttgggctattcgatgccgtgtatgcatctgacagggcaacatttcatacaccatttagtcacctaggccaaagtccggaaggatgctcctcttacacttttccgaagataatgagcccagccaaggcaacagagatgcttatttttggaaagaagttaacagcgggagaggcatgtgctcaaggacttgttactgaagttttccctgatagcacttttcagaaagaagtctggaccaggctgaaggcatttgcaaagcttcccccaaatgccttgagaatttcaaaagaggtaatcaggaaaagagagagagaaaaactacacgctgttaatgctgaagaatgcaatgtccttcagggaagatggctatcagatgaatgcacaaatgctgtggtgaacttcttatccagaaaatcaaaactgtgatgaccactacagcagagtaaagcatgtccaaggaaggatgtgctgttacctctgatttccagtactggaactaaataagcttcattgtgccttttgtagtgctagaatatcaattacaatgatgatatttcactacagctctgatgaataaaaagttttgtaaaacaagcttaagaattcacaca

SEQ ID NO: 129998 - DNA, 1469 bp, Homo sapiens
  Payload ID: 5428
  Gene Symbol: ECI2
  Gene Name: enoyl-CoA delta isomerase 2
  ENST ID: ENST00000380120
  CDS Start-End: 31-489
agcccccgcagccctagagccgcccaagggatggcgatggcgtacttggcttggagactggcgcggcgttcgtgtccgagttctctgcaggtcactagtttcccggtagttcagctgcacatgaatagaacagcaatgagagccagtcagaaggactttgaaaattcaatgaatcaagtgaaactcttgaaaaaggatccaggaaacgaagtgaagctaaaactctacgcgctatataagcaggccactgaaggaccttgtaacatgcccaaaccaggtgtatttgacttgatcaacaaggccaaatgggacgcatggaatgcccttggcagcctgcccaaggtgttagttattagtatagtaactttctcaaagtgcttattcattgaccatgggctgaggttgtttgtcatcgtccgttcaggaagctgccaggcagaactatgtggatttggtgtccagtttgagtccttcattggaatcctctagtcaggtggagcctggaacagacaggaaatcaactgggtttgaaactctggtggtgacctccgaagatggcatcacaaagatcatgttcaaccggcccaaaaagaaaaatgccataaacactgagatgtatcatgaaattatgcgtgcacttaaagctgccagcaaggatgactcaatcatcactgttttaacaggaaatggtgactattacagtagtgggaatgatctgactaacttcactgatattccccctggtggagtagaggagaaagctaaaaataatgccgttttactgagggaatttgtgggctgttttatagattttcctaagcctctgattgcagtggtcaatggtccagctgtgggcatctccgtcaccctccttgggctattcgatgccgtgtatgcatctgacagggcaacatttcatacaccatttagtcacctaggccaaagtccggaaggatgctcctcttacacttttccgaagataatgagcccagccaaggcaacagagatgcttatttttggaaagaagttaacagcgggagaggcatgtgctcaaggacttgttactgaagttttccctgatagcacttttcagaaagaagtctggaccaggctgaaggcatttgcaaagcttcccccaaatgccttgagaatttcaaaagaggtaatcaggaaaagagagagagaaaaactacacgctgttaatgctgaagaatgcaatgtccttcagggaagatggctatcagatgaatgcacaaatgctgtggtgaacttcttatccagaaaatcaaaactgtgatgaccactacagcagagtaaagcatgtccaaggaaggatgtgctgttacctctgatttccagtactggaactaaataagcttcattgtgccttttgtagtgctagaatatcaattacaatgatgatatttcactacagctctgatgaataaaaagttttgtaaaacaagctt

SEQ ID NO: 129999 - DNA, 1405 bp, Homo sapiens
  Payload ID: 5428
  Gene Symbol: ECI2
  Gene Name: enoyl-CoA delta isomerase 2
  ENST ID: ENST00000380125
  CDS Start-End: 130-1224
ggataccgctgtccaggcgaaggtcgccgccgttggaagaccctccttccctattgtctaggtggcaacaggattttgctttgctggttttccggtgaggtcactagtttcccggtagttcagctgcacatgaatagaacagcaatgagagccagtcagaaggactttgaaaattcaatgaatcaagtgaaactcttgaaaaaggatccaggaaacgaagtgaagctaaaactctacgcgctatataagcaggccactgaaggaccttgtaacatgcccaaaccaggtgtatttgacttgatcaacaaggccaaatgggacgcatggaatgcccttggcagcctgcccaaggaagctgccaggcagaactatgtggatttggtgtccagtttgagtccttcattggaatcctctagtcaggtggagcctggaacagacaggaaatcaactgggtttgaaactctggtggtgacctccgaagatggcatcacaaagatcatgttcaaccggcccaaaaagaaaaatgccataaacactgagatgtatcatgaaattatgcgtgcacttaaagctgccagcaaggatgactcaatcatcactgttttaacaggaaatggtgactattacagtagtgggaatgatctgactaacttcactgatattccccctggtggagtagaggagaaagctaaaaataatgccgttttactgagggaatttgtgggctgttttatagattttcctaagcctctgattgcagtggtcaatggtccagctgtgggcatctccgtcaccctccttgggctattcgatgccgtgtatgcatctgacagggcaacatttcatacaccatttagtcacctaggccaaagtccggaaggatgctcctcttacacttttccgaagataatgagcccagccaaggcaacagagatgcttatttttggaaagaagttaacagcgggagaggcatgtgctcaaggacttgttactgaagttttccctgatagcacttttcagaaagaagtctggaccaggctgaaggcatttgcaaagcttcccccaaatgccttgagaatttcaaaagaggtaatcaggaaaagagagagagaaaaactacacgctgttaatgctgaagaatgcaatgtccttcagggaagatggctatcagatgaatgcacaaatgctgtggtgaacttcttatccagaaaatcaaaactgtgatgaccactacagcagagtaaagcatgtccaaggaaggatgtgctgttacctctgatttccagtactggaactaaataagcttcattgtgccttttgtagtgctagaatatcaattacaatgatgatatttcactacagctctgatgaataaaaagttttgtaaaacaagcttaagaattca

SEQ ID NO: 130000 - DNA, 1451 bp, Homo sapiens
  Payload ID: 5428
  Gene Symbol: ECI2
  Gene Name: enoyl-CoA delta isomerase 2
  ENST ID: ENST00000496241
  CDS Start-End: 112-534
gagcccccgcagccctagagccgcccaagggatggcgatggcgtacttggcttggagactggcgcggcgttcgtgtccgaggtcactagtttcccggtagttcagctgcacatgaatagaacagcaatgagagccagtcagaaggactttgaaaattcaatgaatcaagtgaaactcttgaaaaaggatccaggaaacgaagtgaagctaaaactctacgcgctatataagcaggccactgaaggaccttgtaacatgcccaaaccaggtgtatttgacttgatcaacaaggccaaatgggacgcatggaatgcccttggcagcctgcccaaggaagctgccaggcagaactatgtggatttggtgtccagtttgagtccttcattggaatcctctagtcaggtggagcctggaacagacaggaaatcaactgggtttgaaactctggtggtgacctccgaagatggcatcacaaagatcatgttcaaccggcccaaaaagaaaaatgccataaacactgaggaaggttggtaattgtggctacttcatacaacagagttgagcattcattgtttagagtttgtgaatttcagatgtatcatgaaattatgcgtgcacttaaagctgccagcaaggatgactcaatcatcactgttttaacaggaaatggtgactattacagtagtgggaatgatctgactaacttcactgatattccccctggtggagtagaggagaaagctaaaaataatgccgttttactgagggaatttgtgggctgttttatagattttcctaagcctctgattgcagtggtcaatggtccagctgtgggcatctccgtcaccctccttgggctattcgatgccgtgtatgcatctgacagggcaacatttcatacaccatttagtcacctaggccaaagtccggaaggatgctcctcttacacttttccgaagataatgagcccagccaaggcaacagagatgcttatttttggaaagaagttaacagcgggagaggcatgtgctcaaggacttgttactgaagttttccctgatagcacttttcagaaagaagtctggaccaggctgaaggcatttgcaaagcttcccccaaatgccttgagaatttcaaaagaggtaatcaggaaaagagagagagaaaaactacacgctgttaatgctgaagaatgcaatgtccttcagggaagatggctatcagatgaatgcacaaatgctgtggtgaacttcttatccagaaaatcaaaactgtgatgaccactacagcagagtaaagcatgtccaaggaaggatgtgctgttacctctgatttccagtactggaactaaataagcttcattgtgccttttgtagtgctagaatatcaattacaatgatgatatttcactacagctctgatgaataaaaagttttgtaaaacaagcttaa

SEQ ID NO: 130001 - DNA, 814 bp, Homo sapiens
  Payload ID: 5428
  Gene Symbol: ECI2
  Gene Name: enoyl-CoA delta isomerase 2
  ENST ID: ENST00000495548
  CDS Start-End: 155-814
tgtccaggcgaaggtcgccgccgttggaagaccctccttccctattgtctaggtggcaacaggattttgctttgctggttttccggtgaggtagtgctaaaaagtgacgacctcacgcgcgccctcctgcaccgctgggcccggagtggtcaggatgggcgcgtcgggaggtcagggctatggttccctgtcagcagtccccaaggtctccgcctgcctccgcgcacgctcccatcctcctggggccggactccgggcgggtgagccgccccagctgagcacccgggcctgcacttcccagccgggctgcttctggggtgcaaagcgtcgcttgctaaaagcgagttctctgcaggtcactagtttcccggtagttcagctgcacatgaatagaacagcaatgagagccagtcagaaggactttgaaaattcaatgaatcaagtgaaactcttgaaaaaggatccaggaaacgaagtgaagctaaaactctacgcgctatataagcaggccactgaaggaccttgtaacatgcccaaaccaggtgtatttgacttgatcaacaaggccaaatgggacgcatggaatgcccttggcagcctgcccaaggaagctgccaggcagaactatgtggatttggtgtccagtttgagtccttcattggaatcctctagtcaggtggagcctggaacagacaggaaatcaactgggtttgaaactctggtggtgacctccgaagatggcatcacaaagatcatgttcaaccggcccaaaaagaaaaatgccataaacactgagatgtatcatgaaattatg

SEQ ID NO: 130002 - DNA, 1133 bp, Homo sapiens
  Payload ID: 5428
  Gene Symbol: ECI2
  Gene Name: enoyl-CoA delta isomerase 2
  ENST ID: ENST00000478266
  CDS Start-End: 5-598
agggatggcgatggcgtacttggcttggagactggcgcggcgttcgtgtccgagttctctgcaggtcactagtttcccggtagttcagctgcacatgaatagaacagcaatgagagccagtcagaaggactttgaaaattcaatgaatcaagtgaaactcttgaaaaaggatccaggaaacgaagtgaagctaaaactctacgcgctatataagcaggccactgaaggaccttgtaacatgcccaaaccaggtgtatttgacttgatcaacaaggccaaatgggacgcatggaatgcccttggcagcctgcccaaggaagctgccaggcagaactatgtggatttggtgtccagtttgagtccttcattggaatcctctagtcaggtggagcctggaacagacaggaaatcaactgggtttgaaactctggtggtgacctccgaagatggcatcacaaagatcatgttcaaccggcccaaaaagaaaaatgccataaacactgagatgtatcatgaaattatgcgtgcacttaaagctgccagcaaggatgactcaatcatcactgttttaacaggcaacatttcatacaccatttagtcacctaggccaaagtccggaaggatgctcctcttacacttttccgaagataatgagcccagccaaggcaacagagatgcttatttttggaaagaagttaacagcgggagaggcatgtgctcaaggacttgttactgaagttttccctgatagcacttttcagaaagaagtctggaccaggctgaaggcatttgcaaagcttcccccaaatgccttgagaatttcaaaagaggtaatcaggaaaagagagagagaaaaactacacgctgttaatgctgaagaatgcaatgtccttcagggaagatggctatcagatgaatgcacaaatgctgtggtgaacttcttatccagaaaatcaaaactgtgatgaccactacagcagagtaaagcatgtccaaggaaggatgtgctgttacctctgatttccagtactggaactaaataagcttcattgtgccttttgtagtgctagaatatcaattacaatgatgatatttcactacagctctgatgaataaaaagttttgtaaaacaa

SEQ ID NO: 130003 - DNA, 1548 bp, Homo sapiens
  Payload ID: 5428
  Gene Symbol: ECI2
  Gene Name: enoyl-CoA delta isomerase 2
  ENST ID: ENST00000465828
  CDS Start-End: 287-1381
gcgatggcgtacttggcttggagactggcgcggcgttcgtgtccgaggtaagcttggagtcccggccgttcggcccatggtcgcccgcaggataccgctgtccaggcgaaggtcgccgccgttggaagaccctccttccctattgtctaggtggcaacaggattttgctttgctggttttccggtgaggtagtgctaaaaagtgacgacctcacgcgcgccctcctgcaccgctgggcccggagtgttctctgcaggtcactagtttcccggtagttcagctgcacatgaatagaacagcaatgagagccagtcagaaggactttgaaaattcaatgaatcaagtgaaactcttgaaaaaggatccaggaaacgaagtgaagctaaaactctacgcgctatataagcaggccactgaaggaccttgtaacatgcccaaaccaggtgtatttgacttgatcaacaaggccaaatgggacgcatggaatgcccttggcagcctgcccaaggaagctgccaggcagaactatgtggatttggtgtccagtttgagtccttcattggaatcctctagtcaggtggagcctggaacagacaggaaatcaactgggtttgaaactctggtggtgacctccgaagatggcatcacaaagatcatgttcaaccggcccaaaaagaaaaatgccataaacactgagatgtatcatgaaattatgcgtgcacttaaagctgccagcaaggatgactcaatcatcactgttttaacaggaaatggtgactattacagtagtgggaatgatctgactaacttcactgatattccccctggtggagtagaggagaaagctaaaaataatgccgttttactgagggaatttgtgggctgttttatagattttcctaagcctctgattgcagtggtcaatggtccagctgtgggcatctccgtcaccctccttgggctattcgatgccgtgtatgcatctgacagggcaacatttcatacaccatttagtcacctaggccaaagtccggaaggatgctcctcttacacttttccgaagataatgagcccagccaaggcaacagagatgcttatttttggaaagaagttaacagcgggagaggcatgtgctcaaggacttgttactgaagttttccctgatagcacttttcagaaagaagtctggaccaggctgaaggcatttgcaaagcttcccccaaatgccttgagaatttcaaaagaggtaatcaggaaaagagagagagaaaaactacacgctgttaatgctgaagaatgcaatgtccttcagggaagatggctatcagatgaatgcacaaatgctgtggtgaacttcttatccagaaaatcaaaactgtgatgaccactacagcagagtaaagcatgtccaaggaaggatgtgctgttacctctgatttccagtactggaactaaataagcttcattgtgccttttgtagtgctagaatatcaattacaatgatgatatttcactacagctctgatgaataaaaagttttgtaaaaca

SEQ ID NO: 130004 - DNA, 308 bp, Homo sapiens; identical to SEQ ID NO: 129979
  Payload ID: 5429
  Gene Symbol: ECH1
  Gene Name: Enoyl-CoA hydratase 1, peroxisomal
  ENST ID: ENST00000635053
  CDS Start-End: 257-308

SEQ ID NO: 130005 - DNA, 209 bp, Homo sapiens; identical to SEQ ID NO: 129974
  Payload ID: 5429
  Gene Symbol: ECH1
  Gene Name: Enoyl-CoA hydratase 1, peroxisomal
  ENST ID: ENST00000634309
  CDS Start-End: 1-209

SEQ ID NO: 130006 - DNA, 677 bp, Homo sapiens; identical to SEQ ID NO: 129976
  Payload ID: 5429
  Gene Symbol: ECH1
  Gene Name: Enoyl-CoA hydratase 1, peroxisomal
  ENST ID: ENST00000635068
  CDS Start-End: 11-124

SEQ ID NO: 130007 - DNA, 440 bp, Homo sapiens; identical to SEQ ID NO: 129973
  Payload ID: 5429
  Gene Symbol: ECH1
  Gene Name: Enoyl-CoA hydratase 1, peroxisomal
  ENST ID: ENST00000634273
  CDS Start-End: 332-440

SEQ ID NO: 130008 - DNA, 169 bp, Homo sapiens; identical to SEQ ID NO: 129977
  Payload ID: 5429
  Gene Symbol: ECH1
  Gene Name: Enoyl-CoA hydratase 1, peroxisomal
  ENST ID: ENST00000634714
  CDS Start-End: 4-169

SEQ ID NO: 130009 - DNA, 560 bp, Homo sapiens; identical to SEQ ID NO: 129975
  Payload ID: 5429
  Gene Symbol: ECH1
  Gene Name: Enoyl-CoA hydratase 1, peroxisomal
  ENST ID: ENST00000635118
  CDS Start-End: 18-560

SEQ ID NO: 130010 - DNA, 1411 bp, Homo sapiens; identical to SEQ ID NO: 129972
  Payload ID: 5429
  Gene Symbol: ECH1
  Gene Name: Enoyl-CoA hydratase 1, peroxisomal
  ENST ID: ENST00000634245
  CDS Start-End: 234-1220

SEQ ID NO: 130011 - DNA, 799 bp, Homo sapiens; identical to SEQ ID NO: 129978
  Payload ID: 5429
  Gene Symbol: ECH1
  Gene Name: Enoyl-CoA hydratase 1, peroxisomal
  ENST ID: ENST00000634770
  CDS Start-End: 1-799

SEQ ID NO: 130012 - DNA, 3850 bp, Homo sapiens
  Payload ID: 5430
  Gene Symbol: EHHADH
  Gene Name: enoyl-CoA, hydratase/3-hydroxyacyl CoA dehydrogenase
  Uniprot ID: Q08426
  ENST ID: ENST00000231887
  CDS Start-End: 77-2248
gaggaggccgggcgcgcccggaaaagtggtttgcctgacggcgagaggcagaggtgccctcggtgatagaggaaacatggccgagtatacgcggctgcacaacgccttggcgctaatccgcctccgaaacccgccggtcaacgcgatcagtacgactttactccgtgacataaaagaaggactacagaaagctgtaatagaccatacaataaaagccattgtgatttgtggagcagagggcaaattttctgcaggtgctgatattcgtggcttcagtgctcctaggacatttggccttacactgggacatgtagtagatgaaatacagagaaatgagaagcccgtggtggcagcaatccaaggcatggctttcggagggggactagagctggccctgggctgtcactataggattgcccacgcagaggctcaagttggcttaccagaagttacactgggacttctccctggtgcaagaggaacccagcttctccccagactcactggagttcctgctgcacttgacttaattacctcaggaagacgtattttagcagatgaagcactcaagctgggcattctagataaagttgtaaactcagacccggttgaagaagcaatcagatttgctcagagagtttcagatcaacctctagaatcccgtagactctgcaacaagccaattcagagcttgcccaacatggacagcatttttagtgaggccctcttgaagatgcggaggcagcaccctgggtgtcttgcacaggaggcttgtgtccgtgcagtccaggctgctgtgcagtatccctatgaagtgggcatcaagaaggaggaggagctgtttctatatcttttgcaatcagggcaggctagagccctgcaatatgctttcttcgctgaaaggaaagcaaataagtggtcaactccctccggagcatcgtggaaaacagcatcagcgcggcctgtctcctcagttggtgttgttggcttgggaacaatgggccgaggcattgtcatttcttttgcaagggccaggattcctgtgattgctgtagactcggacaaaaaccagctagcaactgcaaacaagatgataacctctgtcttggaaaaagaagcctccaaaatgcaacagagcggccacccttggtcaggaccaaaacccaggttaacttcatctgtgaaggagcttggtggtgtagatttagtcattgaagcagtatttgaggaaatgagcctgaagaagcaggtctttgctgaactctcagctgtgtgcaaaccagaagcatttttgtgcactaatacttcagccctggatgttgatgagattgcttcttccactgatcgtcctcacttggtcattggcacccacttcttttcgccagctcatgtcatgaagttgttagaggttattcccagccaatactcttcccccactaccattgccactgttatgaacttatcaaaaaagattaaaaagattggagtcgttgtaggcaactgttttggatttgtggggaatcgaatgttgaatccttactacaatcaggcatatttcttgttagaagaaggcagcaaaccagaggaggtagatcaggtgctggaagagtttggttttaaaatgggaccttttagagtgtctgatcttgctgggttggatgtgggctggaaatctagaaaggggcaaggtcttactggacctacattgcttccaggaactcctgcccgaaaaaggggtaataggaggtactgcccaattcctgatgtgctctgtgaattaggacgatttggccagaagacaggtaagggttggtatcaatatgacaagccattgggtaggattcacaaacctgatccctggctttccaaattcctatcacggtatagaaaaacccatcacattgaaccacgtaccattagccaggatgagatccttgaacgctgcttatattcacttatcaatgaagcattccgtatcttgggagaagggatagctgctagcccagagcacattgatgttgtctatttacatggatatggatggccaaggcacaagggcgggcccatgttctatgcttccacagttgggttgcccacagttctagagaaattgcagaaatattacaggcagaaccctgatattccccaactggagccaagtgactatctaaaaaaactggcttctcagggaaaccctcccctgaaagaatggcaaagcttggcaggctcccctagcagtaaattgtgattcagtcttccagattatgcctcacatgctagcatcaggtaatgctgactgaatttcagtgaaattaaatcaaaaatccaaagtaagattgttctgaaatacaaagcaaaataaataatcattagaatcttctgtgtaacgactctaatggtcaaatctttaggaatgtgcttcctatgcctctgaatctgtccttatcagataaattcaatgcatgaacttgtgtgaatataataccataatagctaatgaaagaggctcaggcataagttgagattctcaaatgcttttatcattggataaatgtgtcatcaattaataaatgataaatgcagctaagtcatacattcattttgactcctttcaatgtcacacacatagtattgatcagaaatcttatgaatcatacatacactcaacaaacattaaagttgtaggaaaaagacagttggaaattggtaagggaactgagtacttcaaaccagcacagggaacttaggttagtgtggcaagcctttcctcttctggtctttcctcttctgtttatggagaaataatagaaagtagtaagtcgttaacttagtgtaagaagggtcttagagaacatctaaccttctaggatttcccaattctgtgatagagtaatgacaccagttttcctgtcatgacaagcctctgtgatgttacatatggaaatggttgaatcttgaaaaatctaaaattgttgcaaaacatattttgtatgattttgttgtaagagttcttctctttttactttttgccttgtgtagttaaaaattaaggggctggtcaatacaaaaacttgtacacaaatatttatagcagaattattcataatggccaaaagctgaatacaacccaaatgtctatgaactaatgaatagataaaccaaatctggtatatccatacaatggactatattattcagccataaaaagaaataaagggccaggcacagtggctcacacctgtaatcccagcactttgggaggctgaggcaggaggattgtttgaggccagaaatttgagaccagcctgggcaacatagcaaaaccctgtctctacaaaaaatactttccgtacattagtggttgcctaaggctagaattgggggtgatgaatggggagtacaggattcatctaatgggtacaggatttctttatggttcatgaaaatggtctaaacttattgtggtaatggtcacataacaatatattaaaaaccattgagttgtatattttaagtgggtgaattatatggtatgtgaattatatctcaataaagttgttagtaaataaatggggctgaagatgttatccttcattgtggtgtaaatgaactttcacaatattttcacctgtgaacccaaataaaatgattaaagttctgatggaaaaatcttgaatggagtataagttttccgttgttaaaaagcaaacaaaaaaccaacaaaaaatccaagtgtgccttgaattgtacagagcacaattattatgtttgaaatgtgtactacttaattttatataatttggtttgtgaaattaaagacatcaataaaaatgattcctgaaagtagtaa

SEQ ID NO: 130013 - DNA, 2577 bp, Homo sapiens
  Payload ID: 5430
  Gene Symbol: EHHADH
  Gene Name: enoyl-CoA, hydratase/3-hydroxyacyl CoA dehydrogenase
  Uniprot ID: Q08426
  ENST ID: ENST00000456310
  CDS Start-End: 438-2321
gaggtgccctcggtgatagaggaaacatggccgagtatacgcggctgcacaacgccttggcgctaatccgcctccgaaacccgccggtcaacgcgatcaggtaacgggctcggtcgcctccagcccggggaccgtgcgggccttagccgccctctggctccggaggctttgactctcccccgtcggtttaaaccgagaaggacactcaagagttgagcaactgtacgactttactccgtgacataaaagaaggactacagaaagctgtaatagaccatacaataaaagccattgtgatttgtggagcagagggcaaattttctgcaggtgctgatattcgtggcttcagtgctcctaggacatttggccttacactgggacatgtagtagatgaaatacagagaaatgagaagcccgtggtggcagcaatccaaggcatggctttcggagggggactagagctggccctgggctgtcactataggattgcccacgcagaggctcaagttggcttaccagaagttacactgggacttctccctggtgcaagaggaacccagcttctccccagactcactggagttcctgctgcacttgacttaattacctcaggaagacgtattttagcagatgaagcactcaagctgggcattctagataaagttgtaaactcagacccggttgaagaagcaatcagatttgctcagagagtttcagatcaacctctagaatcccgtagactctgcaacaagccaattcagagcttgcccaacatggacagcatttttagtgaggccctcttgaagatgcggaggcagcaccctgggtgtcttgcacaggaggcttgtgtccgtgcagtccaggctgctgtgcagtatccctatgaagtgggcatcaagaaggaggaggagctgtttctatatcttttgcaatcagggcaggctagagccctgcaatatgctttcttcgctgaaaggaaagcaaataagtggtcaactccctccggagcatcgtggaaaacagcatcagcgcggcctgtctcctcagttggtgttgttggcttgggaacaatgggccgaggcattgtcatttcttttgcaagggccaggattcctgtgattgctgtagactcggacaaaaaccagctagcaactgcaaacaagatgataacctctgtcttggaaaaagaagcctccaaaatgcaacagagcggccacccttggtcaggaccaaaacccaggttaacttcatctgtgaaggagcttggtggtgtagatttagtcattgaagcagtatttgaggaaatgagcctgaagaagcaggtctttgctgaactctcagctgtgtgcaaaccagaagcatttttgtgcactaatacttcagccctggatgttgatgagattgcttcttccactgatcgtcctcacttggtcattggcacccacttcttttcgccagctcatgtcatgaagttgttagaggttattcccagccaatactcttcccccactaccattgccactgttatgaacttatcaaaaaagattaaaaagattggagtcgttgtaggcaactgttttggatttgtggggaatcgaatgttgaatccttactacaatcaggcatatttcttgttagaagaaggcagcaaaccagaggaggtagatcaggtgctggaagagtttggttttaaaatgggaccttttagagtgtctgatcttgctgggttggatgtgggctggaaatctagaaaggggcaaggtcttactggacctacattgcttccaggaactcctgcccgaaaaaggggtaataggaggtactgcccaattcctgatgtgctctgtgaattaggacgatttggccagaagacaggtaagggttggtatcaatatgacaagccattgggtaggattcacaaacctgatccctggctttccaaattcctatcacggtatagaaaaacccatcacattgaaccacgtaccattagccaggatgagatccttgaacgctgcttatattcacttatcaatgaagcattccgtatcttgggagaagggatagctgctagcccagagcacattgatgttgtctatttacatggatatggatggccaaggcacaagggcgggcccatgttctatgcttccacagttgggttgcccacagttctagagaaattgcagaaatattacaggcagaaccctgatattccccaactggagccaagtgactatctaaaaaaactggcttctcagggaaaccctcccctgaaagaatggcaaagcttggcaggctcccctagcagtaaattgtgattcagtcttccagattatgcctcacatgctagcatcaggtaatgctgactgaatttcagtgaaattaaatcaaaaatccaaagtaagattgttctgaaatacaaagcaaaataaataatcattagaatcttctgtgtaacgactctaatggtcaaatctttaggaatgtgcttcctatgcctctgaatctgtccttatcagataaattcaatgcatgaacttgtgtgaatataataccataatagctaatgaaaga

SEQ ID NO: 130014 - DNA, 656 bp, Homo sapiens
  Payload ID: 5430
  Gene Symbol: EHHADH
  Gene Name: enoyl-CoA, hydratase/3-hydroxyacyl CoA dehydrogenase
  ENST ID: ENST00000440662
  CDS Start-End: 10-240
agaggaaacatggccgagtatacgcggctgcacaacgccttggcgctaatccgcctccgaaacccgccggtcaacgcgatcagtacgactttactccgtgacataaaagaaggactacagaaagctgtaatagaccatacaataaaagccattgtgatttgtggagcagagggcaaattttctgcaggtaactcaagtctaaccctctcccaccatctctggaatccagccacagactgagaccaatactgcattagctgtgcttgttggtaataacttagtgtaggtaatggatatggcagacttgagtgagaatgagtaacactgtggagaaagggacaggaattacaagagagacccagagaagggcttagtctcttttattgtggattgggcttttagagtatatttagttccagacttgatggctgttatacacctgctgatatatacctgcattgcatgtatctccaccatatgtgggcttgggcaaatctctttaacttcctgaacctcaatttctctatctataaagtgggaacaataatatctattttaaggggtttttgtgacattaagcgagataacatatctgaaagcctctactacagtacctacacaaagaagatggtcaataaatgttattgtttaattca

SEQ ID NO: 130015 - DNA, 2710 bp, Homo sapiens
  Payload ID: 5431
  Gene Symbol: ENTHD1
  Gene Name: ENTH domain containing 1
  Uniprot ID: Q8IYW4
  ENST ID: ENST00000325157
  CDS Start-End: 252-2075
ggggaccggcctgggcccttgagcctggctggagtaggtggaatatcctggggagaggaagtttggtcgttgggcagcggccgactttcctctcaggaaattgatactttatcaacatagagattaattatttgtatttgggagcagcagaactggggaccaattacctgtcaagagttttataaacccgtgacataaactgttattccattgctttcatcctccatctcaccttggaacttgtattacttatggcgttcaggagacaagtgaaaaactttgtgaaaaattactcagatgctgaaataaaagtcagggaagcaacttctaacgacccttggggtccctctagttctctgatgttagatatcagtgacttgactttcaacacaatttctctctcagagattatgaatatgctgtggcacagactcaatgaccatgggaagaactggcgccacgtgtataaatcccttaccctaatggattatctcatcaagaatggatcaaagaaagttattcagcattgcagagaggggttctgtaaccttcaaacactaaaagattttcagcacatagatgaagctggaaaagaccaaggttattatatccgggaaaaatctaagcaagtcatcacattgctgatggatgaaccattgctgtgtaaagagagggaagtggcatgtcggactagacagcgtacctcccactctatattgttttctaaaagacaacttggttcaagtaactcactgacagcgtgcacttctgcccccacaccggatatttctgcttcagagaagaagtataagcttcctaagtttggaaggttacataataaaagaaatgtgtgcaaggcaggattgaaacaagagcattgccaagatgttcatttgcctacagaaactatgttgtcccaggaaacacttccactcaagattcatggttggaaatcaacagaggacctgatgacatttttggatgatgatccagagctgcctttactagcaacacctccttccattgtctctccaatcacttgcttgtcagaagcagaagaagtttgtaatctttcgggtgcagatgctgtgcctactctctcagaaaatagtccttctgggcagagagatgtgagtttggacaagagatcagatggtatctttacaaatactgtcacagaaaacctcttggaaacacctttagaaaagcaatcagctgcagaaggtcttaaaacattgacaattttaccagcatgttggtcaagtaaagaggagtttatcagccccgacttaagggtatcaaagtcagattctactttccataaccaggcctctgtagaaacactctgtctctctccctcattcaaaatatttgaccgagtgaaggagattgtaatcaacaaggcctaccagaaaccagcacaatccagcattcagatggatgataaaatcctcaagacaaccacacgggtttcaactgcttctgagggagcatcttccttttctcctttatccatgtcatctcctgatttagcctctccagagaagtcagctcatctcttatcaccaattctggccggaccttccttctggactctgtcccatcaacagttgtcttctacctcctttaaagatgaagataagacagccaagctgcatcactcctttgcttctaggggcccagtgtcttctgatgtagaggaaaatgatagcctcaatctactgggaattcttccaaataactctgattctgctaaaaagaatataagtcacatttctagtagtcactggggggagttttccacccaaaatgtagaccagttcatccctctgtcctgttctggttttcagtcaaccaaagacttcccccaggaacctgaagcaaagaattccattagtgttcttttaagggaggtaaaacgtgcgatcgctagattacatgaagatctgagcacagtgatccaagaacttaatgtcatcaataacatcttgatgagcatgagtctgaatagttcacaaataagccagtcttcccaggtcccccagtcttctgaggggagctcagatcagatctaatcatcacaatatctatttttgatagaactcgtgtggttccacttccccaagacttacgttagcattgtataaattcatattattatggcaaaaaaggggatggtttaatttttccttgtcaggtttattagcaagtatctttcaaactaatactttcatttgggtggtttattttttaaaagggaaagatgtcacctttgataatttcagatttagatattagttcatttgaaacagaagagaatttcattctttcatgctctgtacctcaaatgggttaagcattagtgaaaattgtggtaagacctcaaactgcaaatgactattcaagagcttttggataaggaggcaggaagaagctctttatctttcaactgtatggagcttgttaacaagcctctgaggtgacctaggaggattgagtttgggggtatacatttcacacattcttttgcaagttttaggttctgcaaccaagggccagaaatcttttctttcttccagatgctagtgttaggagttaaatggaaacaagaaggacatggggcaaatgtttttactgtcaatgtatattgcaaggtgaattcaaatgcatccttttattctacttcagaaaataaatttgatatttttca

SEQ ID NO: 130016 - DNA, 2287 bp, Homo sapiens
  Payload ID: 5432
  Gene Symbol: ENTHD2
  Gene Name: ENTH domain containing 2
  Uniprot ID: Q96N21
  ENST ID: ENST00000300714
  CDS Start-End: 59-1636
agtgattggagggcccgggcctggcggaagcggggcagaccgggaggggacctggatcatggctgccgcgccgccgctacgggaccgcctgagctttctacaccggctcccgattctcctgaaggggacgtccgatgatgatgtcccgtgtccgggctacctgtttgaagagattgctaaaatctcccacgagtctccgggcagcagccagtgcctgctggagtacctcctgagccgcctgcacagcagctccggccacgggaagctcaaggtgctgaagatcctgctctatctgtgcagccacggctcctccttcttcctgctcatcctcaaacgcaactctgccttcatccaggaagctgcagcttttgcagggcccccagatcctctgcacgggaacagcttgtaccagaaggttcgcgcggccgcgcaggacttggggagcaccctgttctcggacaccgtgttgccgctggctccctcccagcctctggggaccccgcctgccacaggcatgggctcccaggccaggccgcacagcaccctccagggtttcggctacagcaaggaacacggccgcacggctgtgaggcatcagcctgggcaggccggagggggctgggatgagctggacagcggccccagctctcagaattcctcccagaacagcgacctgagcagggtctcggactcgggcagtcattccggcagcgacagccattcaggggccagccgggagccgggtgacctggcagaaagggtcgaggtggtggccctgagtgactgtcagcaggagttgagcttggtgaggactgtgactcggggaccacgcgccttcctgagccgcgaggaggcacagcacttcatcaaagcgtgtggactgctcaactgtgaggccgtgctgcagctgctgacctgccacctgcgtgggaccagtgaatgcacgcagctgagggcgctgtgtgccatcgcctccctggggagcagcgacctcctcccccaggagcacatcctcctccgcacccggccgtggctgcaggagctcagcatgggcagcccgggacctgtgaccaacaaggccaccaagatcctgaggcactttgaggcctcctgtgggcagctgtcccctgcccggggcacctcagctgagcctggccccacagccgccctcccaggcccatctgacctgctgaccgacgctgtgcctctccctgggagccaggtcttcctgcagcctctgagttcaaccccggtctcgtcccggagccctgctccctcatctgggatgccgtccagccctgtgcccaccccacccccagatgcctcccccattccagcccccggagaccccagcgaggccgaggccagactggcagaaagcaggcggtggagacctgaacggatcccagggggcacggacagcccaaagagaggccccagcagctgtgcgtggagccgcgactccttgtttgctggcatggagctggtggcctgtccccgcctggtgggggctggggctgctgcgggagagtcctgtcctgatgctccccgcgccccccaaacatcgtcccagaggacagcagccaaagagcctcctggctcagagccgtcagctttcgcgttcctgaacgcctgacccgatggcctggccctggagtcttcagcttcagctgctgtctggggcggtctgtgcttcctgagcagcctcaaccgtagctgctacagtctccaggcagcttgacttgagaggacgaccctagggctacctcagtttcccccatctcctctgccagaggctctggctatttggacttgaatccctacgagggatggcaggtggcagggcttcagaaatgtcgatctcagggctctcagggggcagtccctgcctgtcttgctctcagacatgaggtttcttgtatgaatgcggaagcgactaccaggttccttatttcattttgatctcagctccctccttccccaggaggtcatgagcagcaacaagccactgctcccccgtcccatcggggtgggctaggtgctgaggctgggtttggtgcatgtgggttgagggtgtcttgtccgggctgccttgtgctgtctggcctgaggccatttcaagtctcagatccctacgtgatccttccctggctctcacctgctcctttaggctgtaattgcttcctacacacgaagcctctgattggagcctctggtccatctcagaaaaaccttccaagagcgctggggtttatgctttctgaataaacactactgtttacatgaa

SEQ ID NO: 130017 - DNA, 551 bp, Homo sapiens
  Payload ID: 5432
  Gene Symbol: ENTHD2
  Gene Name: ENTH domain containing 2
  ENST ID: ENST00000571115
  CDS Start-End: 1-158
ccctgagtgactgtcagcaggagttgagcttggtgaggactgtgactcggggaccacgcgccttcctgagccgcgaggaggcacagcacttcatcaaagcgtgtcccctctgtgcaggtgtggactgctcaactgtgaggccgtgctgcagctgctgacctgccacctgcgtgggaccagtgaatgcacgcagctgagggcgctgtgtgccatcgcctccctggggagcagcgacctcctcccccaggagcacatcctcctccgcacccggccgtggctgcaggagctcagcatgggcagcccgggacctgtgaccaacaaggccaccaagatcctgaggcactttgaggcctcctgtgggcagctgtcccctgcccggggcacctcagctgagcctggccccacagccgccctcccaggcccatctgacctgctgaccgacgctgtgcctctccctgggagccaggtcttcctgcagcctctgagttcaaccccggtctcgtcccggagccctgctccctcatctgggatgccgtccagccctgtgccca

SEQ ID NO: 130018 - DNA, 849 bp, Homo sapiens
  Payload ID: 5432
  Gene Symbol: ENTHD2
  Gene Name: ENTH domain containing 2
  ENST ID: ENST00000570854
  CDS Start-End: 25-576
gcagaccgggaggggacctggatcatggctgccgcgccgccgctacgggaccgcctgagctttctacaccgggtgagtgagggcggtccgcccgggccccggtcccacggctcctctcgagcgccgcattccccggactcgccccgggccggagccattgaccttgcgtctccgcgccgggtagctgctcctggccccttcgcccgcgccgacgcccctgagctgcccgcccgccgcgccgtcccggggccttccaagccgggccttccaagccggacccgccgagcgcaagggcgatgggcacagccagaccctgggggaacgaacaggcctcggccagcattcagtggcctccgacgggagggaaggagcggcggacccggtggacgtggagccgctgtgtccgtgctgctggcgcccaggtgggctggcagcccgccgtcctccctgacggtggcgtttcagaggactccggtcctggagaggcacccctgggttgcagagaacacagacgtctcgaagggacagagaaggacgcaccattctcccgattctcctgaaggggacgtccgatgatgatgtcccgtgtccgggctacctgtttgaagagattgctaaaatctcccacgagtctccgggcagcagccagtgcctgctggagtacctcctgagccgcctgcacagcagctccggccacgggaagctcaaggtgctgaagatcctgctctatctgtgcagccacggctcctccttcttcctgctcatcctcaaacgcaactctgccttcatccaggaagctgcagcttttgcagggcccccagatcctctgcacgggaacagcttgtacca

SEQ ID NO: 130019 - DNA, 568 bp, Homo sapiens
  Payload ID: 5432
  Gene Symbol: ENTHD2
  Gene Name: ENTH domain containing 2
  ENST ID: ENST00000572050
  CDS Start-End: 1-292
ggaccgcctgagctttctacaccggctgctcctggccccttcgcccgcgccgacgcccctgagctgcccgcccgccgcgccgtcccggggccttccaagccgggccttccaagccggacccgccgagcgcaagggcgatgggcacagccagaccctgggggaacgaacaggcctcggccagcattcagtggcctccgacgggagggaaggagcggcggacccggtggacgtggagccgctgtgtccgtgctgctggcgcccaggtgggctggcagcccgccgtcctccctgacggtggcgtttcagaggactccggtcctggagaggcacccctgggttgcagagaacacagacgtctcgaagggacagagaaggacgcaccattgctgttcatccctgactgttgagagaggaccctgctgcagcctccctgtggccagtagcacagttctcatcccttcccagtcctctctccggccatgtcaacagtgagagctcccgattctcctgaaggggacgtccgatgatgatgtcccgtgtccgggctacctgtttgaagagattgcta

SEQ ID NO: 130020 - DNA, 453 bp, Homo sapiens
  Payload ID: 5432
  Gene Symbol: ENTHD2
  Gene Name: ENTH domain containing 2
  ENST ID: ENST00000571094
  CDS Start-End: 113-453
gttctcatcccttcccagtcctctctccggccatgtcaacagtgagaggtgggtcgtttccatcccctttggggggctgcggattcacccctgtgggaaatggcacctcatcatggtaggggctcttgttccctttcagctcccgattctcctgaaggggacgtccgatgatgatgtcccgtgtccgggctacctgtttgaagagattgctaaaatctcccacgagtctccgggcagcagccagtgcctgctggagtacctcctgagccgcctgcacagcagctccggccacgggaagctcaaggtgctgaagatcctgctctatctgtgcagccacggctcctccttcttcctgctcatcctcaaacgcaactctgccttcatccaggaagctgcagcttttgcagggcccccagatcctctgcacgggaacagcttgtaccagaaggttcg

SEQ ID NO: 130021 - DNA, 6614 bp, Homo sapiens
  Payload ID: 5433
  Gene Symbol: EVPL
  Gene Name: envoplakin
  Uniprot ID: Q92817
  ENST ID: ENST00000301607
  CDS Start-End: 255-6356
agactggttgtgcaggaggaggcatgagtgtggccgttgtgggtgcatgcgcgtcaggcctgggacccggccgcccgcccgctgcctcacctgcaaggaggggcctcccagaaactcccttccccagtgcccagccgccccacctcgccagacttagctgaccagccagtgaggacgcccgctgcctcccacctgccctcctgccgtctttcgccagccaagcccagcctgagccagcacttgcctttacgaccatgttcaaggggctgagcaaaggctcccaggggaaggggtcccccaagggctcccccgccaaggggtcccccaaaggctcccccagcaggcacagccgggctgccacccaggagctggcccttctcatctcccgcatgcaagccaacgccgaccaggtggagcgggacatcctggagacgcagaagaggctgcagcaggaccggctgaacagtgagcagagccaggccctgcagcaccagcaggagacgggccgcagcctgaaggaggctgaggtgctgctcaaggacctcttcctggacgtggacaaggcccggcggctcaagcacccgcaggctgaggagattgagaaggacatcaagcagctgcacgagcgggtgacccaggagtgtgcggagtaccgtgccctgtacgagaagatggtgctgccccccgacgtgggacccagggtcgactgggcacgcgtgctggagcagaaacagaagcaggtctgcgcaggccagtacgggccgggcatggcggagctggagcaacagatcgccgagcacaacatcctgcagaaggagatcgacgcctatgggcagcagctgcggagcctcgtggggccggatgcagccaccatccggagccaataccgagacctactgaaggcggcgtcgtggcgcgggcagagcctgggcagcctgtacacgcacctccagggctgcacgcggcagctgagcgccctggctgagcagcagcgccgcatcctgcagcaggactggagcgacctcatggccgaccctgcgggcgtgcggcgggagtacgagcacttcaagcagcacgagctgctgagccaggagcagagcgtgaaccagctggaggacgacggcgagcgcatggtggagctgcggcaccccgcggtggggcccatccaggcccaccaggaggccctgaagatggagtggcagaacttcctgaacctgtgtatctgccaggagacccagctgcagcacgtggaggactaccgccggttccaggaagaggccgactcagtcagccagaccctggcgaagctcaactccaacttggatgccaagtacagccctgcacctgggggcccccctggcgcccccacagagctgctgcaacagctggaggcagaggaaaaacggctggccgtcaccgagagggccactggggacctgcagcggcgaagccgggatgtggcccctctgccacagcgaagaaacccccctcagcagcccctgcacgtggacagcatctgcgactgggactcaggagaagtgcagctgctgcagggtgagcggtataagctggtagataacactgacccgcacgcctgggtcgtgcagggccctggcggggagaccaagcgtgctcccgccgcctgcttctgcatcccagcaccagaccctgatgctgtggccagggcctcccggctggcctcagagctgcaggccctgaagcagaaattggccacagtccagagccgcctgaaggccagtgctgtggagtctcttcggcccagccagcaggctccatctggctcagacctggccaacccacaggcccagaagctcctgacacagatgacccggctggatggagacctgggacagatagagaggcaggtgctggcctgggcgcgggccccgctgagccgccccacacccttggaggacttggagggccgcatccacagccatgagggcacagcccagcgcctgcagagcctgggaacggagaaggagacagcccagaaggagtgcgaggcgtttctgtccacgcggcccgtgggccccgctgccctgcagctgcccgtagccctcaacagcgtgaagaacaagttcagtgacgtgcaggttctgtgcagcctctacggggagaaagccaaggctgccctggatctggagcggcagatccaggatgcggacagggtcatccgaggcttcgaggccaccctggtgcaggaggcccccatccctgctgaaccgggggctctgcaggagagggtcagcgagctgcagcgccagcggagggagctgctggaacagcagacctgcgtgctgcggctacaccgcgcgctgaaggcctcggagcacgcatgcgctgccctgcagaacaacttccaggagttctgccaagacctgcctcgccagcagcgccaggtgcgagccctcaccgaccgctaccacgccgtaggggaccagctggacctgcgggagaaggtggtgcaggatgccgccctcacctaccagcagttcaagaactgcaaggataacctgagctcctggctggagcacctgccccgcagccaggtgcggcccagcgacggccccagccagatcgcctacaagctgcaggcgcagaagaggctgacgcaggagatccagagccgagagcgggacagggccacagcatcccacctctcccaggccctgcaggcagcgctccaggactatgagctccaggcagacacctaccgctgctctttggagcccaccctggcagtgtcagcccccaagagaccccgagtggctcccctgcaagagagcatccaagcccaggagaagaaccttgcaaaggcctatactgaggttgcagcagcacagcagcagctgctccagcagctggagtttgctagaaaaatgctggagaagaaggagctcagtgaggacatccgaaggacccatgatgcaaagcagggctccgagagccctgcccaagcagggagagagtcagaggccctgaaggcccagctggaagaggagaggaagcgggtggcccgggtgcagcatgagctggaggcgcagaggagccaactgctgcagctgaggacccagcggcccttggagaggctggaggagaaggaagtggtagagttctaccgggacccccagctggagggcagcctgtccagggtgaaggcccaggtggaggaggagggcaagcggcgggctggcctgcaggcagacctggaagtggcagcccagaaggtcgtgcagctggaaagcaagaggaagaccatgcagcctcatctgctgaccaaggaggtcacccaggtggagagggaccccggcctggacagccaggcggcccagctcaggatccagatccagcagctccgcggggaggatgccgtcatctcggcccggctggaagggctgaagaaggagctactggcccttgagaagagggaggtggacgtgaaggagaaggtcgtggtgaaagaggtagtcaaggtggagaagaatctggaaatggtcaaggcagcccaggctctgaggctgcagatggaggaggatgctgcgcggaggaagcaggcggaggaggctgtggccaagctacaggctcgcatcgaagacctggagcgggctatcagctcggtggagcccaaggtcatcgtgaaggaggtgaagaaggtggagcaggacccagggctcctccaggagtcctccaggctgaggagcctcctcgaggaggagaggaccaagaacgcgacgctggccagggagctgagcgacctgcacagcaagtacagcgtggtggagaagcagaggcccaaagtgcagctccaggagcgcgtccacgagatcttccaggtggatccggagacagagcaggagatcactcggctcaaggccaagctgcaggagatggcgggcaagaggagcggtgtggagaaggaggtggagaagctgctgcccgacctggaggtcctgcgggcccagaagcccacggtggagtacaaggaggtgacccaggaggtggtgaggcatgagaggagccccgaggtgctgcgtgagatcgaccgcctgaaggctcagctcaacgagctcgtcaacagccacgggcgctcccaggagcagctcatccgcctgcagggtgagcgcgacgagtggaggcgcgagcgggccaaggtggagaccaagacggtgagcaaggaggtggtgcgccacgagaaggacccggtgctggagaaagaagcagagcggctccgccaggaggtgcgggaggcggcccagaagaggcgggccgcggaggacgcggtgtacgagctgcagagcaagcgcctgctgctggagaggaggaagcccgaggagaaggtggtggtgcaggaggtggtggtcacccagaaggacccgaagctgcgcgaggagcacagccggctgagcgggagcctggatgaggaggtgggccggcggcgccagctagagcttgaggtgcagcagctgcgggccggcgtggaggagcaggagggcctgctcagcttccaggaggaccgcagcaagaagctggccgtggagagggagctgcggcagctgaccttgaggatccaggagctcgagaagcggcctcccacggtgcaggagaagatcatcatggaggaagtggtcaagctggagaaggacccggacctggagaagtccacggaagccctgcggtgggacctggaccaggagaagacccaggtaaccgagctgaatcgggagtgcaagaacctgcaggtccagattgacgtcctccagaaagccaaatcgcaggagaagaccatctacaaggaagtgatccgggtgcagaaggaccgcgtcctggaagatgagcgggcccgcgtgtgggagatgctcaacagggagcgcacggcccggcaggcccgggaggaggaggcacggcgcctgcgggagcgcattgaccgggccgagacgctggggagaacctggtcccgggaggagtccgagctgcagagggcccgggaccaggccgaccaggagtgtgggcggctgcagcaggagctgcgggctctggagaggcagaagcagcagcagacactgcagctgcaggaggagtcgaagctgctcagccagaagacggagagcgagcgacagaaggcggcccagcggggccaggagctctcgcggctggaggcggccatcctccgcgagaaggaccagatctacgagaaggagcggacgctccgggacctccacgccaaggtgagccgggaggagctcagccaggagacccagacgcgagagaccaacctttccaccaagatctccatcctggaacccgagacggggaaggacatgtccccatacgaggcctacaagaggggcatcatcgacaggggccagtacttgcagctgcaggagctcgagtgtgactgggaggaggtcaccacctcggggccctgtggggaggagtctgtgctcctggaccgcaagagcgggaagcagtactccatcgaggccgccctccgctgccggcgcatctctaaggaggagtaccatctgtacaaggacggccacctgcccatctccgagtttgcgctgcttgtagctggggagaccaagccaagctcctcactctccatcggctctatcatctccaagtccccgctcgcctccccggccccccagagcaccagtttcttctctcccagcttctctctcgggctcggtgatgacagcttccctatcgccgggatctatgacacaaccacagacaacaagtgcagcatcaagacggccgtggccaagaacatgctggaccccatcactgggcagaagctactggaggcccaggcggccacagggggcatcgtggacctgctcagccgtgagcgctactctgtgcacaaggcgatggagaggggcctgatcgagaacacctccacacagaggctgcttaacgcccagaaggccttcaccggcatcgaggaccccgtcaccaagaagaggctctcggtgggcgaggccgtccagaagggctggatgccccgggagagcgtgctcccacacctgcaggtgcagcacctgaccggggggctcatcgaccccaagaggacaggccgcatccccatccagcaggccctcctctccgggatgatcagtgaagagctggcccagctcctgcaggacgagtccagctacgagaaggatttgacagaccccatctccaaggaacggctgagctacaaggaggccatgggccgctgccgcaaagaccccctgagcggcctgctgctcctgccagcggcactggaggggtaccgctgctaccgctccgcctcccccaccgtcccgcgctcccttcgctgacacgggccaaggagccagtggggaagtgcgtgtgttgggccaggtaggatacgtacacctcttgcctcagagcagcctcatcccaggcagtgggtcttccctctgtccaaccactgttttattattttactaacatggtgatgggctccctcccctaaccttggtgcctgatccatccccagaccaggacagcagccactcagttcttcctccacctccacccagtgatcccaataaacgaattctgtctccccgtgc

SEQ ID NO: 130022 - DNA, 6223 bp, Homo sapiens
  Payload ID: 5433
  Gene Symbol: EVPL
  Gene Name: envoplakin
  ENST ID: ENST00000586740
  CDS Start-End: 34-6201
gcccagcctgagccagcacttgcctttacgaccatgttcaaggggctgagcaaaggctcccaggggaaggggtcccccaagggctcccccgccaaggggtcccccaaaggctcccccagcaggcacagccgggctgccacccaggagctggcccttctcatctcccgcatgcaagccaacgccgaccaggtggagcgggacatcctggagacgcagaagaggctgcagcaggaccggctgaacagtgagcagagccaggccctgcagcaccagcaggagacgggccgcagcctgaaggaggctgaggtgctgctcaaggacctcttcctggacgtggacaaggcccggcggctcaagcacccgcaggctgaggagattgagaaggacatcaagcagctgcacgagcgggtgacccaggagtgtgcggagtaccgtgccctgtacgagaagatggtgctgccccccgacgtgggacccagggtcgactgggcacgcgtgctggagcagaaacagaagcaggtctgcgcaggccagtacgggccgggcatggcggagctggagcaacagatcgccgagcacaacatcctgcagaaggagatcgacgcctatgggcagcagctgcggagcctcgtggggccggatgcagccaccatccggagccaataccgagacctactgaaggcggcgtcgtggcgcgggcagagcctgggcagcctgtacacgcacctccagggctgcacgcggcagctgagcgccctggctgagcagcagcgccgcatcctgcagcaggactggagcgacctcatggccgaccctgcgggcgtgcggcgggagtacgagcacttcaagcagcacgagctgctgagccaggagcagagcgtgaaccagctggaggacgacggcgagcgcatggtggagctgcggcaccccgcggtggggcccatccaggcccaccaggaggccctgaagatggagtggcagaacttcctgaacctgtgtatctgccaggagacccagctgcagcacgtggaggactaccgccggttccaggaagaggccgactcagtcagccagaccctggcgaagctcaactccaacttggatgccaagtacagccctgcacctgggggcccccctggcgcccccacagagctgctgcaacagctggaggcagaggaaaaacggctggccgtcaccgagagggccactggggacctgcagcggcgaagccgggatgtggcccctctgccacagcgaagaaacccccctcagcagcccctgcacgtggacagcatctgcgactgggactcaggagaagtgcagctgctgcagggtgagcggtataagctggtagataacactgacccgcacgcctgggtcgtgcagggccctggcggggagaccaagcgtgctcccgccgcctgcttctgcatcccagcaccagaccctgatgctgtggccagggcctcccggctggcctcagagctgcaggccctgaagcagaaattggccacagtccagagccgcctgaaggccagtgctgtggagtctcttcggcccagccagcagggtacccagggtggcccggggagaggtggctgtggggctagaaggagtagattccgacttccgactgctccatctggctcagacctggccaacccacaggcccagaagctcctgacacagatgacccggctggatggagacctgggacagatagagaggcaggtgctggcctgggcgcgggccccgctgagccgccccacacccttggaggacttggagggccgcatccacagccatgagggcacagcccagcgcctgcagagcctgggaacggagaaggagacagcccagaaggagtgcgaggcgtttctgtccacgcggcccgtgggccccgctgccctgcagctgcccgtagccctcaacagcgtgaagaacaagttcagtgacgtgcaggttctgtgcagcctctacggggagaaagccaaggctgccctggatctggagcggcagatccaggatgcggacagggtcatccgaggcttcgaggccaccctggtgcaggaggcccccatccctgctgaaccgggggctctgcaggagagggtcagcgagctgcagcgccagcggagggagctgctggaacagcagacctgcgtgctgcggctacaccgcgcgctgaaggcctcggagcacgcatgcgctgccctgcagaacaacttccaggagttctgccaagacctgcctcgccagcagcgccaggtgcgagccctcaccgaccgctaccacgccgtaggggaccagctggacctgcgggagaaggtggtgcaggatgccgccctcacctaccagcagttcaagaactgcaaggataacctgagctcctggctggagcacctgccccgcagccaggtgcggcccagcgacggccccagccagatcgcctacaagctgcaggcgcagaagaggctgacgcaggagatccagagccgagagcgggacagggccacagcatcccacctctcccaggccctgcaggcagcgctccaggactatgagctccaggcagacacctaccgctgctctttggagcccaccctggcagtgtcagcccccaagagaccccgagtggctcccctgcaagagagcatccaagcccaggagaagaaccttgcaaaggcctatactgaggttgcagcagcacagcagcagctgctccagcagctggagtttgctagaaaaatgctggagaagaaggagctcagtgaggacatccgaaggacccatgatgcaaagcagggctccgagagccctgcccaagcagggagagagtcagaggccctgaaggcccagctggaagaggagaggaagcgggtggcccgggtgcagcatgagctggaggcgcagaggagccaactgctgcagctgaggacccagcggcccttggagaggctggaggagaaggaagtggtagagttctaccgggacccccagctggagggcagcctgtccagggtgaaggcccaggtggaggaggagggcaagcggcgggctggcctgcaggcagacctggaagtggcagcccagaaggtcgtgcagctggaaagcaagaggaagaccatgcagcctcatctgctgaccaaggaggtcacccaggtggagagggaccccggcctggacagccaggcggcccagctcaggatccagatccagcagctccgcggggaggatgccgtcatctcggcccggctggaagggctgaagaaggagctactggcccttgagaagagggaggtggacgtgaaggagaaggtcgtggtgaaagaggtagtcaaggtggagaagaatctggaaatggtcaaggcagcccaggctctgaggctgcagatggaggaggatgctgcgcggaggaagcaggcggaggaggctgtggccaagctacaggctcgcatcgaagacctggagcgggctatcagctcggtggagcccaaggtcatcgtgaaggaggtgaagaaggtggagcaggacccagggctcctccaggagtcctccaggctgaggagcctcctcgaggaggagaggaccaagaacgcgacgctggccagggagctgagcgacctgcacagcaagtacagcgtggtggagaagcagaggcccaaagtgcagctccaggagcgcgtccacgagatcttccaggtggatccggagacagagcaggagatcactcggctcaaggccaagctgcaggagatggcgggcaagaggagcggtgtggagaaggaggtggagaagctgctgcccgacctggaggtcctgcgggcccagaagcccacggtggagtacaaggaggtgacccaggaggtggtgaggcatgagaggagccccgaggtgctgcgtgagatcgaccgcctgaaggctcagctcaacgagctcgtcaacagccacgggcgctcccaggagcagctcatccgcctgcagggtgagcgcgacgagtggaggcgcgagcgggccaaggtggagaccaagacggtgagcaaggaggtggtgcgccacgagaaggacccggtgctggagaaagaagcagagcggctccgccaggaggtgcgggaggcggcccagaagaggcgggccgcggaggacgcggtgtacgagctgcagagcaagcgcctgctgctggagaggaggaagcccgaggagaaggtggtggtgcaggaggtggtggtcacccagaaggacccgaagctgcgcgaggagcacagccggctgagcgggagcctggatgaggaggtgggccggcggcgccagctagagcttgaggtgcagcagctgcgggccggcgtggaggagcaggagggcctgctcagcttccaggaggaccgcagcaagaagctggccgtggagagggagctgcggcagctgaccttgaggatccaggagctcgagaagcggcctcccacggtgcaggagaagatcatcatggaggaagtggtcaagctggagaaggacccggacctggagaagtccacggaagccctgcggtgggacctggaccaggagaagacccaggtaaccgagctgaatcgggagtgcaagaacctgcaggtccagattgacgtcctccagaaagccaaatcgcaggagaagaccatctacaaggaagtgatccgggtgcagaaggaccgcgtcctggaagatgagcgggcccgcgtgtgggagatgctcaacagggagcgcacggcccggcaggcccgggaggaggaggcacggcgcctgcgggagcgcattgaccgggccgagacgctggggagaacctggtcccgggaggagtccgagctgcagagggcccgggaccaggccgaccaggagtgtgggcggctgcagcaggagctgcgggctctggagaggcagaagcagcagcagacactgcagctgcaggaggagtcgaagctgctcagccagaagacggagagcgagcgacagaaggcggcccagcggggccaggagctctcgcggctggaggcggccatcctccgcgagaaggaccagatctacgagaaggagcggacgctccgggacctccacgccaaggtgagccgggaggagctcagccaggagacccagacgcgagagaccaacctttccaccaagatctccatcctggaacccgagacggggaaggacatgtccccatacgaggcctacaagaggggcatcatcgacaggggccagtacttgcagctgcaggagctcgagtgtgactgggaggaggtcaccacctcggggccctgtggggaggagtctgtgctcctggaccgcaagagcgggaagcagtactccatcgaggccgccctccgctgccggcgcatctctaaggaggagtaccatctgtacaaggacggccacctgcccatctccgagtttgcgctgcttgtagctggggagaccaagccaagctcctcactctccatcggctctatcatctccaagtccccgctcgcctccccggccccccagagcaccagtttcttctctcccagcttctctctcgggctcggtgatgacagcttccctatcgccgggatctatgacacaaccacagacaacaagtgcagcatcaagacggccgtggccaagaacatgctggaccccatcactgggcagaagctactggaggcccaggcggccacagggggcatcgtggacctgctcagccgtgagcgctactctgtgcacaaggcgatggagaggggcctgatcgagaacacctccacacagaggctgcttaacgcccagaaggccttcaccggcatcgaggaccccgtcaccaagaagaggctctcggtgggcgaggccgtccagaagggctggatgccccgggagagcgtgctcccacacctgcaggtgcagcacctgaccggggggctcatcgaccccaagaggacaggccgcatccccatccagcaggccctcctctccgggatgatcagtgaagagctggcccagctcctgcaggacgagtccagctacgagaaggatttgacagaccccatctccaaggaacggctgagctacaaggaggccatgggccgctgccgcaaagaccccctgagcggcctgctgctcctgccagcggcactggaggggtaccgctgctaccgctccgcctcccccaccgtcccgcgctcccttcgctgacacgggccaaggagccagtggg

SEQ ID NO: 130023 - DNA, 585 bp, Homo sapiens
  Payload ID: 5433
  Gene Symbol: EVPL
  Gene Name: envoplakin
  ENST ID: ENST00000589231
  CDS Start-End: 1-339
cagaagggctggatgccccgggagagcgtgctcccacacctgcaggtgcagcacctgaccggggggctcatcgaccccaagaggacaggccgcatccccatccagcaggccctcctctccgggatgatcagtgaagagctggcccagctcctgcaggacgagtccagctacgagaaggatttgacagaccccatctccaaggaacggctgagctacaaggaggccatgggccgctgccgcaaagaccccctgagcggcctgctgctcctgccagcggcactggaggggtaccgctgctaccgctccgcctcccccaccgtcccgcgctcccttcgctgacacgggccaaggagccagtggggaagtgcgtgtgttgggccagattaaggagagaaatgtggctccaagactttgtgggcaagaatggacagtggacgggcgcagtggctcacacctgtgatccccccagcactttgagaggccaaggtaggaggatcgcttgagcccaggagttcgagaccagtctgagcaacatagtgagaccccatttctacaaaaataaaattagctgggcatggtggtgca

SEQ ID NO: 130024 - DNA, 2095 bp, Homo sapiens
  Payload ID: 5434
  Gene Symbol: EVPLL
  Gene Name: envoplakin-like
  Uniprot ID: A8MZ36
  ENST ID: ENST00000399134
  CDS Start-End: 359-1264
agtgtggtttttgtgggtgcatgcgcggcaggcctggggcctggccgcctgctgcctcacctgcaaggaggggcctcccagaaactcccttccccaatgcccagccgccccaccttgccagacttagctgaccagccagcaaggacgcccgctgcctcccacctgccctcctgccctccttcaccagccaagcccagcctgagccagcacctgcctttatgaccatgttcaagggactgagcaaaggctcccaggggaaggggtcccccaaggactccccagccaaggggtcccccaaaggctcccccagcaagcacagctgaatgccacccaggagctgaccctgctcatctcccacatgcaagccagcgccgaccaggtggagcgggacatcctggagacgcagaagaggctgcagcaggaccggctgaacagtgagcagagccaggccctgcagcaccagcaggagacgggcagcagcctgaaggaggccgaggtgctgctcaaggacctcttcctggacgtggacaaggcccggcggctcaagcacccgcaggctgaggagactgagaaggacatcgagcagctgcacgagcgggtgacccaggagtgtgcggagtactgtgccctgtacgagaagatggtgctgccgccccgacgtgggatccaaggtcgactgggcacacgtgctggagcagaaacagaagctggtctgcgcaggccagtatgggccgggcatggcggagctggaggaacagatcgcggagctcaacatcgtgcagaaggagatcaacgaccaaggagagcagctgcggagcctggtggggccggatgccgccaccatccggagccaataccgagacctactgagggcggcgtcgtggcgcgggcagagcctgggcagcctgtacacgcactgcagggctgcacgtggcagctgagcgccctggcggagcagcagcgccgcatcctgcagcaggactggagcgacctcatggccgaccctgcgggcgtgcggcgggaatacgagcacttcaagcagcacgagctgctgagccaggagcagagcgtaaaccagctggaggaggacggcaagcgcatggtggagctgcggcaccccgcggtggggcccatccaggcccaccaggaggccctgaagatggagtggcagaacttcctgaacctgtgcatctgccaggagacccagctccagcacgtggaggactacagccggattctgtgtccatcttcctctcctcattgactctgcatgaaggggatttctggtggagtaagggtagcagctcttgccgcacgtgcagagagagaggaacttccagtgcccgctatggagccacagcccacagcatggggaagtccccatccagaggcagtgctgcagctagaggtagctccagagtcctccgggccctgcaccgatacagccaaagaccagcaaagcgacaagctgccagacctcatgccacctgctgtagccactgggctcagccctggagctgagagcatcgctggagatagacgtggcagagaagaggttgcgagcatggccccagccagcagctcccacgctgcccctagtcctgggcatggagcgagccttggtgtcagagaccagggtgtgcagtctgagctcctctaccttactaaagagaggcctcttttatttaccagagccacagccctgctgcctcaggaccttttcattctgccggtgctggggctgtctatctgcaagctggaggtgttgagagcaggaaaaggaggctgtgaggaagggttcgggcagctcctcctgctctcagaggtggcctcctcctccaggcatggaggtctgtccactactgggcttctgggctatttgcccctgatttgctccctggtacgggctcttcttaacaggcaggcaaggggtgcggggaccaggtgagggcttcaaagggtacagtaccaaatcttccaaactcagcacttgtgccctggggtctccaaactgtcttctgccctagaatttattcatactgttaaattaccagtttatgcaaatgatatgtaaataaagctcaattttttgaaa

SEQ ID NO: 130025 - DNA, 3386 bp, Homo sapiens
  Payload ID: 5435
  Gene Symbol: EOMES
  Gene Name: eomesodermin
  Uniprot ID: O95936
  ENST ID: ENST00000295743
  CDS Start-End: 205-2265
tttccttccggaaaggacgctggattcagggcgcgccagtacgcgcagtagcggcccgcgagtcggcaggtgggtagccccggcgcgggaggaaggggaagttaccttcccctcggaagagggcgctggctcccccatcctgcctttataataaggccaccggaggagaggaagcagccagctgccgtctgcgctttgcaaagcatgcagttaggggagcagctcttggtgagctcagtgaacctgcctggcgcgcacttctacccgctggagagtgcgcgaggcggcagcggcgggagcgctggccacctccccagcgcggccccctctcctcagaagttggacttagacaaagcgtccaagaagttttccggcagtctctcctgcgaggcggtgagcggggagcccgcagccgccagcgcaggggcccccgcggccatgcttagtgacaccgacgccggggacgcatttgccagcgctgcggcagtggccaagccggggcccccggacggccgcaagggctccccctgcggggaggaggagctgccctccgccgctgcagccgccgccgccgccgccgccgcggctgcggccactgcgcgctactccatggacagcctgagctccgagcggtactacctccagtcccccggtcctcaggggtcggagctggctgcgccctgctcactcttcccgtaccaggcggcggctggggcgccccacggacctgtgtacccggctcctaacggggcgcgctacccctacggctccatgctgccccccggcggcttccccgcggctgtgtgcccacccgggagggcgcagttcggcccaggagccggtgcgggcagtggcgcgggcggtagcagcggcgggggcggcggcccgggcacctatcagtacagccagggggctccgctctacgggccgtaccctggagccgcagcggcgggatcttgcggaggactggggggcctgggggttccaggttctggcttccgtgcccacgtctacctgtgcaaccggcctctgtggctcaaattccaccgccaccaaactgagatgatcattacgaaacagggcaggcgcatgtttcctttcttgagcttcaacataaacggactcaatcccactgcccactacaatgtgttcgtagaggtggtgctggcggaccccaaccactggcgcttccaggggggcaaatgggtgacctgtggcaaagccgacaataacatgcagggcaacaaaatgtatgttcacccagagtctcctaatactggttcccactggatgagacaggagatttcattcgggaaattaaaactcaccaataacaaaggcgcaaataacaacaacacccagatgatagtcttacaatccttacacaaataccaaccccgactgcatattgttgaagttacagaggatggcgtggaggacttgaatgagccctcaaagacccagacttttaccttctcagaaacgcaattcattgcagtgactgcctaccaaaacaccgatattactcaactaaagattgatcataacccctttgcaaaaggcttcagagacaactatgattcatcccatcagattgtccctggaggtcggtacggcgttcaatccttcttcccggagccctttgtcaacactttacctcaagcccgctattataatggcgagagaaccgtgccacagaccaacggcctcctttcaccccaacagagcgaagaggtggccaaccctccccagcggtggcttgtcacgcctgtccagcaacctgggaccaacaaactagacatcagttcctatgaatctgaatatacttctagcacattgctcccatatggcattaaatccttgccccttcagacatcccatgccctggggtattacccagacccaacctttcctgcaatggcagggtggggaggtcgaggttcttaccagaggaagatggcagctggactaccatggacctccagaacaagccccactgtgttctctgaagatcagctctccaaggagaaagtgaaagaggaaattggctcttcttggatagagacacccccttccatcaaatctctagattccaatgattcaggagtatacaccagtgcttgtaagcgaaggcggctgtctcctagcaactccagtaatgaaaattcaccctccataaagtgtgaggacattaatgctgaagagtatagtaaagacacctcaaaaggcatgggagggtattatgctttttacacaactccctaaagagttattttaacctcaaaaattagctaactttttgcagatggacttggtggtgttttttgttgtcttctttgcctaggttgccaaaaagatgtttgccttccaccttgatgcatcctgttttgtgcaattctctaaaagaaggtgccaaagctttttgattgctgcaggtaactgaaacaaacctagcatttttaaaaaataagattaatggaagactttaaggtattttaaaattcgaagggtatccaaggttctgtatttatttattggggagacactaacccttcaaagaagcaggctgtgaacattgggtgcccagtgctatcagatgagttaaaacctttgattctcatttctatttgtaaattcttaagcaaatagaagccgagtgttaaggtgttttgcttctgaaagagggctgtgccttccgtttcagaaggagacattttgctgttacattctgccaggggcaaaagatactaggcccaggagtcaagaaaagcttttgtgaaagtgatagtttcacctgactttgattccttaacccccggcttttggaacaagccatgtttgccctagtccaggattgcctcacttgagacttgctaggcctctgctgtgtgctggggtggccagtgggactcaggagagagcaagctaaggagtcaccaaaaaaaaaaaaaaaaaaaagggagaatttaaaagtgtacagttgtgtgtttagatacactatagaataatgtggtatatattgtacaaatagtctacataggtgtctgggataatgtaaaactggtgctttggctttgtaaagaatttgcaaatcacttaacagctgcaggggcaaggggagagtttcatcatccccatgatatttgggaatattctgtttacttcttagatagttaagaatgtattcagctactatgtactaacttgaaccgtgtttaaggaaaactcctatttcatcctcttcttgcgccatcccctctccctaacttggtaatgtgaagaaactaaaacctgataccacagctcctataggcattttagagatcttggatttttatgtacagtcttagtcatttttaataaatgtggttcagtaagggaacgga

SEQ ID NO: 130026 - DNA, 2829 bp, Homo sapiens
  Payload ID: 5435
  Gene Symbol: EOMES
  Gene Name: eomesodermin
  Uniprot ID: O95936
  ENST ID: ENST00000449599
  CDS Start-End: 19-2136
gtctgcgctttgcaaagcatgcagttaggggagcagctcttggtgagctcagtgaacctgcctggcgcgcacttctacccgctggagagtgcgcgaggcggcagcggcgggagcgctggccacctccccagcgcggccccctctcctcagaagttggacttagacaaagcgtccaagaagttttccggcagtctctcctgcgaggcggtgagcggggagcccgcagccgccagcgcaggggcccccgcggccatgcttagtgacaccgacgccggggacgcatttgccagcgctgcggcagtggccaagccggggcccccggacggccgcaagggctccccctgcggggaggaggagctgccctccgccgctgcagccgccgccgccgccgccgccgcggctgcggccactgcgcgctactccatggacagcctgagctccgagcggtactacctccagtcccccggtcctcaggggtcggagctggctgcgccctgctcactcttcccgtaccaggcggcggctggggcgccccacggacctgtgtacccggctcctaacggggcgcgctacccctacggctccatgctgccccccggcggcttccccgcggctgtgtgcccacccgggagggcgcagttcggcccaggagccggtgcgggcagtggcgcgggcggtagcagcggcgggggcggcggcccgggcacctatcagtacagccagggggctccgctctacgggccgtaccctggagccgcagcggcgggatcttgcggaggactggggggcctgggggttccaggttctggcttccgtgcccacgtctacctgtgcaaccggcctctgtggctcaaattccaccgccaccaaactgagatgatcattacgaaacagggcaggcgcatgtttcctttcttgagcttcaacataaacggactcaatcccactgcccactacaatgtgttcgtagaggtggtgctggcggaccccaaccactggcgcttccaggggggcaaatgggtgacctgtggcaaagccgacaataacatgcagggcaacaaaatgtatgttcacccagagtctcctaatactggttcccactggatgagacaggagatttcattcgggaaattaaaactcaccaataacaaaggcgcaaataacaacaacacccagatgatagtcttacaatccttacacaaataccaaccccgactgcatattgttgaagttacagaggatggcgtggaggacttgaatgagccctcaaagacccagacttttaccttctcagaaacgcaattcattgcagtgactgcctaccaaaacaccgatattactcaactaaagattgatcataacccctttgcaaaaggcttcagagacaactatgattccatgtacaccgcttcagaaaatgacaggttaactccatctcccacggattctcctagatcccatcagattgtccctggaggtcggtacggcgttcaatccttcttcccggagccctttgtcaacactttacctcaagcccgctattataatggcgagagaaccgtgccacagaccaacggcctcctttcaccccaacagagcgaagaggtggccaaccctccccagcggtggcttgtcacgcctgtccagcaacctgggaccaacaaactagacatcagttcctatgaatctgaatatacttctagcacattgctcccatatggcattaaatccttgccccttcagacatcccatgccctggggtattacccagacccaacctttcctgcaatggcagggtggggaggtcgaggttcttaccagaggaagatggcagctggactaccatggacctccagaacaagccccactgtgttctctgaagatcagctctccaaggagaaagtgaaagaggaaattggctcttcttggatagagacacccccttccatcaaatctctagattccaatgattcaggagtatacaccagtgcttgtaagcgaaggcggctgtctcctagcaactccagtaatgaaaattcaccctccataaagtgtgaggacattaatgctgaagagtatagtaaagacacctcaaaaggcatgggagggtattatgctttttacacaactccctaaagagttattttaacctcaaaaattagctaactttttgcagatggacttggtggtgttttttgttgtcttctttgcctaggttgccaaaaagatgtttgccttccaccttgatgcatcctgttttgtgcaattctctaaaagaaggtgccaaagctttttgattgctgcaggtaactgaaacaaacctagcatttttaaaaaataagattaatggaagactttaaggtattttaaaattcgaagggtatccaaggttctgtatttatttattggggagacactaacccttcaaagaagcaggctgtgaacattgggtgcccagtgctatcagatgagttaaaacctttgattctcatttctatttgtaaattcttaagcaaatagaagccgagtgttaaggtgttttgcttctgaaagagggctgtgccttccgtttcagaaggagacattttgctgttacattctgccaggggcaaaagatactaggcccaggagtcaagaaaagcttttgtgaaagtgatagtttcacctgactttgattccttaacccccggcttttggaacaagccatgtttgccctagtccaggattgcctcacttgagacttgctaggcctctgctgtgtgctggggtggccagtgggactcaggagagagcaagctaaggagtcaccaaaaaaaaaaaaaaaaaaaa

SEQ ID NO: 130027 - DNA, 2080 bp, Homo sapiens
  Payload ID: 5435
  Gene Symbol: EOMES
  Gene Name: eomesodermin
  Uniprot ID: O95936
  ENST ID: ENST00000461503
  CDS Start-End: 287-1519
ttccaagtggtcaacttgaccgatgctttggcaattgaaaaagggcagaaaggcgcgggctagtgggtggatggggacaaagatctaagtcaccttcttccagcgtgtgagcctgggaggagggtgggggtcctgaggagcaagaggtacgaggaaggaaaaggagagggcttctgggttagtttccacctcctgctttccaactcacggcgctttccttccggaaaggacgctggattcagggcgcgccagtacgcgcagtagcggcccgcgagtcggcaggcgcatgtttcctttcttgagcttcaacataaacggactcaatcccactgcccactacaatgtgttcgtagaggtggtgctggcggaccccaaccactggcgcttccaggggggcaaatgggtgacctgtggcaaagccgacaataacatgcagggcaacaaaatgtatgttcacccagagtctcctaatactggttcccactggatgagacaggagatttcattcgggaaattaaaactcaccaataacaaaggcgcaaataacaacaacacccagatgatagtcttacaatccttacacaaataccaaccccgactgcatattgttgaagttacagaggatggcgtggaggacttgaatgagccctcaaagacccagacttttaccttctcagaaacgcaattcattgcagtgactgcctaccaaaacaccgatattactcaactaaagattgatcataacccctttgcaaaaggcttcagagacaactatgattccatgtacaccgcttcagaaaatgacaggttaactccatctcccacggattctcctagatcccatcagattgtccctggaggtcggtacggcgttcaatccttcttcccggagccctttgtcaacactttacctcaagcccgctattataatggcgagagaaccgtgccacagaccaacggcctcctttcaccccaacagagcgaagaggtggccaaccctccccagcggtggcttgtcacgcctgtccagcaacctgggaccaacaaactagacatcagttcctatgaatctgaatatacttctagcacattgctcccatatggcattaaatccttgccccttcagacatcccatgccctggggtattacccagacccaacctttcctgcaatggcagggtggggaggtcgaggttcttaccagaggaagatggcagctggactaccatggacctccagaacaagccccactgtgttctctgaagatcagctctccaaggagaaagtgaaagaggaaattggctcttcttggatagagacacccccttccatcaaatctctagattccaatgattcaggagtatacaccagtgcttgtaagcgaaggcggctgtctcctagcaactccagtaatgaaaattcaccctccataaagtgtgaggacattaatgctgaagagtatagtaaagacacctcaaaaggcatgggagggtattatgctttttacacaactccctaaagagttattttaacctcaaaaattagctaactttttgcagatggacttggtggtgttttttgttgtcttctttgcctaggttgccaaaaagatgtttgccttccaccttgatgcatcctgttttgtgcaattctctaaaagaaggtgccaaagctttttgattgctgcaggtaactgaaacaaacctagcatttttaaaaaataagattaatggaagactttaaggtattttaaaattcgaagggtatccaaggttctgtatttatttattggggagacactaacccttcaaagaagcaggctgtgaacattgggtgcccagtgctatcagatgagttaaaacctttgattctcatttctatttgtaaattcttaagcaaatagaagccgagtgttaaggtgttttgcttctgaaagagggctgtgccttccgtttcagaaggagacattttgctgttacattctgccaggggcaaaagatactaggcccaggagtcaagaaaagcttttgtgaaagtgatagtttcacctgactttgattccttaacccccggcttttgg

SEQ ID NO: 130028 - DNA, 2708 bp, Homo sapiens
  Payload ID: 5436
  Gene Symbol: EPX
  Gene Name: eosinophil peroxidase
  Uniprot ID: P11678
  ENST ID: ENST00000225371
  CDS Start-End: 111-2258
ggaagtgagaggtcggctgggggtcctcaaagtgagaggggagcagaggatcctcccgtgcaggctgtggatgtcactcacttcccagctggtgaagcctcgctgcagagatgcatctgctcccagccctggcaggggtcctggccacactcgtcctcgcccagccctgtgagggcactgacccagcctcccctggggcagtggagacctcggtcctgcgagactgcatagcagaggccaagttgctggtggatgctgcctacaattggacccagaagagcatcaagcagcggcttcgcagcggttcagccagccccatggacctcctgtcctacttcaaacaaccggtagcagccaccaggacagttgttcgggccgcagattatatgcatgtggctttggggctgcttgaagagaagttacaaccccagcggtccggacccttcaatgtcactgatgtgctaacagaaccacagctgcggctgctgtcccaggccagtggctgtgctctccgggaccaggccgagcgctgcagcgacaagtaccgcaccatcactggacggtgcaacaacaagaggagacccttgctaggggcctccaaccaggctctggctcgctggctgcccgccgagtatgaggatgggctgtcgctccccttcggctggacccccagcaggaggcgcaatggcttccttctccctcttgtccgggctgtctccaaccagattgtgcgcttccccaatgagagactgacctccgaccgtggccgagccctcatgttcatgcagtggggccagttcattgaccatgacctggacttctccccggagtccccggccagagtggccttcactgcaggcgttgactgtgagaggacctgcgcccagctgcccccctgctttcccatcaagatcccacccaatgacccccgcatcaagaaccagcgtgactgcatccctttcttccgctcggcaccctcatgcccccaaaacaagaacagagtccgcaaccagatcaacgcgctcacctcctttgtggacgccagcatggtgtatggcagtgaggtctccctctcgctgcggctccgcaaccggaccaactacctggggctgctggccatcaaccagcgctttcaagacaacggccgggccctgctgcccttcgacaacctgcacgatgacccctgtctcctcaccaaccgctcggcgcgcatcccctgcttcctggcaggtgacacccgatcaacggaaacccccaaactggcagccatgcacaccctctttatgcgagagcacaaccggctggccaccgagctgagacgcctgaatccccggtggaatggagacaaactgtacaatgaggctcggaagatcatgggggccatggtccagatcatcacctaccgagactttctgcccctggttctgggcaaggcccgggccaggagaaccctggggcactacagggggtactgctccaatgtggacccacgggtggccaatgtcttcaccctggccttccgctttggccacacaatgctccagcccttcatgttccgcttggacagtcagtaccgggcctccgcacccaactcgcatgtcccacttagctctgccttctttgccagctggcggatcgtgtatgaagggggcatcgaccccatcctccggggcctcatggccacccctgccaagctgaaccgtcaggatgccatgttagtggatgagctccgggaccggctgtttcggcaagtgaggaggattgggctggacctggcagctctcaacatgcaacgaagccgggaccacggccttccagggtacaatgcttggaggcgcttctgtgggctctcccagccccggaatttggcacagcttagccgggtgctgaaaaaccaggacttggcaaggaagttcctgaatttgtatggaacacctgacaacattgacatctggattggggccatcgctgagcctcttttgccgggggctcgagtggggcctcttctggcttgtctgttcgagaaccagttcagaagagcccgagacggagacaggttctggtggcagaaacgaggtgttttcaccaaaagacagcgcaaggccctgagcagaatttccttgtctcgaattatatgtgacaataccggtatcaccacggtttcaagggacatcttcagagccaacatctaccctcggggctttgtgaactgcagccgtatccccaggttgaacctatcagcctggcgagggacatgaggcttctgcaggagtctatcccaagtctccaacttttggagacaaggggaaggggaggaccatgaggctgccttgtctccctggagcaagtgcaggctgctgacgcttctgctggctacagctcagagctgggttccccagccaggagtgaaggctgggggctcctatcagcaatggaccttcccgccttgggagcctcttaggtattaggctatgaatcagcgccacgtgcaaaggcttgggagccaagccatgtggtcttgcaccccaggcaagaaaagtcagctggagggtttacagcactttctactgtttcccagccctccctcccctccctcaccatgactaagagaccactcggtcctagcctccagacaccccacaatactcctctgagcctgaggccaggcagcatgctctgcttctaccaataaagcactgctaagggca

SEQ ID NO: 130029 - DNA, 2298 bp, Homo sapiens
  Payload ID: 5437
  Gene Symbol: EID1
  Gene Name: EP300 interacting inhibitor of differentiation 1
  Uniprot ID: Q9Y6B2
  ENST ID: ENST00000530028
  CDS Start-End: 292-855
agcagcagtagggttaagtaacacagaaactgttacgctcttgcatgcagggtccctagatacgaagttcgaatcgatggaaacgtagctcaaaaggcgacgccaacaccccggagaaaacactgagctactccaaccacagtggcgcgccaagtaggaggcggtacctgaggaccacgcctgcgcgcggggttacgcaagcgcgcagcctttgcgcacgcgcacgaacgcacggccgcgcagcatctgtcttgctggaagctttttcctagaggttgagcggtttgcacaatgtcggaaatggctgagttgtccgagctgtatgaagagagcagtgacctgcagatggatgtgatgcctggcgagggtgaccttccgcagatggaggtaggcagcgggagccgggagctatccctgcgtccctcccgcagcggggcccaacagctcgaggaggaaggcccaatggaggaggaggaggcccagccaatggcggcgccagaggggaaacggagccttgctaacgggcccaacgctggggagcagccaggccaggtggcgggcgcagacttcgagagcgaggacgagggcgaggaatttgatgactgggaggacgactacgactatcccgaagaggagcagctcagtggtgccggctacagagtatcagccgctcttgaagaagccgacaagatgtttctgagaacaagagaaccagccctggatggcgggtttcagatgcattatgagaagaccccgtttgatcagttagcttttatcgaagagcttttttcactgatggttgtcaatcgtctgaccgaagaactcggctgtgatgagattattgatagagagtagttagatgctgttaaaagaggaggaaactacttgaggagggacccaactttccgctatcttttgggttcattccaaatagttttgtgccattgaaaaacttgaccttcaaaaaaatttgtttttcagaatagaacacaataggacagtgactgcacagttgtgaaaaaggaagagaatcattaaagaaaaagaaaaaagattttaagaccgttgaaatcaattatcaagaacgtcctaaaacacctatggctttgactttgttattgatccagattattttccttgcattggggaaaatatctttcatatttgtttgctgtaaagatggttttgcaagaataagtcatgaccaagacaaactgccaatacaaaagcccactgatactaattatataatgagaaaaaaatgtatccaactaggacacatatcttttgagttatttggactgaaagcttaagaaaacttggaaaattctattttgtgatctagtcaagccacagttatcaaaggctacattttcagtgtaagataaatggatgagtaaactcaaatatgtatcacgtgtgctttgtatcttaagatgtgtttccaagagcatctgaaattttgtttgtacatgtatcttgatcatttataaagccactgtgatctataaatcaagaaaatccattgtcataaccatttttaaaagtcaaaaattaagacatccttaattaaaaagtttcaaatctagacactaaatgtgtgtgaatgtacaaagaaaacaaaccattgcttatgctgttatatactagagaaattttgttttgcttgctgttttaacttgacagatgaaggactttagttgaacttcatattgtaagaactgttaataaaagttgtcaagtaaaaagcgctatatctaaaaagactttatgaacagttattctatcaacttttaaaggttttaaacctgcccagaaattaccttggtatctgaagtttccctctgtctcctcctctaattaagcttgttatttgtcatgcaccagcattggagataataaaatttcttgttctgtgtattttgtttggctaatagtattgcatacatactttctctgtatactactttctattgtatgtgttaaccagtattaagggaaaatgatccagcttcagctatctaattcacaaattaatttctggaaattaaactttgtaaattaagtttttgcctataagaatttgctggtctgggaaaacctgccctatcaatgagtatgttgccgtggttaccttactaagatgctgaagttctaggagagtaatgattacatcagaaggctaggttcagcaaaataagtgtatcagcaggttttatcatgatcagtaaaaatgttccaaatgcttctgctccattatagcagtaaagaacgaatatccaatgcaacaggacaatt

SEQ ID NO: 130030 - DNA, 584 bp, Homo sapiens
  Payload ID: 5437
  Gene Symbol: EID1
  Gene Name: EP300 interacting inhibitor of differentiation 1
  ENST ID: ENST00000560490
  CDS Start-End: 42-539
cttgctggaagctttttcctagaggttgagcggtttgcacaatgtcggaaatggctgagttgtccgagctgtatgaagagagcagtgacctgcagatggatgtgatgcctggcgagggtgaccttccgcagatggaggaaggcccaatggaggaggaggaggcccagccaatggcggcgccagaggggaaacggagccttgctaacgggcccaacgctggggagcagccaggccaggtggcgggcgcagacttcgagagcgaggacgagggcgaggaatttgatgactgggaggacgactacgactatcccgaagaggagcagctcagtggtgccggctacagagtatcagccgctcttgaagaagccgacaagatgtttctgagaacaagagaaccagccctggatggcgggtttcagatgcattatgagaagaccccgtttgatcagttagcttttatcgaagagcttttttcactgatggttgtcaatcgtctgaccgaagaactcggctgtgatgagattattgatagagagtagttagatgctgttaaaagaggaggaaactacttgaggagggaccca

SEQ ID NO: 130031 - DNA, 1981 bp, Homo sapiens
  Payload ID: 5438
  Gene Symbol: EID2
  Gene Name: EP300 interacting inhibitor of differentiation 2
  Uniprot ID: Q8N6I1
  ENST ID: ENST00000390658
  CDS Start-End: 152-862
gtaagaatctatgctctcgcgcccggttacgcacactgcatttacagcgcgcatagcgcccacgcacgcgcactggggtgtccgccgggcatcgctctgtccagttattccagtttctctgggagcagccgagttgaccccacggtctgagatgtccaagctgcccgcagacagcagtgtcccgcagacaggcgcggcgaatggtgacagagacgtcccgcaggcggaggtaggccgcgggaggcgggagccggccccggcacagcctgaggaggccggggaaggcgcgatggcggcggccaggggaggcccggtgccggcggccagggaaggtcggatggcggcggccagggcagccccggcggcggcagccaggggagccccggtggcagcggcggcgttggccagggcagccgcggcgggcagggaaagcccggcggcggcggcggccagggaagcccggatggcggaggtcgcccgcttgctgggggagccagtggacgaagagggtcccgagggcaggcccaggtccagacacgggaacggaggcctggctgcgttgccctatctccgtctccgccacccacttagcgttttaggcatcaattaccagcagtttctccgccactatctggaaaattacccgattgctcccggcagaatacaagagcttgaagaacgccgcaggcgattcgtggaagcctgcagagcaagggaagcagcgtttgatgccgaatatcagcgaaatcctcacagggtggacctcgatattttaacctttacgatagctctgactgcctctgaagttatcaaccctctgatagaagaacttggttgcgataagtttatcaatagagaatagttatgtggtgacactacttcaagagaacctctgcattccagtcataccaatcctgcaacttgattttcagaagtcaagagtatatcgcgataagacagtgcacaggtggaggggaaaaaaagggggagggggaagcttatcttgaaaaagcatcacagaagtagaaaaaaatgtcgaaagcattataactgtaacgttctttgagtttgtgattgatccacatttttccccctgcattatggaaaatgtctctcagcattgctttattacaaagtaaaggatggttttataaaattgagactgatgaaacatcaatactagagcccatgaggatgaaagaaattatcaaatagtgctgaacagaataagatgttaacgctgagttattaggactggaaggctatgaaaagaacttgaaattgtcggaatatgtgctctcttcatgtcatattcaatagaagtttctagtttaagattgattttgtgttttcttaggcatttcaagtgacaagcaaagtaaatgtatatattatgtgataaatcatgttttcaagaacgtcaaatttctggacttttttctttcaatttttaatttttaaagtttttttggtattaaaaaatctattcacaagccaaaaaatatataaaatatacagcgaaaagccttccattcttgttttcctccatccagtaccaacgatgacctctaatagccacagtttcctttccgtccttctagtttccttacgtgtacacaggcacatataaatctgggtttacttgttttatttcttcacagaagtcggcatattatatttactggtttatacattgctttctcattaagaacatatgttgacccttccaaaccactgtatttcctcattattttttaaagtggcattttattccattctgaggttatgtccaaatttacttaaccagggatatattgacggacatttaggttgtttcccatctctttctttgggcagaataaaaaattgctagagtagttcatcttgtacaattgctagagtagttcatcttgtatatcatgtggcatgtgcacaaatatagtattgcttcaattcaaaattcacttcatatttgaacatc

SEQ ID NO: 130032 - DNA, 1865 bp, Homo sapiens
  Payload ID: 5439
  Gene Symbol: EID2B
  Gene Name: EP300 interacting inhibitor of differentiation 2B
  Uniprot ID: Q96D98
  ENST ID: ENST00000326282
  CDS Start-End: 53-538
gcatacagcagtgcagtgccgttattccagtctccgtagaaacgctgggactatggcggagccgactgggctgttggagatgtccgagctccccggagatagcagtgtcccacaggtgggcaccgcgagtggcgtcagcgacgtactgcggggggcagtcggcggcggggttcgggtgcaggaggctcgggaaggcccagtggccgaagctgcgcggtccatggcgcggatgccgggccctgtgcccgggcccatccccagcagcgtcccgggcctggcctccgcgccagacccccatcagcagctcgctttcttagaaattaaccggcagctgttgttccgcgagtatctggatggtagctccatgattccggtcagattactacgggatttcgaggaacgccgcaggctgtttgtggaaggctgcaaggcgagggaagcagcctttgacgcggatcccccgcagatggacttcgctgctgtcgcgtttacggtagcgctgactgcctccgaggccctcagtcctctggccgactgagtcggctgtgatgatgacattggtggcaaggaatagccaagtgacccttttgggatcaaaagaacaggcaggctgtgccagtttagttaactcagtcattagggggaatgcaaactggaagggaatacggcaatgtgcaattgaaggaggaagcacactccgaaatggaaacagacaagactgttgaatcttgttttctttcttcttttttagtattatttaaatagagaagggagtctcgcatccctaggctggtcccgaacgcttggacccgagcgatcctcccgcttcggcctcccaaagtgctgggattactttacaggcgtgagccaccgcgcccggccgaatcttgttttcaaacaggtcccaagacacttctgacttagcactttgttagcaatgcattttcctgcatttgtgaagaatccttcatgactttcaccataaaggatggttttgcaaagatatgagaaaaaaaaaatgccaataacagaacccatagaaatgaacctaagtgatgaaagaaaacaaagaaatagagttgtcaggaatccaggtgtacctgagttactaggattggaaggctattgagaggactttgaaatttcacaatttgtggtcatgtcaacaaatcctagtgtaagattcatatttgtgttttctgaggtactttagatgaacagtaaatattcaatagaaaaaaccacgtattatatgatcagtgttttcaagtctatgtgaaattgggtaggtgtggaataaacttgttttttgttaattttaagctttttattttattctagaatatgtattctattcacaagactcaacaaaaaaaagtatcggccgggcgcactggcttacgcctgtaatcccagcactttgggaggccacggcgggtggatcacctgaggtcaggaattcaagaccaccctggccaacatggtgaaaccccatctctacgaaaaataaaaaattaactgggtgtggtggcacgcgcttgtagtcccagctactcgggaggctgaggcaggagaatcacttgaacctgggaggcggaggttgcagtaagccgagatcacgccactgcactccagcctggtcaacagagtgggactccgtctcaaaaaaaagaaaaaaagtatcaaaagatgctgtgagaaatctctcttgttgctgtcctttgccaaactcagaactattccatgcaggtgccattgcttgtggcttggagttttgttgttgttttcttggttttgcttgttttttgctttttcactgtacgcctttcaggttttctaatgcatatgcaaataaacatcaatct

SEQ ID NO: 130033 - DNA, 1464 bp, Homo sapiens
  Payload ID: 5440
  Gene Symbol: EID3
  Gene Name: EP300 interacting inhibitor of differentiation 3
  Uniprot ID: Q8N140
  ENST ID: ENST00000527879
  CDS Start-End: 197-1198
atgggcgggcgtcctcggctctaactgccgccactttccacacgctgggagggccgttacctcagagatacccgtggccggcatgttggttgaaaaagcttcccggaagggagacgaagagaaaggagaggagcagctcgtgatcatccccggtagcgagtacgcggcgaagtaggcggcggcggagggagcgctgatgaagatggatgtgtcagtgagggccgcgggctgctccgacgacctcagctctggggaggccgacgtagacccaaagctcctggagctcaccgctgacgaggagaagtgccgcagcatccgcaggcagtaccggcagctcatgtactgcgtgcggcagaaccgggaggacatcgtgagctcggcgaacaactccttaaccgaggctctggaggaagccaacgtcctctttgatggcgtgagccgaaccagagaagcagccctcgacgcccggtttcttgttatggcttctgatttgggtaaagaaaaggcaaagcagttaaactcagatatgaacttctttaatcagttagcattttgtgactttctgtttctgttcgtgggtctgaattggatggaaggcgatcctgacaagttgagtgattgtgatgatagcatagctctttccttctggaaggcaatagaaaaggaagcaacatcctggatggtaaaagctgagacattccattttgtttttggttcattcaagctagaacgttctgcaccaaagccccgacttgaacaccagaaaaaagttcgcaagatggaagaaaatggcaacatgcctacaaagttgcagaagttggacctgagtagttatccagaagcgacagaaaaaaacgtagaaaggattttgggattgttgcaaacctactttcgaaagtatcctgatactcctgtgtcctattttgagtttgtgattgatccaaactctttttctcgtactgtggagaatatattttatgtttcttttattgtaagagatggttttgcaagaataaggcttgatgaagacaggctgccaatattagagccgatgaatgttaaccaaatgggtgagggaaatgattccagttgccatggcaggaaacagggagttatatctttgactttacaggagtggaaaaacattgtggcagcttttgaaatttctgaggctatgattacatactcctcatactaaagatttcttagtatagcatcctttttgtgttttttttctgaagttagatggagagtaaaatgtaaactgaagcacatattgtatctcttgtaaagtgaaaaagtattttcaagaacatcagacattgttttactgtgcagcatatttttcttagtaatttataaggtcatgatcttctgttattaaaacaaattcactggcatatttatgggaacgttttattgaatgccctttaagactattaataaaaacaagttttggatacc

SEQ ID NO: 130034 - DNA, 2741 bp, Homo sapiens
  Payload ID: 5441
  Gene Symbol: EP400NL
  Gene Name: EP400 N-terminal like
  Uniprot ID: Q6ZTU2
  ENST ID: ENST00000332441
  CDS Start-End: 318-1610
tttaagctaatttttttcttatttctaaagcaaaacaaaacccaaactcattgtaatcctctttggaattgcattacatgtatatgttcagttgtgaaggcatgacattttatgatagtaaatcttattctggaacatggtatgttgcttcattttattcgtgtttttttgagacggagttttgcttttattgcccaggctggagtgtagtggcgcaatcttggatcaccacaacctccgtctcccaggttcaagcgattctcccgcctcagcctcctgagtagcaattacagggagcatttcctgaagacgtagtcatgcagcacgtcagcagctcccagagcagccagcgccatgtccagtggcctggggcctgccccggcgcgggcgaggagcagccagcgtgctcccagccgtccctgcccctcacactgccatcccccagccaccaactacagcagctgatgcaggtccagacccagagtcccacgcagcccagtccggggccggggcaggccttgcagaatgtgcgtgcaggtgcccctggccctgggctgggcctctgcagcagcagccctacaggggacttcgtggatgccagcgtgctggtgaggcagatcagcttgagcccctccagtggtggacactttgtgtttcaggatgggtcagggctcacccagatcgcccagggagcccaggttcagctccagcacccgggtacgcccatcacagtccgagagcggagaccctcccagccccacacacagtcagggggcaccatccaccacctgggaccccagagccctgcagccgcgggtggggccggcctgcagcccctggccagcccaagccacatcaccacggctaacttgccaccgcagatcagcagcatcatccagggccagctggttcagcagcagcaggtgctgcaggggccgccgctgccccggcccctgggcttcgagaggacgcccggcgtgctgctccccggggctgggggcgcagcggggtttgggatgacgtccccacccccgcccaccagcccttccaggactgccgtgcccccaggcctttccagcctcccactcacgtctgtggggaacacgggaatgaagaaggttcccaagaagttagaggagattcccccagcctctccggagatggcacagatgaggaagcagtgcctggactatcatcaccaggagatgcaggctctgaaggaggtcttcaaggagtatttgattgaactgtttttcttgcaacactttcaagggaacatgatggatttcttagctttcaaggagagactgtatggaccattacaagcatatcttaggcagaatgatttggacattgaagaagaggaagaggagcactttgaagtcattaatgatgaggtaaaggttgtggccagaaagcacgggcagcctgggactcctgttgccatagcaacccagctaccgccgaggacttctgcggcttttccagcccagcagcagccgctccagcccctggcacccaccactgtactgtctgtctctgcggattggaatgcacttctccagcgacctaacaaatacatatggggactccagtacctggagatgtgaattccataaaaatggaagcatctaagaggcagtgaacactggcgcccacaggagaaccaggtgcatcagcgcattgcggagctgaggaaagcaggtctgtggtcccagaggcgtctgctgaagctgcaggaggcccacgacccaagtcccactgggactatctgctggaggagatgcagtggatggccacagactttgcccaggagaggtggaaggtggcctctgtgaagaagatggtcagagctgtggcccggcagctgcaggacaggacgcgcagggaggccggggccaggagggaggagccgagcaggctgaggcagacgtcacctgtactaccagagaaatcgagcgtccctggtctagtactgcgcaggtaaagattccagcatcttggaagcaagtgctccactggaaaataaaagccacgtggagcacttgattagactccagaaacagaaactgcagctgctcccaccacccccaccaccacaggccctgcccggggcacagccaaccacacaagtgcaagtgcagccgtcacccgcctaccacagcagagcccccagctcaccacagtcacggccccgagacccagagccctgttgatgggcaccaccatggccaacctccaggtagcccggcttactcgagtttccacctcccacctgcaaggcccaagactgacgtcagcgctgacgtaccagatggcccaggttgctgtggccacgccccctgtggtgtctgtcctggcagttgtggtgctgtcagccagggtcacagtgcttccatcaacgcaacgggatcagtgttgtgataaggcagctgcaaaaagcggcaggtaggcagccaccttcgcctcaccaaactcgaaacaactcacttgagtgagttgcatcaaacctttctaaatttctcattctagaagttgctgagttgttctgccatgtgttaacttttttttcttatcagtaaaatcttttatttggtttatatttcaaatgtaatttaaaaagtctataagacaggaaattcgataatatgaaagcagggagaaactaagtcgcaccatttagctaagctcagggacaacgttcatttataataaatcaaacatttgatttttttcatgcc

SEQ ID NO: 130035 - DNA, 1726 bp, Homo sapiens
  Payload ID: 5441
  Gene Symbol: EP400NL
  Gene Name: EP400 N-terminal like
  ENST ID: ENST00000389560
  CDS Start-End: 322-1581
gtagtggcctcgccgcccggtccgctgtcgcagcgctcatccgcgccgggagcccttggctgcgtcgcccggcagccgcggctggagtgtagtggcgcaatcttggatcaccacaacctccgtctcccaggttcaagcgattctcccgcctcagcctcctgagtagcaattacaggccgagtctcactctgtcgcccaggatggagtgcagtggcgcaatgtcggcttactgcaacctctgcctcccaggttcaagcgattctcctgcctcagcctccagagtacctgggattacagggagcatttcctgaagacgtagtcatgcagcacgtcagcagctcccagagcagccagcgccatgtccagtggcctggggcctgccccggcgcgggcgaggagcagccagcgtgctcccagccgtccctgcccctcacactgccatcccccagccaccaactacagcagctgatggtccagacccagagtcccacgcagcccagtccggggccggggcaggccttgcagaatgtgcgtgcaggtgcccctggccctgggctgggcctctgcagcagcagccctacaggggacttcgtggatgccagcgtgctggtgaggcagatcagcttgagcccctccagtggtggacactttgtgtttcaggatgggtcagggctcacccagatcgcccagggagcccaggttcagctccagcacccgggtacgcccatcacagtccgagagcggagaccctcccagccccacacacagtcagggggcaccatccaccacctgggaccccagagccctgcagccgcgggtggggccggcctgcagcccctggccagcccaagccacatcaccacggctaacttgccaccgcagatcagcagcatcatccagggccagctggttcagcagcagcaggtgctgcaggggccgccgctgccccggcccctgggcttcgagaggacgcccggcgtgctgctccccggggctgggggcgcagcggggtttgggatgacgtccccacccccgcccaccagcccttccaggactgccgtgcccccaggcctttccagcctcccactcacgtctgtggggaacacgggaatgaagaaggttcccaagaagttagaggagattcccccagcctctccggagatggcacagatgaggaagcagtgcctggactatcatcaccaggagatgcaggctctgaaggaggtcttcaaggagtatttgattgaactgtttttcttgcaacactttcaagggaacatgatggatttcttagctttcaaggagagactgtatggaccattacaagcatatcttaggcagaatgatttggacattgaagaagaggaagaggagcactttgaagtcattaatgatgaggtaaaggttgtggccagaaagcacgggcagcctgggactcctgttgccatagcaacccagctaccgccgaggacttctgcggcttttccagcccagcagcagccgctccaggtactttctgatggctccacagtgcagctccccagactttcctcactcggatttgaggactcgatgtgctgaggcaggacccagaggggtcccaagagcctgtcctcttttgttcaaaatacatcttgaaacgtctttgtgaaggctcttagttttaatgcatggatgctgttatttttccctactgttactgaaattaaaaagtgtttgtctctga

SEQ ID NO: 130036 - DNA, 2172 bp, Homo sapiens
  Payload ID: 5441
  Gene Symbol: EP400NL
  Gene Name: EP400 N-terminal like
  Uniprot ID: Q6ZTU2
  ENST ID: ENST00000392352
  CDS Start-End: 957-2027
acatccgccggttaccctcgaggctccccggccgcgcgctcccctctctccgtcccatcacccggtgaccccggctgagcgaacgcccacccctccctcagggaccccctccccgtgacacgatcccccgtgaacgcccacctccctcagtgaacactcccccgtgacatgaccccccgcaaacgcccacccatccctcggtgaccctgcgcccgtgagcgcccacccctccccctgcgacccctccccccgccacctggcaactgccgttttcccgccttccctcctccgccccctctcccgcatcaccccgttttctggtgaccgctcccccccatcccgtgacacaaacccccgacctcccagcccttccccggtgacacgatccctgtgaccgtctggcccggtaaccgcccctcccctcatgacccttcacccagtcccctggtgcccacccccgtcactgccgcccgcctggttccagcctcgcgagaccgctgtctacggcgctgacgccgcctctgcctcttgaccccttggccccgctgtcctgatccctgaggtcggggcctggtctgcactccaggaaagacgagtgcgcttagtgtgcgctgcacgtgagcagtgaagttgattccacgcgctgcgctgctcggcagctgtcccagaactgaccacggacccctccgcgggtcctgctcctgacaagggccttccggcactgggagttttgtgttagtggaaaggaagaatctaataataccaccacctttacagtaaagacgctgcgaattgacgccttttataataaagacacttatcttgcccaagagctgggctggagtgtagtggcgcaatcttggatcaccacaacctccgtctcccaggttcaagcgattctcccgcctcagcctcctgagtagcaattacagggagcatttcctgaagacgtagtcatgcagcacgtcagcagctcccagagcagccagcgccatgtccagtggcctggggcctgccccggcgcgggcgaggagcagccagcgtgctcccagccgtccctgcccctcacactgccatcccccagccaccaactacagcagctgatggatgggtcagggctcacccagatcgcccagggagcccaggttcagctccagcacccgggtacgcccatcacagtccgagagcggagaccctcccagccccacacacagtcagggggcaccatccaccacctgggaccccagagccctgcagccgcgggtggggccggcctgcagcccctggccagcccaagccacatcaccacggctaacttgccaccgcagatcagcagcatcatccagggccagctggttcagcagcagcaggtgctgcaggggccgccgctgccccggcccctgggcttcgagaggacgcccggcgtgctgctccccggggctgggggcgcagcggggtttgggatgacgtccccacccccgcccaccagcccttccaggactgccgtgcccccaggcctttccagcctcccactcacgtctgtggggaacacgggaatgaagaaggttcccaagaagttagaggagattcccccagcctctccggagatggcacagatgaggaagcagtgcctggactatcatcaccaggagatgcaggctctgaaggaggtcttcaaggagtatttgattgaactgtttttcttgcaacactttcaagggaacatgatggatttcttagctttcaaggagagactgtatggaccattacaagcatatcttaggcagaatgatttggacattgaagaagaggaagaggagcactttgaagtcattaatgatgaggtaaaggttgtggccagaaagcacgggcagcctgggactcctgttgccatagcaacccagctaccgccgaggacttctgcggcttttccagcccagcagcagccgctccaggtactttctgatggctccacagtgcagctccccagactttcctcactcggatttgaggactcgatgtgctgaggcaggacccagaggggtcccaagagcctgtcctcttttgttcaaaatacatcttgaaacgtctttgtgaaggctcttagttttaatgcatggatgctgttatttttccctactgttactgaaattaaaaagtgtttgtctctga

SEQ ID NO: 130037 - DNA, 945 bp, Homo sapiens
  Payload ID: 5441
  Gene Symbol: EP400NL
  Gene Name: EP400 N-terminal like
  ENST ID: ENST00000407361
  CDS Start-End: 293-945
cctggtctgcactccaggaaagacgagtgcgcttagtgtgcgctgcacgtgagcagtgaagttgattccacgcgctgcgctgctcggcagctgtcccagaactgaccacggacccctccgcgggtcctgctcctgacaagggccttccggcactgggagttttgtgttagtggaaaggaagaatctaataataccaccacctttacagtaaagacgctgcgaattgacgccttttataataaagacacttatcttgcccaagagctggggagcatttcctgaagacgtagtcatgcagcacgtcagcagctcccagagcagccagcgccatgtccagtggcctggggcctgccccggcgcgggcgaggagcagccagcgtgctcccagccgtccctgcccctcacactgccatcccccagccaccaactacagcagctgatggatgggtcagggctcacccagatcgcccagggagcccaggttcagctccagcacccgggtacgcccatcacagtccgagagcggagaccctcccagccccacacacagtcagggggcaccatccaccacctgggaccccagagccctgcagccgcgggtggggccggcctgcagcccctggccagcccaagccacatcaccacggctaacttgccaccgcagatcagcagcatcatccagggccagctggttcagcagcagcaggtgctgcaggggccgccgctgccccggcccctgggcttcgagaggacgcccggcgtgctgctccccggggctgggggcgcagcggggtttgggatgacgtccccacccccgcccaccagcccttccaggactgccgtgcccccaggcctttccagcctcccactcacgtctgtggggaacacgggaatgaagaaggttcccaagaagttagaggagattcccccagcctctccggagat

SEQ ID NO: 130038 - DNA, 3697 bp, Homo sapiens
  Payload ID: 5441
  Gene Symbol: EP400NL
  Gene Name: EP400 N-terminal like
  Uniprot ID: Q6ZTU2
  ENST ID: ENST00000446190
  CDS Start-End: 237-1703
gcactggctccgcgtcggccggtcggtttggtcggttgtagtggcctcgccgcccggtccgctgtcgcagcgctcatccgcgccgggagcccttggctgcgtcgcccggcagccgcggctggagtgtagtggcgcaatcttggatcaccacaacctccgtctcccaggttcaagcgattctcccgcctcagcctcctgagtagcaattacagggagcatttcctgaagacgtagtcatgcagcacgtcagcagctcccagagcagccagcgccatgtccagtggcctggggcctgccccggcgcgggcgaggagcagccagcgtgctcccagccgtccctgcccctcacactgccatcccccagccaccaactacagcagctgatggtgagagggggccctgcgggtgggcagaacatgaatgttgacctgcagggcgtgggccctgggctccagggaagcccacaggtcacgctggccccactgccgctccccagccccacctctccaggcttccagttcagcgctcagcctcggcggtttgagcatgggtctccatcatacattcaggtcacgtcccccttgtcccagcaggtccagacccagagtcccacgcagcccagtccggggccggggcaggccttgcagaatgtgcgtgcaggtgcccctggccctgggctgggcctctgcagcagcagccctacaggggacttcgtggatgccagcgtgctggtgaggcagatcagcttgagcccctccagtggtggacactttgtgtttcaggatgggtcagggctcacccagatcgcccagggagcccaggttcagctccagcacccgggtacgcccatcacagtccgagagcggagaccctcccagccccacacacagtcagggggcaccatccaccacctgggaccccagagccctgcagccgcgggtggggccggcctgcagcccctggccagcccaagccacatcaccacggctaacttgccaccgcagatcagcagcatcatccagggccagctggttcagcagcagcaggtgctgcaggggccgccgctgccccggcccctgggcttcgagaggacgcccggcgtgctgctccccggggctgggggcgcagcggggtttgggatgacgtccccacccccgcccaccagcccttccaggactgccgtgcccccaggcctttccagcctcccactcacgtctgtggggaacacgggaatgaagaaggttcccaagaagttagaggagattcccccagcctctccggagatggcacagatgaggaagcagtgcctggactatcatcaccaggagatgcaggctctgaaggaggtcttcaaggagtatttgattgaactgtttttcttgcaacactttcaagggaacatgatggatttcttagctttcaaggagagactgtatggaccattacaagcatatcttaggcagaatgatttggacattgaagaagaggaagaggagcactttgaagtcattaatgatgaggtaaaggttgtggccagaaagcacgggcagcctgggactcctgttgccatagcaacccagctaccgccgaggacttctgcggcttttccagcccagcagcagccgctccagcaaatacatatggggactccagtacctggagatgtgaattccataaaaatggaagcatctaagaggcagtgaacactggcgcccacaggagaaccaggtgcatcagcgcattgcggagctgaggaaagcaggtctgtggtcccagaggcgtctgctgaagctgcaggaggcccacgacccaagtcccactgggactatctgctggaggagatgcagtggatggccacagactttgcccaggagaggtggaaggtggcctctgtgaagaagatggtcagagctgtggcccggcagctgcaggacaggacgcgcagggaggccggggccaggagggaggagccgagcaggctgaggcagacgtcacctgtactaccagagaaatcgagcgtccctggtctagtactgcgcaggtaaagattccagcatcttggaagcaagtgctccactggaaaataaaagccacgtggtgagtgttttctttgtgatatcagaacttcatgttccgggtgaggggcttcagggtgcccgtgtccttgccggggggctccggtctccagtctcctcagcatttccctctggtctccctccagagaggacagatctactcacgatctttgggaccacccagaaagggtcaatttcaaaatcgaattttctcaggatgacttcaaatcaaaacagaaacgtgtggtcttgcctttggtttttccgcccaaactgccttttggctttgccgtgtggggaccgggcacctcgactgtcctctgtgtcctgtgatggggcaggttacgccatgtctgatcagtaggacagcgtcccttgggttcataccctttatctgcagttctaaaactctgaaagctcagacagcagaaaggttttgcccactcagtgttgctcactcattttgcagcaaacctgacccacaccgaggccaggccagccccgcggtcctggtgggtgagtgtgtctgggtgctattgctgtggaaacgtcggcgtgtttggtcatggctgccagatgccgtccctaacactttcccatgcttatttgacttatgtcattaccttacttctctgaaacagtctgaattccaaaccctgtgtggccctaaggattttggataagggactatgtacctataatataaataagccatattatttacaatcatgagtttctgaatgttcactttttttatttttggagacagagtcttgttctgtcacccaggctttagagtaccacagtgtgatctcggctcaccgcagcctccgcctcctgggttcaagcgattctcctgccttagcctcctcggtagctgggactacgggcatgagccaccagatccaactaattttttgtatttttagtagagacggggtttcaccatgttggccaggctggtcttgagctcctgatctcaggtgatctgcccgtctcaccctcccaaagggctgggattacaggtgtgagccactgtgcccagccagaatattcacttctaaatgtgggtgtgtattcaggtgacttgggattaaaaaaaaaagaaaaaacccttatgggattttatatttagaagttctgttgttgaaatatgaacctgtatctgttgttgcagtggcagaaggctgcagcacaatgaatgattattgtgaaagctggtaattttgtgcccacaaataattgtcaagaactttctaataataaaatacagaaatagattaatagttgctacaaacataaagagagactccatggtagaacactttaggaagcacattttatcttttttgaaccaacatgtatttccaaacatgtaagtaataatatcaagcgtggtgggaagattggattggaggctgattctgatctgtgtgttgggatgaactgtggcattcacagcattgagcaaaatcatcttcaaggacagcgtttaattctgttgttgacaagtcttttaagaaaaagtactagtttgggaatttttcacagatacaaataagcttgacccctaaatttaaaatattatttaaaaaataaaatgtcagatttattcatctgtc

SEQ ID NO: 130039 - DNA, 781 bp, Homo sapiens
  Payload ID: 5441
  Gene Symbol: EP400NL
  Gene Name: EP400 N-terminal like
  ENST ID: ENST00000454179
  CDS Start-End: 112-781
gtcggttgtagtggcctcgccgcccggtccgctgtcgcagcgctcatccgcgccgggagcccttggctgcgtcgcccggcagccgcgggagcatttcctgaagacgtagtcatgcagcacgtcagcagctcccagagcagccagcgccatgtccagtggcctggggcctgccccggcgcgggcgaggagcagccagcgtgctcccagccgtccctgcccctcacactgccatcccccagccaccaactacagcagctgatggtccagacccagagtcccacgcagcccagtccggggccggggcaggccttgcagaatgtgcgtgcaggtgcccctggccctgggctgggcctctgcagcagcagccctacaggggacttcgtggatgccagcgtgctggtgaggcagatcagcttgagcccctccagtggtggacactttgtgtttcaggatgggtcagggctcacccagatcgcccagggagcccaggttcagctccagcacccgggtacgcccatcacagtccgagagcggagaccctcccagccccacacacagtcagggggcaccatccaccacctgggaccccagagccctgcagccgcgggtggggccggcctgcagcccctggccagcccaagccacatcaccacggctaacttgccaccgcagatcagcagcatcatccagggccagctggttcagcagcagcaggtgctgcaggggccgccgctgccccggcccctgggcttcgagaggacgcccggcgtgctgctccccg

SEQ ID NO: 130040 - DNA, 1756 bp, Homo sapiens
  Payload ID: 5441
  Gene Symbol: EP400NL
  Gene Name: EP400 N-terminal like
  Uniprot ID: Q6ZTU2
  ENST ID: ENST00000443539
  CDS Start-End: 542-1612
gccgcccggtccgctgtcgcagcgctcatccgcgccgggagcccttggctgcgtcgcccggcagccgcgcctcgcgagaccgctgtctacggcgctgacgccgcctctgcctcttgaccccttggccccgctgtcctgatccctgaggtcggggcctggtctgcactccaggaaagacgagtgcgcttagtgtgcgctgcacgtgagcagtgaagttgattccacgcgctgcgctgctcggcagctgtcccagaactgaccacggacccctccgcgggtcctgctcctgacaagggccttccggcactgggagttttgtgttagtggaaaggaagaatctaataataccaccacctttacagtaaagacgctgcgaattgacgccttttataataaagacacttatcttgcccaagagctgggctggagtgtagtggcgcaatcttggatcaccacaacctccgtctcccaggttcaagcgattctcccgcctcagcctcctgagtagcaattacagggagcatttcctgaagacgtagtcatgcagcacgtcagcagctcccagagcagccagcgccatgtccagtggcctggggcctgccccggcgcgggcgaggagcagccagcgtgctcccagccgtccctgcccctcacactgccatcccccagccaccaactacagcagctgatggatgggtcagggctcacccagatcgcccagggagcccaggttcagctccagcacccgggtacgcccatcacagtccgagagcggagaccctcccagccccacacacagtcagggggcaccatccaccacctgggaccccagagccctgcagccgcgggtggggccggcctgcagcccctggccagcccaagccacatcaccacggctaacttgccaccgcagatcagcagcatcatccagggccagctggttcagcagcagcaggtgctgcaggggccgccgctgccccggcccctgggcttcgagaggacgcccggcgtgctgctccccggggctgggggcgcagcggggtttgggatgacgtccccacccccgcccaccagcccttccaggactgccgtgcccccaggcctttccagcctcccactcacgtctgtggggaacacgggaatgaagaaggttcccaagaagttagaggagattcccccagcctctccggagatggcacagatgaggaagcagtgcctggactatcatcaccaggagatgcaggctctgaaggaggtcttcaaggagtatttgattgaactgtttttcttgcaacactttcaagggaacatgatggatttcttagctttcaaggagagactgtatggaccattacaagcatatcttaggcagaatgatttggacattgaagaagaggaagaggagcactttgaagtcattaatgatgaggtaaaggttgtggccagaaagcacgggcagcctgggactcctgttgccatagcaacccagctaccgccgaggacttctgcggcttttccagcccagcagcagccgctccaggtactttctgatggctccacagtgcagctccccagactttcctcactcggatttgaggactcgatgtgctgaggcaggacccagaggggtcccaagagcctgtcctcttttgttcaaaatacatcttgaaacgtctttgtgaaggctcttagttttaatgcatggatgctgttatttttccctactgttactgaaattaaaaagtgtttgtctctg

SEQ ID NO: 130041 - DNA, 583 bp, Homo sapiens
  Payload ID: 5441
  Gene Symbol: EP400NL
  Gene Name: EP400 N-terminal like
  ENST ID: ENST00000539205
  CDS Start-End: 116-583
gaagaatctaataataccaccacctttacagtaaagacgctgcgaattgacgccttttataataaagacacttatcttgcccaagagctggggagcatttcctgaagacgtagtcatgcagcacgtcagcagctcccagagcagccagcgccatgtccagtggcctggggcctgccccggcgcgggcgaggagcagccagcgtgctcccagccgtccctgcccctcacactgccatcccccagccaccaactacagcagctgatggtccagacccagagtcccacgcagcccagtccggggccggggcaggccttgcagaatgtgcgtgcaggtgcccctggccctgggctgggcctctgcagcagcagccctacaggggacttcgtggatgccagcgtgctggtgaggcagatcagcttgagcccctccagtggtggacactttgtgtttcaggatgggtcagggctcacccagatcgcccagggagcccaggttcagctccagcacccgggtacgcccatcacagtccgagagcggagaccctcccagccccacacacagtcagggggcaccatccaccac

SEQ ID NO: 130042 - DNA, 2599 bp, Homo sapiens
  Payload ID: 5442
  Gene Symbol: EPDR1
  Gene Name: ependymin related 1
  Uniprot ID: Q9UM22
  ENST ID: ENST00000199448
  CDS Start-End: 380-1054
tcccccctcttaaaacacgatgcctcccaggatgctagtggcaccactgccactgcatttcctgttggcagcagtgagcagtgaaaaccgaagcggcagaaggcagtggcagcaggcagtggcagcaggcagtggcccaggcagaaatagctcccgcgcgattcactggagccttccccgggccctggtcccggctaccgggactcgcgcgtccggatctcaaaagcggcagaggccaccgaagggacaggaagcactttggtccagaccacactcccggcacagtgcggaaagagccggcgggagccactctgatcccggacgcctcagcgcccccttgggcttgggcttgccctcgggccggggaaggctgaccgcgatgccaggacgcgctcccctccgcaccgtcccgggcgccctgggtgcctggctgctgggcggcctctgggcctggaccctgtgcggcctgtgcagcctgggggcggtgggagccccgcgcccgtgccaggcgccgcagcagtgggaggggcgccaggttatgtaccagcaaagtagcgggcgcaacagccgcgccctgctctcctacgacgggctcaaccagcgcgtgcgggtgctggacgagaggaaggcgctgatcccctgcaagagattatttgaatatattttgctgtataaggatggagtgatgtttcagattgaccaagccaccaagcagtgctcaaagatgaccctgacacagccctgggatcctcttgacattcctcaaaactccacctttgaagaccagtactccatcggggggcctcaggagcagatcaccgtccaggagtggtcggacagaaagtcagctagatcctatgaaacctggattggcatctatacagtcaaggattgctatcctgtccaggaaacctttaccataaactacagtgtgatattgtctacgcggttttttgacatccagctgggtattaaagacccctcggtgtttacccctccaagcacgtgccagatggcccaactggagaagatgagcgaagactgctcctggtgagcctgtgcatagggaagcggcagcatcggatgtcagccccctgcggccccagctggagatggatatgagactagtcaagatgtgaatgctaattggagagaaatataattttaggaagatgcacattgatgtggggttttgatgtgtctgattttgactactcaagctctgtttacagaagaaaattgaatggcgagggtgtggccatatgaactgactagatggctaatatggacactttgggtatttctaatgcctgttcagggctggttttctgcatgcacgggtatacacataatgcagtgccatgcacatagggaagggtcagtaagagaagtttgccttggcagcaagtatttattgttgacattattcagaattagtgataataaaaagcagagtgattttggtcaattttattattaattcttaaattccctgcagagaatgccccctttattgctgcaccagggttggcattgctcccactgagccctactccaccctgtccctgcactcccttggttgccaaaaaaatgataacttaaatcccttccagacttaagaattttatggcatggcccaattgatataaacatttagaaggaaatgaaaagctaaaataggaagtaattattcctctaaagaaacattttgagcaaggcagtttagagaatcctaatgtctacactggcatagcacgagccatgtaagcttcttttttttctatgcaagagtattgatgtatgtgctgaatcttcacagacttgtcaatacacaggcagtattctaaaatagcactgaacagggagtcaggagactattgtctcctaaacccaggactagagttccctcgtactgtcactcctttggtcattaaatgcactgggcttgcccgcactttggccttcctagaacactgcttcataacctctctgtctgacttctgcatctccttccaggtcagctcattcacaagagttgctcccaagcctggatgagttgcaccttgcatcttgagcatgcatttctcacaataattattaagctgtgtgataatttctgctttcaggacactcatccattatcttggctgtgagctccttgggtacgggtaccttgtatgtttacttttatatccctagcacaaagcaagtgcctggcacatagtcagtgccctaagtattcgtagagtgaagaatgccagcctctcttgtccctggtttccttatgtgttgaatgtggttgagtttgtccattgctagggagagacttccagtaataaaatttactattctagatgcttctactgttatgttttatctgcccatttatctttcttagttaccaggagaaatgtgtgacacctatattataatgaaaacaatctcattacttatagtttatctatattaaacaaatttaattgcattttaaagcattctttgatactgttgcttttgcaataaatatggataatcttggttataagggagttaaaacaatgctgtaataaataaagtgcttcatgtgatcaaaatcaaa

SEQ ID NO: 130043 - DNA, 638 bp, Homo sapiens
  Payload ID: 5442
  Gene Symbol: EPDR1
  Gene Name: ependymin related 1
  Uniprot ID: Q9UM22
  ENST ID: ENST00000423717
  CDS Start-End: 283-555
agaaggcagtggcagcaggcagtggcagcaggcagtggcccaggcagaaatagctcccgcgcgattcactggagccttccccgggccctggtcccggctaccgggactcgcgcgtccggatctcaaaagcggcagaggccaccgaagggacaggaagcactttggtccagaccacactcccggcacagtgcggaaagagccggcgggagccactctgatcccggacgcctcagcgcccccttgggcttgggcttgccctcgggccggggaaggctgaccgcgatgccaggacgcgctcccctccgcaccgtcccgggcgccctgggtgcctggctgctgggcggcctctgggcctggaccctgtgcggcctgtgcagcctgggggcggtgggagccccgcgcccgtgccaggcgccgcagcagtgggaggggcgccaggttatgtaccagcaaagtagcgggcgcaacagccgcgccctgctctcctacgacgggctcaaccagcgcgtgcgggtgctggacgagaggaaggcgctgatcccctgcaagagatgaaacctggattggcatctatacagtcaaggattgctatcctgtccaggaaacctttaccataaactacagtgtgatattgtcta

SEQ ID NO: 130044 - DNA, 947 bp, Homo sapiens
  Payload ID: 5442
  Gene Symbol: EPDR1
  Gene Name: ependymin related 1
  Uniprot ID: Q9UM22
  ENST ID: ENST00000425345
  CDS Start-End: 47-538
cttctcccagagagatctttcgcgaggagggtctcttggggatagcatggtccgggactgggaggggcgctgcgcccaccgagggcggcctgctggcgggggactcagtaacacccagcgaggcggtggcagattatttgaatatattttgctgtataaggatggagtgatgtttcagattgaccaagccaccaagcagtgctcaaagatgaccctgacacagccctgggatcctcttgacattcctcaaaactccacctttgaagaccagtactccatcggggggcctcaggagcagatcaccgtccaggagtggtcggacagaaagtcagctagatcctatgaaacctggattggcatctatacagtcaaggattgctatcctgtccaggaaacctttaccataaactacagtgtgatattgtctacgcggttttttgacatccagctgggtattaaagacccctcggtgtttacccctccaagcacgtgccagatggcccaactggagaagatgagcgaagactgctcctggtgagcctgtgcatagggaagcggcagcatcggatgtcagccccctgcggccccagctggagatggatatgagactagtcaagatgtgaatgctaattggagagaaatataattttaggaagatgcacattgatgtggggttttgatgtgtctgattttgactactcaagctctgtttacagaagaaaattgaatggcgagggtgtggccatatgaactgactagatggctaatatggacactttgggtatttctaatgcctgttcagggctggttttctgcatgcacgggtatacacataatgcagtgccatgcacatagggaagggtcagtaagagaagtttgccttggcagcaagtatttattgttgacattattcagaattagtgataataaaaagcagagtgattttg

SEQ ID NO: 130045 - DNA, 555 bp, Homo sapiens
  Payload ID: 5442
  Gene Symbol: EPDR1
  Gene Name: ependymin related 1
  ENST ID: ENST00000476620
  CDS Start-End: 171-539
tttggaaggcagacatgtggcccatctctgtagccatcactgagaaatctggattttcaaggcagaagctgacaacattgtgactttgcagccatttagagataaatgtgaacctgtttttctctttagtgttattatttgaatatattttgctgtataaggatggagtgatgtttcagattgaccaagccaccaagcagtgctcaaagatgaccctgacacagccctgggatcctcttgacattcctcaaaactccacctttgaagaccagtactccatcggggggcctcaggagcagatcaccgtccaggagtggtcggacagaaagtcagctagatcctatgaaacctggattggcatctatacagtcaaggattgctatcctgtccaggaaacctttaccataaactacagtgtgatattgtctacgcggttttttgacatccagctgggtattaaagacccctcggtgtttacccctccaagcacgtgccagatggcccaactggagaagatgagcgaagactgctcctggtgagcctgtgcatagggaa

SEQ ID NO: 130046 - DNA, 3363 bp, Homo sapiens
  Payload ID: 5443
  Gene Symbol: EPHA1
  Gene Name: EPH receptor A1
  Uniprot ID: P21709
  ENST ID: ENST00000275815
  CDS Start-End: 88-3018
gcccccgcccggcccgcccggctctcctagtcccttgcaacctggcgctgccatccgggccactgtcccaggtcccggcccggagctatggagcggcgctggcccctggggctagggctggtgctgctgctctgcgccccgctgcccccgggggcgcgcgccaaggaagttactctgatggacacaagcaaggcacagggagagctgggctggctgctggatcccccaaaagatgggtggagtgaacagcaacagatactgaatgggacacccctgtacatgtaccaggactgcccaatgcaaggacgcagagacactgaccactggcttcgctccaattggatctaccgcggggaggaggcttcccgcgtccacgtggagctgcagttcaccgtgcgggactgcaagagtttccctgggggagccgggcctctgggctgcaaggagaccttcaaccttctgtacatggagagtgaccaggatgtgggcattcagctccgacggcccttgttccagaaggtaaccacggtggctgcagaccagagcttcaccattcgagaccttgtgtctggctccgtgaagctgaatgtggagcgctgctctctgggccgcctgacccgccgtggcctctacctcgctttccacaacccgggtgcctgtgtggccctggtgtctgtccgggtcttctaccagcgctgtcctgagaccctgaatggcttggcccaattcccagacactctgcctggccccgctgggttggtggaagtggcggggacctgcttgccccacgcgcgggccagccccaggccctcaggtgcaccccgcatgcactgcagccctgatggcgagtggctggtgcctgtaggacggtgccactgtgagcctggctatgaggaaggtggcagtggcgaagcatgtgttgcctgccctagcggctcctaccggatggacatggacacaccccattgtctcacgtgcccccagcagagcactgctgagtctgagggggccaccatctgtacctgtgagagcggccattacagagctcccggggagggcccccaggtggcatgcacaggtcccccctcggccccccgaaacctgagcttctctgcctcagggactcagctctccctgcgttgggaacccccagcagatacggggggacgccaggatgtcagatacagtgtgaggtgttcccagtgtcagggcacagcacaggacggggggccctgccagccctgtggggtgggcgtgcacttctcgccgggggcccgggggctcaccacacctgcagtgcatgtcaatggccttgaaccttatgccaactacacctttaatgtggaagcccaaaatggagtgtcagggctgggcagctctggccatgccagcacctcagtcagcatcagcatggggcatgcagagtcactgtcaggcctgtctctgagactggtgaagaaagaaccgaggcaactagagctgacctgggcggggtcccggccccgaagccctggggcgaacctgacctatgagctgcacgtgctgaaccaggatgaagaacggtaccagatggttctagaacccagggtcttgctgacagagctgcagcctgacaccacatacatcgtcagagtccgaatgctgaccccactgggtcctggccctttctcccctgatcatgagtttcggaccagcccaccagtgtccaggggcctgactggaggagagattgtagccgtcatctttgggctgctgcttggtgcagccttgctgcttgggattctcgttttccggtccaggagagcccagcggcagaggcagcagaggcagcgtgaccgcgccaccgatgtggatcgagaggacaagctgtggctgaagccttatgtggacctccaggcatacgaggaccctgcacagggagccctggactttacccgggagcttgatccagcgtggctgatggtggacactgtcataggagaaggagagtttggggaagtgtatcgagggaccctgaggctccccagccaggactgcaagactgtggccattaagaccttaaaagacacatccccaggtggccagtggtggaacttccttcgagaggcaactatcatgggccagtttagccacccgcatattctgcatctggaaggcgtcgtcacaaagcgaaagccgatcatgatcatcacagaatttatggagaatggagccctggatgccttcctgagggagcgggaggaccagctggtccctgggcagctagtggccatgctgcagggcatagcatctggcatgaactacctcagtaatcacaattatgtccaccgggacctggctgccagaaacatcttggtgaatcaaaacctgtgctgcaaggtgtctgactttggcctgactcgcctcctggatgactttgatggcacatacgaaacccagggaggaaagatccctatccgttggacagcccctgaagccattgcccatcggatcttcaccacagccagcgatgtgtggagctttgggattgtgatgtgggaggtgctgagctttggggacaagccttatggggagatgagcaatcaggaggttatgaagagcattgaggatgggtaccggttgccccctcctgtggactgccctgcccctctgtatgagctcatgaagaactgctgggcatatgaccgtgcccgccggccacacttccagaagcttcaggcacatctggagcaactgcttgccaacccccactccctgcggaccattgccaactttgaccccaggatgactcttcgcctgcccagcctgagtggctcagatgggatcccatatcgaaccgtctctgagtggctcgagtccatacgcatgaaacgctacatcctgcacttccactcggctgggctggacaccatggagtgtgtgctggagctgaccgctgaggacctgacgcagatgggaatcacactgcccgggcaccagaagcgcattctttgcagtattcagggattcaaggactgatccctcctctcaccccatgcccaatcagggtgcaaggagcaaggacggggccaaggtcgctcatggtcactccctgcgccccttcccacaacctgccagactaggctatcggtgctgcttctgcccactttcaggagaaccctgctctgcaccccagaaaacctctttgttttaaaagggaggtgggggtagaagtaaaaggatgatcatgggagggagctgaggggttaatatatatacatacatacacatatatatatttttgtaaataaacaggaactgattttctgcctccatcccacccatgagggctgcaggcactacaaaagagctgactactgagaa

SEQ ID NO: 130047 - DNA, 2050 bp, Homo sapiens
  Payload ID: 5444
  Gene Symbol: EPHA10
  Gene Name: EPH receptor A10
  Uniprot ID: Q5JZY3
  ENST ID: ENST00000319637
  CDS Start-End: 68-955
attgctcagcggtgctaggctggcgcggcttgagccgccgccggactgacagctcggtctgcggaccatggagacctgcgccggtccacacccgctgcgcctcttcctctgccggatgcagctctgtctcgcgctgcttttgggaccctggcggcctgggaccgccgaggaagttatcctcctggattccaaagcctcccaggccgagctgggctggactgcactgccaagtaatgggtgggaggagatcagcggcgtggatgaacacgaccgtcccatccgcacgtaccaagtgtgcaatgtgctggagcccaaccaggacaactggctgcagactggctggataagccgtggccgcgggcagcgcatcttcgtggaactgcagttcacactccgtgactgcagcagcatccctggcgccgcgggtacctgcaaggagaccttcaacgtctactacctggaaactgaggccgacctgggccgtgggcgtccccgcctaggcggcagccggccccgcaaaatcgacacgatcgcggcggacgagagcttcacgcagggcgacctgggtgagcgcaagatgaagctgaacacagaggtgcgcgagatcggaccgctcagccggcggggtttccacctggcctttcaggacgtgggcgcatgcgtggcgcttgtctcggtgcgcgtctactacaagcagtgccgcgccaccgtgcggggcctggccacgttcccagccaccgcagccgagagcgccttctccacactggtggaagtggccggaacgtgcgtggcgcactcggaaggggagcctggcagccccccacgcatgcactgcggcgccgacggcgagtggctggtgcctgtgggccgctgcagctgcagcgcgggattccaggagcgtggtgacttctgcgaaggtatccagttggctgggggccgtggggtgggagtgtagagcgtaggtggcaattgagagagagtgtgccctagaggaaagaggcgggtgtggggtcggggggcggtggagaagccttggactctggagcccaaggagagccctgaagtcttgtggagtttccagtgagtccagtcagggccaatgagtgaacttactagatgaaattgactggctaaggaggcattagggatctatatcttaggcaccttgcacaggccttctcgtttatttattttcatggcaataaaggaagtcattgtttttttttttttttaaaataaggagtctctcttgctctgttgcccaggctggagtgcactggcttgatcttggctaactgcaacttccacctcctgggttcaagcaattctcctgcctcagcctcctgagtagctgggattataggcgtgcaccaccatgcccagctaatttttgtatttttagtagagacggggtttcaccatgttggccaggctggtctcaaactcctgacctcaagtgatccacctacctaggccttccagagtgctgggattataggcgtgagccaccgtgcctggcctaaaggaagtcattcttatctctatttcacagatgaagaaacagagcctcagagagattagtacctcacttgcaaagttaggaaatggggagctaggatttgaattcaggcttgcccaactcacattctatgacatcatgaggtctcctcagtgcataaggaagaactctacagcagcccaatcttcaggctagtgggattggttgcattacagagaggaatctcccagtcacggaccaaatacttgcaagttagaggctggcaggggggatttttatgctggagagagggattgggaagttgcactagatgattacgaagatcacatcccactctctgaactacaatcactgtgctccctgggggagatccttcatgttgagggttttgctgggttctcaggctagtgggggcattaggaacagacctctcattctctctcttgcctgtggctttggatacagagggtgatgatggggttattaatgtgtgtacttaatatagaaagatcaaggtatgctttttctaaa

SEQ ID NO: 130048 - DNA, 5425 bp, Homo sapiens
  Payload ID: 5444
  Gene Symbol: EPHA10
  Gene Name: EPH receptor A10
  Uniprot ID: Q5JZY3
  ENST ID: ENST00000373048
  CDS Start-End: 1-3027
atggagacctgcgccggtccacacccgctgcgcctcttcctctgccggatgcagctctgtctcgcgctgcttttgggaccctggcggcctgggaccgccgaggaagttatcctcctggattccaaagcctcccaggccgagctgggctggactgcactgccaagtaatgggtgggaggagatcagcggcgtggatgaacacgaccgtcccatccgcacgtaccaagtgtgcaatgtgctggagcccaaccaggacaactggctgcagactggctggataagccgtggccgcgggcagcgcatcttcgtggaactgcagttcacactccgtgactgcagcagcatccctggcgccgcgggtacctgcaaggagaccttcaacgtctactacctggaaactgaggccgacctgggccgtgggcgtccccgcctaggcggcagccggccccgcaaaatcgacacgatcgcggcggacgagagcttcacgcagggcgacctgggtgagcgcaagatgaagctgaacacagaggtgcgcgagatcggaccgctcagccggcggggtttccacctggcctttcaggacgtgggcgcatgcgtggcgcttgtctcggtgcgcgtctactacaagcagtgccgcgccaccgtgcggggcctggccacgttcccagccaccgcagccgagagcgccttctccacactggtggaagtggccggaacgtgcgtggcgcactcggaaggggagcctggcagccccccacgcatgcactgcggcgccgacggcgagtggctggtgcctgtgggccgctgcagctgcagcgcgggattccaggagcgtggtgacttctgcgaagcctgtcccccagggttttacaaggtgtccccgcggcggcccctctgctcaccgtgcccagagcacagccgggccctggaaaacgcctccaccttctgcgtgtgccaggacagctatgcgcgctcacccaccgacccgccctcggcttcctgcacccggccgccgtcggcgccgcgggacctgcagtacagcctgagccgctcgccgctggtgctgcgactgcgctggctgccgccggccgactcgggaggccgctcggacgtcacctactcgctgctgtgcctgcgctgcggccgcgagggcccggcgggcgcctgcgagccgtgcgggccgcgcgtggccttcctaccgcgccaggcagggctgcgggagcgagccgccacgctgctgcacctgcggcccggcgcgcgctacaccgtgcgcgtggccgcgctcaacggcgtctcgggcccggcggccgccgcgggaaccacctacgcgcaggtcaccgtctccaccgggcccggggcgccctgggaggaggatgagatccgcagggaccgagtggaaccccagagcgtgtccctgtcgtggcgggagcccatccctgccggagcccctggggccaatgacacggagtacgagatccgatactacgagaagggtcagagtgagcagacttactccatggtgaagacaggggcgcccacagtcaccgtcaccaacctgaagccggctacccgctacgtctttcagatccgggccgcttccccggggccatcctgggaggcccagagttttaaccccagcattgaagtacagaccctgggggaggctgcctcagggtccagggaccagagccccgccattgtcgtcaccgtagtgaccatctcggccctcctcgtcctgggctccgtgatgagtgtgctggccatttggaggaggccctgcagctatggcaaaggaggaggggatgcccatgatgaagaggagctgtatttccacttcaaagtcccaacacgtcgcacattcctggacccccagagctgtggggacctgctgcaggctgtgcatctgttcgccaaggaactggatgcgaaaagcgtcacgctggagaggagccttggaggagggcggtttggggagctgtgctgtggctgcttgcagctccccggtcgccaggagctgctcgtagccgtgcatatgctgagggacagcgcctccgactcacagaggctcggcttcctggccgaggccctcacgctgggccagtttgaccatagccacatcgtgcggctggagggcgttgttacccgaggaagcaccttgatgattgtcaccgagtacatgagccatggggccctggacggcttcctcaggcggcacgaggggcagctggtggctgggcaactgatggggttgctgcctgggctggcatcagccatgaagtatctgtcagagatgggctacgttcaccggggcctggcagctcgccatgtgctggtcagcagcgaccttgtctgcaagatctctggcttcgggcggggcccccgggaccgatcagaggctgtctacaccactatgagtggccggagcccagcgctatgggccgctcccgagacacttcagtttggccacttcagctctgccagtgacgtgtggagcttcggcatcatcatgtgggaggtgatggcctttggggagcggccttactgggacatgtctggccaagacgtgatcaaggctgtggaggatggcttccggctgccaccccccaggaactgtcctaaccttctgcaccgactaatgctcgactgctggcagaaggacccaggtgagcggcccaggttctcccagatccacagcatcctgagcaagatggtgcaggacccagagccccccaagtgtgccctgactacctgtcccaggcctcccaccccactagcggaccgtgccttctccaccttcccctcctttggctctgtgggcgcgtggctggaggccctggacctgtgccgctacaaggacagcttcgcggctgctggctatgggagcctggaggccgtggccgagatgactgcccaggacctggtgagcctaggcatctctttggctgaacatcgagaggccctcctcagcgggatcagcgccctgcaggcacgagtgctccagctgcagggccagggggtgcaggtgtgagtggaccccattcttccaaggcaggactccggtgggggtccagtcccccagccctgcccaaggaccgtggcaagctgcgctccagcagtgtgggagggagcgctctcttcctctgcttgggcccagatctggtggggccacagcttccccgctttcactgcctgcccctcccattttcacgagtctgaacgccttggctaactcagtgcccctgaaaagaggttcaaatccctagggaggacccctgagataacagcaggaggaaattcggggtctcagagaaaagctggggcagggatgggagggaagacagtgggttgagattgccctggctcatgccctactgccatttgtacccactgggggctggggcctaccccgtggggtgttcccttttcccacagacccattgaccagtcagacagcgtgggtcctgggggggtcttcttctacctggcagtgactgcagctgcctggtggctcaggcgtcgggggctgggccagaggtgcatccacctcagctccctgtgccttggcaggggctgactggacactggccaaggctcaggcaggcaaagatggtgctgagctcaggggctgatacccaagagccctagactcaggatctggtttctgtgtccccctgccttgggctgacagttcagggtgaggccaaaagtcctggccaggccgggccatgagaggccctggtgctccctggggccccatgaggccctcgtgtgcattccttttatgaacttagtggccaggacatctgggaaaagcataaagggccatgttatctccccagggacccaagagcttttctctccagccatggggagggtgaagaggagactcagagatgggtcctctctctcaaacaggctggtctaacccccagtgtacagatgggggaaactgaggccaagtgaggagtcaggagcagagctgaggtcagaacccaatccaggggtaaggctggctctggggagagagtccttggtcctgccctatggcaccaccacttccctgtacagcccttggggactctagaggcgactcccctccagccagctccgtgccttgggcactacccagccttccatggagcccctccctgctctgactttgaagagccctggcagaagtggttgtgctgagcccaccgtggagttccttatccacaagggcccccgggaatggtggggcccagtatgccagagctttcgtagggtggcaggaaggcagctggatctcagcagggccacagggactgagtttgtttaggccgcccgtgacacttgtctgctctgcttggctgtgtgttggtggggtgggatggggcgggaaagaggagacaagaggtaaagatgaaaaagacacacagcctgcccttggggggctcagactagaccaggagaagagctcaggtaccaagaagtaattccagggcaccatccacagtgcccagggccccccaggagccctctgggtcagtgggtaggtgggctggagggggagatagccactctcttaatgtgtgaagttgagatgtaagttgaacagggccttgcaggtgggaaagggaaggttctttccttggggtgggtggagttttcggcaggcaagatggcaggcctcggacaaaaggagtccatgcagagaggctagcatgagaaagagcccagaggcgggaaggtgcagtgcctctttgcagagcacccagaggtgggggacagtgactcacagaggtgcctttggccttaccctgccagcagcagctcccctgctcttggaatctccccccagccccctgcctccctgtctcctgagcacctgccccagctcagtgactctgggggtactggggagaccaagatgttgctaccaccttagtcagggttgggggagcccccggccaggtgccctccaggatccgccttccccacccctcctgggaagcctggaccagcatcccttcttgggtggatggagcctcgtcctcatctccagctacatcagtcattctctgcagggcaaaatctcctccccctaccccagctgtttctgcagaagggcccctggctgtgttggcaggacttcggtgtccagggtagatctcccctccactgaggagtgaggtcccagaatcctgttgggtcccaggcctcagccctgcacagatgtgatgtggggcgatggctctctgggaaccctctacagatctatttttatatggaacttgttcactggacagaggtggcctgcaagcccccattaccctggtctgagctcaccctgggagggagggggccagtcggagggggttccttctggagatgtttttatatttcttgggttctctatgcaggataataaaaacttgtctgtgata

SEQ ID NO: 130049 - DNA, 3167 bp, Homo sapiens
  Payload ID: 5444
  Gene Symbol: EPHA10
  Gene Name: EPH receptor A10
  ENST ID: ENST00000427468
  CDS Start-End: 1-3045
atggagacctgcgccggtccacacccgctgcgcctcttcctctgccggatgcagctctgtctcgcgctgcttttgggaccctggcggcctgggaccgccgaggaagttatcctcctggattccaaagcctcccaggccgagctgggctggactgcactgccaagtaatgggtgggaggagatcagcggcgtggatgaacacgaccgtcccatccgcacgtaccaagtgtgcaatgtgctggagcccaaccaggacaactggctgcagactggctggataagccgtggccgcgggcagcgcatcttcgtggaactgcagttcacactccgtgactgcagcagcatccctggcgccgcgggtacctgcaaggagaccttcaacgtctactacctggaaactgaggccgacctgggccgtgggcgtccccgcctaggcggcagccggccccgcaaaatcgacacgatcgcggcggacgagagcttcacgcagggcgacctgggtgagcgcaagatgaagctgaacacagaggtgcgcgagatcggaccgctcagccggcggggtttccacctggcctttcaggacgtgggcgcatgcgtggcgcttgtctcggtgcgcgtctactacaagcagtgccgcgccaccgtgcggggcctggccacgttcccagccaccgcagccgagagcgccttctccacactggtggaagtggccggaacgtgcgtggcgcactcggaaggggagcctggcagccccccacgcatgcactgcggcgccgacggcgagtggctggtgcctgtgggccgctgcagctgcagcgcgggattccaggagcgtggtgacttctgcgaagcctgtcccccagggttttacaaggtgtccccgcggcggcccctctgctcaccgtgcccagagcacagccgggccctggaaaacgcctccaccttctgcgtgtgccaggacagctatgcgcgctcacccaccgacccgccctcggcttcctgcacccggccgccgtcggcgccgcgggacctgcagtacagcctgagccgctcgccgctggtgctgcgactgcgctggctgccgccggccgactcgggaggccgctcggacgtcacctactcgctgctgtgcctgcgctgcggccgcgagggcccggcgggcgcctgcgagccgtgcgggccgcgcgtggccttcctaccgcgccaggcagggctgcgggagcgagccgccacgctgctgcacctgcggcccggcgcgcgctacaccgtgcgcgtggccgcgctcaacggcgtctcgggcccggcggccgccgcgggaaccacctacgcgcaggtcaccgtctccaccgggcccggggcgccctgggaggaggatgagatccgcagggaccgagtggaaccccagagcgtgtccctgtcgtggcgggagcccatccctgccggagcccctggggccaatgacacggagtacgagatccgatactacgagaagggtcagagtgagcagacttactccatggtgaagacaggggcgcccacagtcaccgtcaccaacctgaagccggctacccgctacgtctttcagatccgggccgcttccccggggccatcctgggaggcccagagttttaaccccagcattgaagtacagaccctgggggaggctgcctcagggtccagggaccagagccccgccattgtcgtcaccgtagtgaccatctcggccctcctcgtcctgggctccgtgatgagtgtgctggccatttggaggaggccctgcagctatggcaaaggaggaggggatgcccatgatgaagaggagctgtatttccacttcaaagtcccaacacgtcgcacattcctggacccccagagctgtggggacctgctgcaggctgtgcatctgttcgccaaggaactggatgcgaaaagcgtcacgctggagaggagccttggaggagggcggtttggggagctgtgctgtggctgcttgcagctccccggtcgccaggagctgctcgtagccgtgcatatgctgagggacagcgcctccgactcacagaggctcggcttcctggccgaggccctcacgctgggccagtttgaccatagccacatcgtgcggctggagggcgttgttacccgaggaagcaccttgatgattgtcaccgagtacatgagccatggggccctggacggcttcctcaggcggcacgaggggcagctggtggctgggcaactgatggggttgctgcctgggctggcatcagccatgaagtatctgtcagagatgggctacgttcaccggggcctggcagctcgccatgtgctggtcagcagcgaccttgtctgcaagatctctggcttcgggcggggcccccgggaccgatcagaggctgtctacaccactatgagtggccggagcccagcgctatgggccgctcccgagacacttcagtttggccacttcagctctgccagtgacgtgtggagcttcggcatcatcatgtgggaggtgatggcctttggggagcggccttactgggacatgtctggccaagacgtgatcaaggctgtggaggatggcttccggctgccaccccccaggaactgtcctaaccttctgcaccgactaatgctcgactgctggcagaaggacccaggtgagcggcccaggttctcccagatccacagcatcctgagcaagatggtgcaggacccagagccccccaagtgtgccctgactacctgtcccaggcctcccaccccactagcggaccgtgccttctccaccttcccctcctttggctctgtgggcgcgtggctggaggccctggacctgtgccgctacaaggacagcttcgcggctgctggctatgggagcctggaggccgtggccgagatgactgcccaggacctggtgagcctaggcatctctttggctgaacatcgagaggccctcctcagcgggatcagcgccctgcaggcacgagtgctccagctgcagggccagggggtgcaggtgataataaaaacttgtctgtgatatggtgcctctttgagtggcagttgcttgatcattgtatagctggtgtggaagggcttctgcccccttcctcgaggacaggggtgtccagaatctgcgtctgagatctctctgcatagagg

SEQ ID NO: 130050 - DNA, 1944 bp, Homo sapiens
  Payload ID: 5444
  Gene Symbol: EPHA10
  Gene Name: EPH receptor A10
  ENST ID: ENST00000534097
  CDS Start-End: 1-1179
gagcagacttactccatggtgaagacaggggcgcccacagtcaccgtcaccaacctgaagccggctacccgctacgtctttcagatccgggccgcttccccggggccatcctgggaggcccagagttttaaccccagcattgaagtacagaccctgggggaggctgcctcagggtccagggaccagagccccgccattgtcgtcaccgtagtgaccatctcggccctcctcgtcctgggctccgtgatgagtgtgctggccatttggaggaggccctgcagctatggcaaaggaggaggggatgcccatgatgaagaggagctgtatttccacttcaaagtcccaacacgtcgcacattcctggacccccagagctgtggggacctgctgcaggctgtgcatctgttcgccaaggaactggatgcgaaaagcgtcacgctggagaggagccttggaggagggcggtttggggagctgtgctgtggctgcttgcagctccccggtcgccaggagctgctcgtagccgtgcatatgctgagggacagcgcctccgactcacagaggctcggcttcctggccgaggccctcacgctgggccagtttgaccatagccacatcgtgcggctggagggcgttgttacccgaggaagcaccttgatgattgtcaccgagtacatgagccatggggccctggacggcttcctcaggcggcacgaggggcagctggtggctgggcaactgatggggttgctgcctgggctggcatcagccatgaagtatctgtcagagatgggctacgttcaccggggcctggcagctcgccatgtgctggtcagcagcgaccttgtctgcaagatctctggcttcgggcggggcccccgggaccgatcagaggctgtctacaccactatgagtggccggagcccagcgctatgggccgctcccgagacacttcagtttggccacttcagctctgccagtgacgtgtggagcttcggcatcatcatgtgggaggtgatggcctttggggagcggccttactgggacatgtctggccaagacgtgatcaaggctgtggaggatggcttccggctgccaccccccaggaactgtcctaaccttctgcaccgactaatgctcgactgctggcagaaggacccaggcctcccaccccactagcggaccgtgccttctccaccttcccctcctttggctctgtgggcgcgtggctggaggccctggacctgtgccgctacaaggacagcttcgcggctgctggctatgggagcctggaggccgtggccgagatgactgcccaggacctggtgagcctaggcatctctttggctgaacatcgagaggccctcctcagcgggatcagcgccctgcaggcacgagtgctccagctgcagggccagggggtgcaggtgataataaaaacttgtctgtgatatggtgcctctttgagtggcagttgcttgatcattgtatagctggtgtggaagggcttctgcccccttcctcgaggacaggggtgtccagaatctgcgtctgagatctctctgcatagagggatttactgtcccacagctctggaggctggaagccaagatcaagatgtgcgcaaggttgtttcctgctgagagctgtgaggggagcttctgctctgggcctctctccccggcttgcctgtggccatcttcccactctctcttcgcatcatcttccctctgtggagagcaaaatatcagctctttgataaggctaactggagaatgttgcttaccaagtttctttgaatctaagatgccattgagtgtaagatgtcctaccaagaaagaaacatcacagccaactatgttgtgccatccaactgaaagatgcatcccagtttcagagatgttaacatgtacgtcttcaataaatgagatgccgcgcatcagg

SEQ ID NO: 130051 - DNA, 2333 bp, Homo sapiens
  Payload ID: 5444
  Gene Symbol: EPHA10
  Gene Name: EPH receptor A10
  ENST ID: ENST00000437645
  CDS Start-End: 1-657
gcgcaggtcaccgtctccaccgggcccggggcgccctgggaggaggatgagatccgcagggaccgagtggaaccccagagcgtgtccctgtcgtggcgggagcccatccctgccggagcccctggggccaatgacacggagtacgagatccgatactacgagaagggtcagagtgagcagacttactccatggtgaagacaggggcgcccacagtcaccgtcaccaacctgaagccggctacccgctacgtctttcagatccgggccgcttccccggggccatcctgggaggcccagagttttaaccccagcattgaagtacagaccctgggggaggctgcctcagggtccagggaccagagccccgccattgtcgtcaccgtagtgaccatctcggccctcctcgtcctgggctccgtgatgagtgtgctggccatttggaggaggccctgcagctatggcaaaggaggaggggatgcccatgatgaagaggagctgtatttccacttcaaagtcccaacacgtcgcacattcctggacccccagagctgtggggacctgctgcaggctgtgcatctgttcgccaaggaactggatgcgaaaagcgtcacgctggagaggagccttggaggaggcttggaaacctccccccactgaggaaggcagagaggaatccccatttcacagaggagacaggccaagaaaaggaaagagatggaattcgaggtcacactgctggtactcagtttaccaggatttaagctggaaacagtccatgatctggagtcacttttttttttgagaccgagtcttgctctgtcacccagtctgaagtgcagtggcacaatctcagctcactgaaacctctgcctcctgggttcaagtgattttcctgcctcagcttctcaagtagctgggattacagggcggtttggggagctgtgctgtggctgcttgcagctccccggtcgccaggagctgctcgtagccgtgcatatgctgagggacagcgcctccgactcacagaggctcggcttcctggccgaggccctcacgctgggccagtttgaccatagccacatcgtgcggctggagggcgttgttacccgaggaagcaccttgatgattgtcaccgagtacatgagccatggggccctggacggcttcctcaggcggcacgaggggcagctggtggctgggcaactgatggggttgctgcctgggctggcatcagccatgaagtatctgtcagagatgggctacgttcaccggggcctggcagctcgccatgtgctggtcagcagcgaccttgtctgcaagatctctggcttcgggcggggcccccgggaccgatcagaggctgtctacaccactatgagtggccggagcccagcgctatgggccgctcccgagacacttcagtttggccacttcagctctgccagtgacgtgtggagcttcggcatcatcatgtgggaggtgatggcctttggggagcggccttactgggacatgtctggccaagacgtgatcaaggctgtggaggatggcttccggctgccaccccccaggaactgtcctaaccttctgcaccgactaatgctcgactgctggcagaaggacccaggcctcccaccccactagcggaccgtgccttctccaccttcccctcctttggctctgtgggcgcgtggctggaggccctggacctgtgccgctacaaggacagcttcgcggctgctggctatgggagcctggaggccgtggccgagatgactgcccaggacctggtgagcctaggcatctctttggctgaacatcgagaggccctcctcagcgggatcagcgccctgcaggcacgagtgctccagctgcagggccagggggtgcaggtgataataaaaacttgtctgtgatatggtgcctctttgagtggcagttgcttgatcattgtatagctggtgtggaagggcttctgcccccttcctcgaggacaggggtgtccagaatctgcgtctgagatctctctgcatagagggatttactgtcccacagctctggaggctggaagccaagatcaagatgtgcgcaaggttgtttcctgctgagagctgtgaggggagcttctgctctgggcctctctccccggcttgcctgtggccatcttcccactctctcttcgcatcatcttccctctatgccattgagtgtaagatgtcctaccaagaaagaaacatcacagccaactatgttgtgccatccaactgaaagatgcatcccagtttcagagatgttaacatgtacgtcttcaataaatgagatgccgcgcatca

SEQ ID NO: 130052 - DNA, 551 bp, Homo sapiens
  Payload ID: 5444
  Gene Symbol: EPHA10
  Gene Name: EPH receptor A10
  ENST ID: ENST00000525749
  CDS Start-End: 1-277
gcacctgcggcccggcgcgcgctacaccgtgcgcgtggccgcgctcaacggcgtctcgggcccggcggccgccgcgggaaccacctacgcgcaggtcaccgtctccaccgggcccggggcgccctgggaggaggatgagatccgcagggaccgagtggaaccccagagcgtgtccctgtcgtggcgggagcccatccctgccggagcccctggggccaatgacacggagtacgagatccgatactacgagaaggatacttgtgctgatttttgctgacctcttgtatccattgtcaatctgtggttgcagcttagctgtgatgtaacaaatggagtcacatcccaatctgctcttttccccggtcagagtgagcagacttactccatggtgaagacaggggcgcccacagtcaccgtcaccaacctgaagccggctacccgctacgtctttcagatccgggccgcttccccggggccatcctgggaggcccagagttttaaccccagcattgaagtacagaccctgggggaggctgcctcagggtccaggg

SEQ ID NO: 130053 - DNA, 2096 bp, Homo sapiens
  Payload ID: 5444
  Gene Symbol: EPHA10
  Gene Name: EPH receptor A10
  ENST ID: ENST00000432874
  CDS Start-End: 1-653
ttcagatccgggccgcttccccggggccatcctgggaggcccagagttttaaccccagcattgaagtacagaccctgggggaggctgcctcagggtccagggaccagagccccgccattgtcgtcaccgtagtgaccatctcggccctcctcgtcctgggctccgtgatgagtgtgctggccatttggaggaggccctgcagctatggcaaaggaggaggggatgcccatgatgaagaggagctgtatttccacttcaaagtcccaacacgtcgcacattcctggacccccagagctgtggggacctgctgcaggctgtgcatctgttcgccaaggaactggatgcgaaaagcgtcacgctggagaggagccttggaggaggtctctgctcgtgtctggaagccctgcctccacaccaagcccaccctccacccagaaagtccctggcttgcctgattatagggaagaggatggcagaagggtctgtgaccctctcctggtcctcaagggcggtttggggagctgtgctgtggctgcttgcagctccccggtcgccaggagctgctcgtagccgtgcatatgctgagggacagcgcctccgactcacagaggctcggcttcctggccgaggccctcacgctgggccagtttgaccatagccacatcgtgcggctggagggcgttgttacccgaggaagcaccttgatgattgtcaccgagtacatgagccatggggccctggacggcttcctcaggcggcacgaggggcagctggtggctgggcaactgatggggttgctgcctgggctggcatcagccatgaagtatctgtcagagatgggctacgttcaccggggcctggcagctcgccatgtgctggtcagcagcgaccttgtctgcaagatctctggcttcgggcggggcccccgggaccgatcagaggctgtctacaccactatggtggccggagcccagcgctatgggccgctcccgagacacttcagtttggccacttcagctctgccagtgacgtgtggagcttcggcatcatcatgtgggaggtgatggcctttggggagcggccttactgggacatgtctggccaagacgtgatcaaggctgtggaggatggcttccggctgccaccccccaggaactgtcctaaccttctgcaccgactaatgctcgactgctggcagaaggacccagactgttccggatacgccaatacctttagctggcgctggctctgcctccacctgcctgaagaacctgaagccctcgcttcttcacgaatgcacagtgctcatgcctcccaccccactagcggaccgtgccttctccaccttcccctcctttggctctgtgggcgcgtggctggaggccctggacctgtgccgctacaaggacagcttcgcggctgctggctatgggagcctggaggccgtggccgagatgactgcccaggacctggtgagcctaggcatctctttggctgaacatcgagaggccctcctcagcgggatcagcgccctgcaggcacgagtgctccagctgcagggccagggggtgcaggataataaaaacttgtctgtgatatggtgcctctttgagtggcagttgcttgatcattgtatagctggtgtggaagggcttctgcccccttcctcgaggacaggggtgtccagaatctgcgtctgagatctctctgcatagagggatttactgtcccacagctctggaggctggaagccaagatcaagatgtgcgcaaggttgtttcctgctgagagctgtgaggggagcttctgctctgggcctctctccccggcttgcctgtggccatcttcccactctctcttcgcatcatcttccctctgtggagagcaaaatatcagctctttgataaggctaactggagaatgttgcttaccaagtttctttgaatctaagatgccattgagtgtaagatgtcctaccaagaaagaaacatcacagccaactatgttgtgccatccaactgaaagatgcatcccagtttcagagatgttaacatgtacgtcttcaataaatgagatgccgcgcatcagggacaaa

SEQ ID NO: 130054 - DNA, 720 bp, Homo sapiens
  Payload ID: 5444
  Gene Symbol: EPHA10
  Gene Name: EPH receptor A10
  ENST ID: ENST00000540011
  CDS Start-End: 253-720
accgtgcgcgtggccgcgctcaacggcgtctcgggcccggcggccgccgcgggaaccacctacgcgcaggtcaccgtctccaccgggcccggggcgccctgggaggaggatgagatccgcagggaccgagtggaaccccagagcgtgtccctgtcgtggcgggagcccatccctgccggagcccctggggccaatgacacggagtacgagatccgatactacgagaagggtcagagtgagcagacttactccatggtgaagacaggggcgcccacagtcaccgtcaccaacctgaagccggctacccgctacgtctttcagatccgggccgcttccccggggccatcctgggaggcccagagttttaaccccagcattgaagtacagaccctgggggaggctgcctcagggtccagggaccagagccccgccattgtcgtcaccgtagtgaccatctcggccctcctcgtcctgggctccgtgatgagtgtgctggccatttggaggaggccctgcagctatggcaaaggaggaggggatgcccatgatgaagaggagctgtatttccacttcaaagtcccaacacgtcgcacattcctggacccccagagctgtggggacctgctgcaggctgtgcatctgttcgccaaggaactggatgcgaaaagcgtcacgctggagaggagccttggaggaggcttggaaacctccccccactga

SEQ ID NO: 130055 - DNA, 3964 bp, Homo sapiens
  Payload ID: 5445
  Gene Symbol: EPHA2
  Gene Name: EPH receptor A2
  Uniprot ID: P29317
  ENST ID: ENST00000358432
  CDS Start-End: 156-3086
ggttctcacccaacttccattaaggactcggggcaggaggggcagaagttgcgcgcaggccggcgggcgggagcggacaccgaggccggcgtgcaggcgtgcgggtgtgcgggagccgggctcggggggatcggaccgagagcgagaagcgcggcatggagctccaggcagcccgcgcctgcttcgccctgctgtggggctgtgcgctggccgcggccgcggcggcgcagggcaaggaagtggtactgctggactttgctgcagctggaggggagctcggctggctcacacacccgtatggcaaagggtgggacctgatgcagaacatcatgaatgacatgccgatctacatgtactccgtgtgcaacgtgatgtctggcgaccaggacaactggctccgcaccaactgggtgtaccgaggagaggctgagcgtatcttcattgagctcaagtttactgtacgtgactgcaacagcttccctggtggcgccagctcctgcaaggagactttcaacctctactatgccgagtcggacctggactacggcaccaacttccagaagcgcctgttcaccaagattgacaccattgcgcccgatgagatcaccgtcagcagcgacttcgaggcacgccacgtgaagctgaacgtggaggagcgctccgtggggccgctcacccgcaaaggcttctacctggccttccaggatatcggtgcctgtgtggcgctgctctccgtccgtgtctactacaagaagtgccccgagctgctgcagggcctggcccacttccctgagaccatcgccggctctgatgcaccttccctggccactgtggccggcacctgtgtggaccatgccgtggtgccaccggggggtgaagagccccgtatgcactgtgcagtggatggcgagtggctggtgcccattgggcagtgcctgtgccaggcaggctacgagaaggtggaggatgcctgccaggcctgctcgcctggattttttaagtttgaggcatctgagagcccctgcttggagtgccctgagcacacgctgccatcccctgagggtgccacctcctgcgagtgtgaggaaggcttcttccgggcacctcaggacccagcgtcgatgccttgcacacgacccccctccgccccacactacctcacagccgtgggcatgggtgccaaggtggagctgcgctggacgccccctcaggacagcgggggccgcgaggacattgtctacagcgtcacctgcgaacagtgctggcccgagtctggggaatgcgggccgtgtgaggccagtgtgcgctactcggagcctcctcacggactgacccgcaccagtgtgacagtgagcgacctggagccccacatgaactacaccttcaccgtggaggcccgcaatggcgtctcaggcctggtaaccagccgcagcttccgtactgccagtgtcagcatcaaccagacagagccccccaaggtgaggctggagggccgcagcaccacctcgcttagcgtctcctggagcatccccccgccgcagcagagccgagtgtggaagtacgaggtcacttaccgcaagaagggagactccaacagctacaatgtgcgccgcaccgagggtttctccgtgaccctggacgacctggccccagacaccacctacctggtccaggtgcaggcactgacgcaggagggccagggggccggcagcaaggtgcacgaattccagacgctgtccccggagggatctggcaacttggcggtgattggcggcgtggctgtcggtgtggtcctgcttctggtgctggcaggagttggcttctttatccaccgcaggaggaagaaccagcgtgcccgccagtccccggaggacgtttacttctccaagtcagaacaactgaagcccctgaagacatacgtggacccccacacatatgaggaccccaaccaggctgtgttgaagttcactaccgagatccatccatcctgtgtcactcggcagaaggtgatcggagcaggagagtttggggaggtgtacaagggcatgctgaagacatcctcggggaagaaggaggtgccggtggccatcaagacgctgaaagccggctacacagagaagcagcgagtggacttcctcggcgaggccggcatcatgggccagttcagccaccacaacatcatccgcctagagggcgtcatctccaaatacaagcccatgatgatcatcactgagtacatggagaatggggccctggacaagttccttcgggagaaggatggcgagttcagcgtgctgcagctggtgggcatgctgcggggcatcgcagctggcatgaagtacctggccaacatgaactatgtgcaccgtgacctggctgcccgcaacatcctcgtcaacagcaacctggtctgcaaggtgtctgactttggcctgtcccgcgtgctggaggacgaccccgaggccacctacaccaccagtggcggcaagatccccatccgctggaccgccccggaggccatttcctaccggaagttcacctctgccagcgacgtgtggagctttggcattgtcatgtgggaggtgatgacctatggcgagcggccctactgggagttgtccaaccacgaggtgatgaaagccatcaatgatggcttccggctccccacacccatggactgcccctccgccatctaccagctcatgatgcagtgctggcagcaggagcgtgcccgccgccccaagttcgctgacatcgtcagcatcctggacaagctcattcgtgcccctgactccctcaagaccctggctgactttgacccccgcgtgtctatccggctccccagcacgagcggctcggagggggtgcccttccgcacggtgtccgagtggctggagtccatcaagatgcagcagtatacggagcacttcatggcggccggctacactgccatcgagaaggtggtgcagatgaccaacgacgacatcaagaggattggggtgcggctgcccggccaccagaagcgcatcgcctacagcctgctgggactcaaggaccaggtgaacactgtggggatccccatctgagcctcgacagggcctggagccccatcggccaagaatacttgaagaaacagagtggcctccctgctgtgccatgctgggccactggggactttatttatttctagttctttcctccccctgcaacttccgctgaggggtctcggatgacaccctggcctgaactgaggagatgaccagggatgctgggctgggccctctttccctgcgagacgcacacagctgagcacttagcaggcaccgccacgtcccagcatccctggagcaggagccccgccacagccttcggacagacatatgggatattcccaagccgaccttccctccgccttctcccacatgaggccatctcaggagatggagggcttggcccagcgccaagtaaacagggtacctcaagccccatttcctcacactaagagggcagactgtgaacttgactgggtgagacccaaagcggtccctgtccctctagtgccttctttagaccctcgggccccatcctcatccctgactggccaaacccttgctttcctgggcctttgcaagatgcttggttgtgttgaggtttttaaatatatattttgtactttgtggagagaatgtgtgtgtgtggcagggggccccgccagggctggggacagagggtgtcaaacattcgtgagctggggactcagggaccggtgctgcaggagtgtcctgcccatgccccagtcggccccatctctcatccttttggataagtttctattctgtcagtgttaaagattttgttttgttggacatttttttcgaatcttaatttattattttttttatatttattgttagaaaatgacttatttctgctctggaataaagttgcagatgattcaaaccga

SEQ ID NO: 130056 - DNA, 5809 bp, Homo sapiens
  Payload ID: 5446
  Gene Symbol: EPHA3
  Gene Name: EPH receptor A3
  Uniprot ID: P29320
  ENST ID: ENST00000336596
  CDS Start-End: 226-3177
cccgctctgcttcagcgcacgctgaagacggcactaggacccagggaagtccccgagcggggttcgcggaaaggcagccagactcctccttatctccagtgtcaaacttgacatcagcctgcgagcggagcatggtaacttctccagcaatcagagcgctccccctcacatcagtggcatgcttcatggagatatgctcctctcactgccctctgcaccagcaacatggattgtcagctctccatcctcctccttctcagctgctctgttctcgacagcttcggggaactgattccgcagccttccaatgaagtcaatctactggattcaaaaacaattcaaggggagctgggctggatctcttatccatcacatgggtgggaagagatcagtggtgtggatgaacattacacacccatcaggacttaccaggtgtgcaatgtcatggaccacagtcaaaacaattggctgagaacaaactgggtccccaggaactcagctcagaagatttatgtggagctcaagttcactctacgagactgcaatagcattccattggttttaggaacttgcaaggagacattcaacctgtactacatggagtctgatgatgatcatggggtgaaatttcgagagcatcagtttacaaagattgacaccattgcagctgatgaaagtttcactcaaatggatcttggggaccgtattctgaagctcaacactgagattagagaagtaggtcctgtcaacaagaagggattttatttggcatttcaagatgttggtgcttgtgttgccttggtgtctgtgagagtatacttcaaaaagtgcccatttacagtgaagaatctggctatgtttccagacacggtacccatggactcccagtccctggtggaggttagagggtcttgtgtcaacaattctaaggaggaagatcctccaaggatgtactgcagtacagaaggcgaatggcttgtacccattggcaagtgttcctgcaatgctggctatgaagaaagaggttttatgtgccaagcttgtcgaccaggtttctacaaggcattggatggtaatatgaagtgtgctaagtgcccgcctcacagttctactcaggaagatggttcaatgaactgcaggtgtgagaataattacttccgggcagacaaagaccctccatccatggcttgtacccgacctccatcttcaccaagaaatgttatctctaatataaacgagacctcagttatcctggactggagttggcccctggacacaggaggccggaaagatgttaccttcaacatcatatgtaaaaaatgtgggtggaatataaaacagtgtgagccatgcagcccaaatgtccgcttcctccctcgacagtttggactcaccaacaccacggtgacagtgacagaccttctggcacatactaactacacctttgagattgatgccgttaatggggtgtcagagctgagctccccaccaagacagtttgctgcggtcagcatcacaactaatcaggctgctccatcacctgtcctgacgattaagaaagatcggacctccagaaatagcatctctttgtcctggcaagaacctgaacatcctaatgggatcatattggactacgaggtcaaatactatgaaaagcaggaacaagaaacaagttataccattctgagggcaagaggcacaaatgttaccatcagtagcctcaagcctgacactatatacgtattccaaatccgagcccgaacagccgctggatatgggacgaacagccgcaagtttgagtttgaaactagtccagactctttctccatctctggtgaaagtagccaagtggtcatgatcgccatttcagcggcagtagcaattattctcctcactgttgtcatctatgttttgattgggaggttctgtggctataagtcaaaacatggggcagatgaaaaaagacttcattttggcaatgggcatttaaaacttccaggtctcaggacttatgttgacccacatacatatgaagaccctacccaagctgttcatgagtttgccaaggaattggatgccaccaacatatccattgataaagttgttggagcaggtgaatttggagaggtgtgcagtggtcgcttaaaacttccttcaaaaaaagagatttcagtggccattaagaccctgaaagttggctacacagaaaagcagaggagagacttcctgggagaagcaagcattatgggacagtttgaccaccccaatatcattcgactggaaggagttgttaccaaaagtaagccagttatgattgtcacagaatacatggagaatggttccttggatagtttcctacgtaaacacgatgcccagtttactgtcattcagctagtggggatgcttcgagggatagcatctggcatgaagtacctgtcagacatgggctatgttcaccgagacctcgctgctcggaacatcttgatcaacagtaacttggtgtgtaaggtttctgatttcggactttcgcgtgtcctggaggatgacccagaagctgcttatacaacaagaggagggaagatcccaatcaggtggacatcaccagaagctatagcctaccgcaagttcacgtcagccagcgatgtatggagttatgggattgttctctgggaggtgatgtcttatggagagagaccatactgggagatgtccaatcaggatgtaattaaagctgtagatgagggctatcgactgccaccccccatggactgcccagctgccttgtatcagctgatgctggactgctggcagaaagacaggaacaacagacccaagtttgagcagattgttagtattctggacaagcttatccggaatcccggcagcctgaagatcatcaccagtgcagccgcaaggccatcaaaccttcttctggaccaaagcaatgtggatatcactaccttccgcacaacaggtgactggcttaatggtgtctggacagcacactgcaaggaaatcttcacgggtgtggagtacagttcttgtgacacaatagccaagatttccacagatgacatgaaaaaggttggtgtcaccgtggttgggccacagaagaagatcatcagtagcattaaagctctagaaacgcaatcaaagaatggcccagttcccgtgtaaagcacgggacggaagtgcttctggacggaagtggtggctgtggaaggcgtagcatcatcctgcagacagacaataattctggagatactggtggaagttccaagtccaataagacactcaaatatgagtacaaatgccttaaaatggaattgaaaaactctttattttcccctatcatttattggatgggtgggtggggtatttttttgtaattgcttttttaaatattagttaatggattaaatttaattcttcagcgtaaaatggtgaagaactagcatatagccattgatcataaactgactatcataaaatcaaaacaagtgaaataacaaaatggacatggtggctttgtttaggtagagccacaaaagaaaagacttgtaatatttttatatacagaggaaatctgtaacaggtattttgtttcttttaaagcaagcaacacagaggaatttatacctcaaactatctggccatatttactaccttatcactgcattattctcttttatctgtttaaagcatatagagatgaagtttgtagttgttttaagtactacacatttttaaattgttagcttccttaagtatatcatgtaaagaaatgtcttaatttttgaaaaaagtacatatttattttcttttgaattgtttttattgttttctatttatgccttgatgatttaatatggatttgttacagccaagtgccaaatgctctctcaaattgtcagcaatttaactagacacagataataatgggtttctttcagattttttgaaccatccacttacatatatttttaaaaaatgaaatccttttcctgttcatacactaaccaaatctctcaaatctgttatcccaatcattgttgcctctccgtttattataaactgtatgctcacaacttagtgtaatataccagcttgtatgcaatggattttcaaccagataacatacctttcctgctctggtgcttagagactatcaactccctcctttagtgaaggagccgtgttagagcttccgagaatagctccactggagagaagtggaatcctatatagaatgctgcactaattgacaacacagcctataggccaatgcatgagtaaaaaaaaaaacaattactggctcactggctttgaaaagtcacttactattgttgctgaaacttgctgagctgtttatagagaatgatgataacagaacttttcctctgtatcactggtgtttaggtgaattaattaaacattgtgatcattagtaccaggtattattatctttaagagtcttccacttcaatgcacatggtgcagttttggtgtgtaacttagaaggattgaacttctttgaatttactggacataacattttcagaatagttggtcatctagcaaccgcctcaaaatgtgtaagcaggagagaaatttctcatcacagggatttagacttactattacataaaggctaactatgagcttgctcattaattttgaaaagatgtacctggtggatatctagctagtaatatattctgaagcaacattttagctctattgatactctttctaatgctgatatgatcttgagtataagaaatgcatatgtcactagaatggataaaataatgctgcaaacttaatgttcttatgcaaaatggaacgctaatgaaacacagcttacaatcgcaaatcaaaactcacaagtgctcatctgttgtagatttagtgtaataagacttagattgtgctccttcggatatgattgtttctcaaatcttggcaatattccttagtcaaatcaggctactagaattctgtattggatatataagagcatgaaatttttaaaaatacacttgtgattataaaattaatcacaaatttcacttatacctgctatcagcagctagaaaacattttttttttaaatcaagtattttgtgtttggaatgttagaatgagatctgaatgtggtttcaatctaattttttcccagactactattttcttttttaggtactattctgagcatactcaacaaaacccatgcatttcataaactaatagaagttgaggattgttgaatctatttcacttattttggctgtggtttccatctgaaagtagaggttgtatacaccatatactgttcttcattttattaatatttttctccttgacctctcataaatttactttacacaattcttaccctgtacatatgtaaacataagtgtacgattcttaaccatggagtagaggtactagaatgcttacggccatctctttgtacaggaactgcattgactttcagtaaacataaagccacaactcctacatgatgttatgtaccatatgatctgttttgtatcttaaatttgatttacatatattatttatttctggtaactcactcagtttatgctgtgctaaatatcaatcaagccatgtataaatgtgatatgattggcaatatgtgtttactttaaacttgtcttttcaaaatattactcagtttatgttgtacaatgtagatggcctcttactaatgtaaaatgatttgtagtggaaacatttatatttttataataaacataatgaaaatattttttacagattggaa

SEQ ID NO: 130057 - DNA, 2546 bp, Homo sapiens
  Payload ID: 5446
  Gene Symbol: EPHA3
  Gene Name: EPH receptor A3
  Uniprot ID: P29320
  ENST ID: ENST00000452448
  CDS Start-End: 88-1707
cttctccagcaatcagagcgctccccctcacatcagtggcatgcttcatggagatatgctcctctcactgccctctgcaccagcaacatggattgtcagctctccatcctcctccttctcagctgctctgttctcgacagcttcggggaactgattccgcagccttccaatgaagtcaatctactggattcaaaaacaattcaaggggagctgggctggatctcttatccatcacatgggtgggaagagatcagtggtgtggatgaacattacacacccatcaggacttaccaggtgtgcaatgtcatggaccacagtcaaaacaattggctgagaacaaactgggtccccaggaactcagctcagaagatttatgtggagctcaagttcactctacgagactgcaatagcattccattggttttaggaacttgcaaggagacattcaacctgtactacatggagtctgatgatgatcatggggtgaaatttcgagagcatcagtttacaaagattgacaccattgcagctgatgaaagtttcactcaaatggatcttggggaccgtattctgaagctcaacactgagattagagaagtaggtcctgtcaacaagaagggattttatttggcatttcaagatgttggtgcttgtgttgccttggtgtctgtgagagtatacttcaaaaagtgcccatttacagtgaagaatctggctatgtttccagacacggtacccatggactcccagtccctggtggaggttagagggtcttgtgtcaacaattctaaggaggaagatcctccaaggatgtactgcagtacagaaggcgaatggcttgtacccattggcaagtgttcctgcaatgctggctatgaagaaagaggttttatgtgccaagcttgtcgaccaggtttctacaaggcattggatggtaatatgaagtgtgctaagtgcccgcctcacagttctactcaggaagatggttcaatgaactgcaggtgtgagaataattacttccgggcagacaaagaccctccatccatggcttgtacccgacctccatcttcaccaagaaatgttatctctaatataaacgagacctcagttatcctggactggagttggcccctggacacaggaggccggaaagatgttaccttcaacatcatatgtaaaaaatgtgggtggaatataaaacagtgtgagccatgcagcccaaatgtccgcttcctccctcgacagtttggactcaccaacaccacggtgacagtgacagaccttctggcacatactaactacacctttgagattgatgccgttaatggggtgtcagagctgagctccccaccaagacagtttgctgcggtcagcatcacaactaatcaggctgctccatcacctgtcctgacgattaagaaagatcggacctccagaaatagcatctctttgtcctggcaagaacctgaacatcctaatgggatcatattggactacgaggtcaaatactatgaaaagcaggaacaagaaacaagttataccattctgagggcaagaggcacaaatgttaccatcagtagcctcaagcctgacactatatacgtattccaaatccgagcccgaacagccgctggatatgggacgaacagccgcaagtttgagtttgaaactagtccagactgtatgtattatttcaatgcagtctagaggagggggcagggatcttgcaaaagatgtctgatcgtttattctcactgtttctaagttttaaacaaatgtgatacatttaaggtatattgcttgggacattgcaatttgcagagccctgtgtctgtatacagtatttgtgtttgtgtgggtgtacattttgtgtttctttttttcttgtatgcaaatcaaacatattctaatgcctgaaatgcttctgttttttttttttagccataaattgcttttgaggaacattatttaatatagtaacacacttccagtgtctgtcatttcagatattccaggttcattgcgtgattcaatgaaccacaaaaaagaaacttgctgatccatgagaatcttaattttgttttaatccttaacacattcaatagcatatcacagagagaataaggattttctaaaatgtgttttatcacttcattcacattcagaagtaatttgaatagcctgttcctttaaccccaaatttggctaaaattggcctaaaactggcaaacatttttccagtaacttttctttttttcaaatgaattttcttcatacttaaaaaagccctttgctaaaatataattttcaaaaaggtaaaattatgtctatggcactaatataaaatgagtagaagttaatgattttacttaactcatttttttctttctttctttttttttttttttttttgagacggagtcttgctctgtcacccaggctggagtacagcagagcgatctcggctcactgcaagctcctgcaagctccgcctcctggcttcacgccattctccccctcagcctcccgagtagctgggactacag

SEQ ID NO: 130058 - DNA, 3085 bp, Homo sapiens
  Payload ID: 5446
  Gene Symbol: EPHA3
  Gene Name: EPH receptor A3
  ENST ID: ENST00000494014
  CDS Start-End: 74-2830
agagcgctccccctcacatcagtggcatgcttcatggagatatgctcctctcactgccctctgcaccagcaacatggattgtcagctctccatcctcctccttctcagctgctctgttctcgacagcttcggggaactgattccgcagccttccaatgaagtcaatctactggattcaaaaacaattcaaggggagctgggctggatctcttatccatcacatgggtgggaagagatcagtggtgtggatgaacattacacacccatcaggacttaccaggtgtgcaatgtcatggaccacagtcaaaacaattggctgagaacaaactgggtccccaggaactcagctcagaagatttatgtggagctcaagttcactctacgagactgcaatagcattccattggttttaggaacttgcaaggagacattcaacctgtactacatggagtctgatgatgatcatggggtgaaatttcgagagcatcagtttacaaagattgacaccattgcagctgatgaaagtttcactcaaatggatcttggggaccgtattctgaagctcaacactgagattagagaagtaggtcctgtcaacaagaagggattttatttggcatttcaagatgttggtgcttgtgttgccttggtgtctgtgagagtatacttcaaaaagtgcccatttacagtgaagaatctggctatgtttccagacacggtacccatggactcccagtccctggtggaggttagagggtcttgtgtcaacaattctaaggaggaagatcctccaaggatgtactgcagtacagaaggcgaatggcttgtacccattggcaagtgttcctgcaatgctggctatgaagaaagaggttttatgtgccaagcttgtcgaccaggtttctacaaggcattggatggtaatatgaagtgtgctaagtgcccgcctcacagttctactcaggaagatggttcaatgaactgcaggtgtgagaataattacttccgggcagacaaagaccctccatccatggcttgtacccgacctccatcttcaccaagaaatgttatctctaatataaacgagacctcagttatcctggactggagttggcccctggacacaggaggccggaaagatgttaccttcaacatcatatgtaaaaaatgtgggtggaatataaaacagtgtgagccatgcagcccaaatgtccgcttcctccctcgacagtttggactcaccaacaccacggtgacagtgacagaccttctggcacatactaactacacctttgagattgatgccgttaatggggtgtcagagctgagctccccaccaagacagtttgctgcggtcagcatcacaactaatcaggctgctccatcacctgtcctgacgattaagaaagatcggacctccagaaatagcatctctttgtcctggcaagaacctgaacatcctaatgggatcatattggactacgaggtcaaatactatgaaaagcaggaacaagaaacaagttataccattctgagggcaagaggcacaaatgttaccatcagtagcctcaagcctgacactatatacgtattccaaatccgagcccgaacagccgctggatatgggacgaacagccgcaagtttgagtttgaaactagtccagactctttctccatctctggtgaaagtagccaagtggtcatgatcgccatttcagcggcagtagcaattattctcctcactgttgtcatctatgttttgattgggaggttctgtggctataagtcaaaacatggggcagatgaaaaaagacttcattttggcaatgggcatttaaaacttccaggtctcaggacttatgttgacccacatacatatgaagaccctacccaagctgttcatgagtttgccaaggaattggatgccaccaacatatccattgataaagttgttggagcaggtgaatttggagaggtgtgcagtggtcgcttaaaacttccttcaaaaaaagagatttcagtggccattaagaccctgaaagttggctacacagaaaagcagaggagagacttcctgggagaagcaagcattatgggacagtttgaccaccccaatatcattcgactggaaggagttgttaccaaaagtaagccagttatgattgtcacagaatacatggagaatggttccttggatagtttcctacgtaaacacgatgcccagtttactgtcattcagctagtggggatgcttcgagggatagcatctggcatgaagtacctgtcagacatgggctatgttcaccgagacctcgctgctcggaacatcttgatcaacagtaacttggtgtgtaaggtttctgatttcggactttcgcgtgtcctggaggatgacccagaagctgcttatacaacaagaggagggaagatcccaatcaggtggacatcaccagaagctatagcctaccgcaagttcacgtcagccagcgatgtatggagttatgggattgttctctgggaggtgatgtcttatggagagagaccatactgggagatgtccaatcaggatgtaattaaagctgtagatgagggctatcgactgccaccccccatggactgcccagctgccttgtatcagctgatgctggactgctggcagaaagacaggaacaacagacccaagtttgagcagattgttagtattctggacaagcttatccggaatcccggcagcctgaagatcatcaccagtgcagccgcaaggccatcaaaccttcttctggaccaaagcaatgtggatatcactaccttccgcacaacagtgacatgaaaaaggttggtgtcaccgtggttgggccacagaagaagatcatcagtagcattaaagctctagaaacgcaatcaaagaatggcccagttcccgtgtaaagcacgggacggaagtgcttctggacggaagtggtggctgtggaaggcgtagcatcatcctgcagacagacaataattctggagatactggtggaagttccaagtccaataagacactcaaatatgagtacaaatgccttaaaatggaattgaaaaa

SEQ ID NO: 130059 - DNA, 6346 bp, Homo sapiens
  Payload ID: 5447
  Gene Symbol: EPHA4
  Gene Name: EPH receptor A4
  Uniprot ID: P54764
  ENST ID: ENST00000281821
  CDS Start-End: 43-3003
ctgggatagaagcggcaggagcagcgttggcaccggcgaaccatggctgggattttctatttcgccctattttcgtgtctcttcgggatttgcgacgctgtcacaggttccagggtataccccgcgaatgaagttaccttattggattccagatctgttcagggagaacttgggtggatagcaagccctctggaaggagggtgggaggaagtgagtatcatggatgaaaaaaatacaccaatccgaacctaccaagtgtgcaatgtgatggaacccagccagaataactggctacgaactgattggatcacccgagaaggggctcagagggtgtatattgagattaaattcaccttgagggactgcaatagtcttccgggcgtcatggggacttgcaaggagacgtttaacctgtactactatgaatcagacaacgacaaagagcgtttcatcagagagaaccagtttgtcaaaattgacaccattgctgctgatgagagcttcacccaagtggacattggtgacagaatcatgaagctgaacaccgagatccgggatgtagggccattaagcaaaaaggggttttacctggcttttcaggatgtgggggcctgcatcgccctggtatcagtccgtgtgttctataaaaagtgtccactcacagtccgcaatctggcccagtttcctgacaccatcacaggggctgatacgtcttccctggtggaagttcgaggctcctgtgtcaacaactcagaagagaaagatgtgccaaaaatgtactgtggggcagatggtgaatggctggtacccattggcaactgcctatgcaacgctgggcatgaggagcggagcggagaatgccaagcttgcaaaattggatattacaaggctctctccacggatgccacctgtgccaagtgcccaccccacagctactctgtctgggaaggagccacctcgtgcacctgtgaccgaggctttttcagagctgacaacgatgctgcctctatgccctgcacccgtccaccatctgctcccctgaacttgatttcaaatgtcaacgagacatctgtgaacttggaatggagtagccctcagaatacaggtggccgccaggacatttcctataatgtggtatgcaagaaatgtggagctggtgaccccagcaagtgccgaccctgtggaagtggggtccactacaccccacagcagaatggcttgaagaccaccaaagtctccatcactgacctcctagctcataccaattacacctttgaaatctgggctgtgaatggagtgtccaaatataaccctaacccagaccaatcagtttctgtcactgtgaccaccaaccaagcagcaccatcatccattgctttggtccaggctaaagaagtcacaagatacagtgtggcactggcttggctggaaccagatcggcccaatggggtaatcctggaatatgaagtcaagtattatgagaaggatcagaatgagcgaagctatcgtatagttcggacagctgccaggaacacagatatcaaaggcctgaaccctctcacttcctatgttttccacgtgcgagccaggacagcagctggctatggagacttcagtgagcccttggaggttacaaccaacacagtgccttcccggatcattggagatggggctaactccacagtccttctggtctctgtctcgggcagtgtggtgctggtggtaattctcattgcagcttttgtcatcagccggagacggagtaaatacagtaaagccaaacaagaagcggatgaagagaaacatttgaatcaaggtgtaagaacatatgtggacccctttacgtacgaagatcccaaccaagcagtgcgagagtttgccaaagaaattgacgcatcctgcattaagattgaaaaagttataggagttggtgaatttggtgaggtatgcagtgggcgtctcaaagtgcctggcaagagagagatctgtgtggctatcaagactctgaaagctggttatacagacaaacagaggagagacttcctgagtgaggccagcatcatgggacagtttgaccatccgaacatcattcacttggaaggcgtggtcactaaatgtaaaccagtaatgatcataacagagtacatggagaatggctccttggatgcattcctcaggaaaaatgatggcagatttacagtcattcagctggtgggcatgcttcgtggcattgggtctgggatgaagtatttatctgatatgagctatgtgcatcgtgatctggccgcacggaacatcctggtgaacagcaacttggtctgcaaagtgtctgattttggcatgtcccgagtgcttgaggatgatccggaagcagcttacaccaccaggggtggcaagattcctatccggtggactgcgccagaagcaattgcctatcgtaaattcacatcagcaagtgatgtatggagctatggaatcgttatgtgggaagtgatgtcgtacggggagaggccctattgggatatgtccaatcaagatgtgattaaagccattgaggaaggctatcggttaccccctccaatggactgccccattgcgctccaccagctgatgctagactgctggcagaaggagaggagcgacaggcctaaatttgggcagattgtcaacatgttggacaaactcatccgcaaccccaacagcttgaagaggacagggacggagagctccagacctaacactgccttgttggatccaagctcccctgaattctctgctgtggtatcagtgggcgattggctccaggccattaaaatggaccggtataaggataacttcacagctgctggttataccacactagaggctgtggtgcacgtgaaccaggaggacctggcaagaattggtatcacagccatcacgcaccagaataagattttgagcagtgtccaggcaatgcgaacccaaatgcagcagatgcacggcagaatggttcccgtctgagccagtactgaataaactcaaaactcttgaaattagtttacctcatccatgcactttaattgaagaactgcactttttttacttcgtcttcgccctctgaaattaaagaaatgaaaaaaaaaaacaatatctgcagcgttgcttggtgcacagattgctgaaactgtggggcttacagaaatgactgccggtcatttgaatgagacctggaacaaatcgtttctcagaagtacttttctgttcatcaccagtctgtaaaatacatgtacctatagaaatagaacactgcctctgagttttgatgctgtatttgctgccagacactgagcttctgagacatccctgattctctctccatttggaattacaaccattgtattttgtttgtggcataaattacagtcatctgtctttcactggaatgaagaccatgcctaggaacattttttaaggactcagctgtggcttttagggcttggttcataccatgggggaaaaaaaagtcctaggagaaagcgacgtggctcattagtgttgcctcttcagtgctcaagccgcctggtggattcctatgacacagggggcctggaaagaaagggaaagtggatttaaaatatatatatacgtaacccaagccccataacccctaactggacaaatgaggtctgtttctttgggcctgaggctgtgccatataaagtcttattttgggactttacaaacttgtcctaactatcttgtggatagtgggctgtgacaatctggaatagagaacgttcacacttcgctcctttaaagaagcgaccccagatctgcaagggagtagattctgctatcttggcctcacagcccttcctgttgattacaaagcccgtggaagaaaacagaacacaccctcctcagttccgtctaaatgtgtttcttctgcttcaattacaccagttctggggcaaagacactgatgaaacaacacccatacctgaaaagaataaatgtgtgactttcaaatcccctttcgcagtgaaagaaacagcaaacacttaagattcagcatctgttctccagttgcactgaggaatgcactgtctcgcagcaccagctctgcagagcccttgccccagactctttgcggttttatttatatgtatttccatatttcattcctgtgtgtcactgctgcattggtgtggcagcaagtgaccaaatgctacaggtcttactatggacaccaggtcaggtgcaaccacacaaaacaaagccagttccatgagctgcctatgatatgcattgcggaagtaacattttacccagggtgtgccattgcagtgatataaatatatttttttcttagactaaatatgagctgactatctcttttgatgtgtgtacataggtgtgagtgtgtctgtatgcgtgcctgtctgtgtgcgggtgtgtgtatgtgcgtagcctcatgcttaggactacccatgaatgttgtggaatgctacacctggagagttctggttttccaccagtttcaagatgaagaactacatgatacagtggacctggagaccatccccttggaaagacaacccagagatgttcagcatcctgtatctacacgcatcctgtatctacacgtgtattttgtagctgtcacactaaccttaataagaattctacagctttggacagaggcattttcaccttaatggtgaagtaatttaaaatataaatccattcaggtgacaacccatcatcaaaattacaaattttctgattgaactcatctgaatcatcagttccttgatggagagagagaaggagatggaatgtgtctggtaaccccaaatggagtacaagtagcctttgttttcctgcataaatggacttgttgaatgcgaacgaatatatgcaattcatatacttttggagatgaacgtagatatgtgtgtcagctttgagatggtgtgtcctggattaatactttgtctcccaatatcacagaaaaatacatgccagtgactcttgaggttaaggtagttgggatgaaatggcctcaggcaatttcacattccctaattacctggaaagttctacagtaattaatatgcagctaactcctgttgccctcacaagagcatcagccttctagaatcggagctccggagtgtgaagattcagtattgatatgatatgtataccaaactccagccaacttactgccatttttcataatctgagtggctgccttgcttatcctaagctgtggttgcagaaaccgtggccatttatataagctataacatcaaatcagggaaaaatgaggaaaaaaaatagattctgaaccatttattgttgaataagtagagaaaatcatcaataaatatttattacattctgacagggtgtgtggcattgtgttctatgccagagtgacaaagttgattcacccctttttggggaccttaatatattttttaagggatgtgcctatgcattgatgcctgaaaaatatgtataaagaaatgaggttgactcttctgagcagttcatcttttccagaggtaagggtaggaggccaacttcagggtctgggtctgagcccgtgggcaagccctggccgagtgagctccaatgctaactcatgtgccgatctctagagcagtgggaaactaccccgctgcaccaaatcaagtagcttcaccttgtgtatgcaggccccaagttattttttagcaatcttacgagtgaaatgttctggtgggttgaaaaacgttcttattttaaagaaaggttgtgctcgctacactgctggtgtgtgcattctgagacctcttgtattcaatctgtgaaggatatgtgtattaatccgtacacccgtatagcctcaatatttgtctgaagacacttaaattctgacccataaaggaaagttctagaagcaatattttcacttatttaacattctccaaacaacatcaagcattgatacacactgaagagtgcgtttattttttgtatcactctaagtatgttggaatatgcaaggactgtggttcaaattagaatgtataaggcatattataatttagttcatactgaataagaaattaacagaacattgttcggttcacacgttccaaactttgagtgatttctggagttagacatagattttctattttgttttaatttgtcaaggtatttttcttcccttcatgaactttaggtacacataacttatgtcatttatttatggtcttttatacctagtttgtaaaattgtaaaatagcaaactaaatgcaaagagtttgcatttgaaaataataaagtagttgccgtatacaaccctgc

SEQ ID NO: 130060 - DNA, 3454 bp, Homo sapiens
  Payload ID: 5447
  Gene Symbol: EPHA4
  Gene Name: EPH receptor A4
  ENST ID: ENST00000409854
  CDS Start-End: 36-2885
agaagcggcaggagcagcgttggcaccggcgaaccatggctgggattttctatttcgccctattttcgtgtctcttcgggatttgcgacgctgtcacaggttccagggtataccccgcgaatgaagttaccttattggattccagatctgttcagggagaacttgggtggatagcaagccctctggaaggagggtgggaggaagtgagtatcatggatgaaaaaaatacaccaatccgaacctaccaagtgtgcaatgtgatggaacccagccagaataactggctacgaactgattggatcacccgagaaggggctcagagggtgtatattgagattaaattcaccttgagggactgcaatagtcttccgggcgtcatggggacttgcaaggagacgtttaacctgtactactatgaatcagacaacgacaaagagcgtttcatcagagagaaccagtttgtcaaaattgacaccattgctgctgatgagagcttcacccaagtggacattggtgacagaatcatgaagctgaacaccgagatccgggatgtagggccattaagcaaaaaggggttttacctggcttttcaggatgtgggggcctgcatcgccctggtatcagtccgtgtgttctataaaaagtgtccactcacagtccgcaatctggcccagtttcctgacaccatcacaggggctgatacgtcttccctggtggaagttcgaggctcctgtgtcaacaactcagaagagaaagatgtgccaaaaatgtactgtggggcagatggtgaatggctggtacccattggcaactgcctatgcaacgctgggcatgaggagcggagcggagaatgccaagcttgcaaaattggatattacaaggctctctccacggatgccacctgtgccaagtgcccaccccacagctactctgtctgggaaggagccacctcgtgcacctgtgaccgaggctttttcagagctgacaacgatgctgcctctatgccctgcacccgtccaccatctgctcccctgaacttgatttcaaatgtcaacgagacatctgtgaacttggaatggagtagccctcagaatacaggtggccgccaggacatttcctataatgtggtatgcaagaaatgtggagctggtgaccccagcaagtgccgaccctgtggaagtggggtccactacaccccacagcagaatggcttgaagaccaccaaagtctccatcactgacctcctagctcataccaattacacctttgaaatctgggctgtgaatggagtgtccaaatataaccctaacccagaccaatcagtttctgtcactgtgaccaccaaccaagcagcaccatcatccattgctttggtccaggctaaagaagtcacaagatacagtgtggcactggcttggctggaaccagatcggcccaatggggtaatcctggaatatgaagtcaagtattatgagaaggatcagaatgagcgaagctatcgtatagttcggacagctgccaggaacacagatatcaaaggcctgaaccctctcacttcctatgttttccacgtgcgagccaggacagcagctggctatggagacttcagtgagcccttggaggttacaaccaacacagtgccttcccggatcattggagatggggctaactccacagtccttctggtctctgtctcgggcagtgtggtgctggtggtaattctcattgcagcttttgtcatcagccggagacggagtaaatacagtaaagccaaacaagaagcggatgaagagaaacatttgaatcaaggtgtaagaacatatgtggacccctttacgtacgaagatcccaaccaagcagtgcgagagtttgccaaagaaattgacgcatcctgcattaagattgaaaaagttataggagttggtgaatttggtgaggtatgcagtgggcgtctcaaagtgcctggcaagagagagatctgtgtggctatcaagactctgaaagctggttatacagacaaacagaggagagacttcctgagtgaggccagcatcatgggacagtttgaccatccgaacatcattcacttggaaggcgtggtcactaaatgtaaaccagtaatgatcataacagagtacatggagaatggctccttggatgcattcctcaggaaaaatgatggcagatttacagtcattcagctggtgggcatgcttcgtggcattgggtctgggatgaagtatttatctgatatgagctatgtgcatcgtgatctggccgcacggaacatcctggtgaacagcaacttggtctgcaaagtgtctgattttggcatgtcccgagtgcttgaggatgatccggaagcagcttacaccaccaggggtggcaagattcctatccggtggactgcgccagaagcaattgcctatcgtaaattcacatcagcaagtgatgtatggagctatggaatcgttatgtgggaagtgatgtcgtacggggagaggccctattgggatatgtccaatcaagatgtgattaaagccattgaggaaggctatcggttaccccctccaatggactgccccattgcgctccaccagctgatgctagactgctggcagaaggagaggagcgacaggcctaaatttgggcagattgtcaacatgttggacaaactcatccgcaaccccaacagcttgaagaggacagggacggagagctccagacctaacactgccttgttggatccaagctcccctgaattctctgctgtggtatcagtgggcgattggctccaggccattaaaatggaccggtataaggataacttcacagctgctggttataccacactagaggctgtggtgcacgtgaaccaggagtaagtactcaacgatgtaacacgaaaggggacctggcaagaattggtatcacagccatcacgcaccagaataagattttgagcagtgtccaggcaatgcgaacccaaatgcagcagatgcacggcagaatggttcccgtctgagccagtactgaataaactcaaaactcttgaaattagtttacctcatccatgcactttaattgaagaactgcactttttttacttcgtcttcgccctctgaaattaaagaaatgaaaaaaaaaaacaatatctgcagcgttgcttggtgcacagattgctgaaactgtggggcttacagaaatgactgccggtcatttgaatgagacctggaacaaatcgtttctcagaagtacttttctgttcatcaccagtctgtaaaatacatgtacctatagaaatagaacactgcctctgagttttgatgctgtatttgctgccagacactgagcttctgagacatccctgattctctctccatttggaattacaaccattgtattttgtttgtggcataaattacagtcatctgtctttcactggaatgaagac

SEQ ID NO: 130061 - DNA, 3363 bp, Homo sapiens
  Payload ID: 5447
  Gene Symbol: EPHA4
  Gene Name: EPH receptor A4
  Uniprot ID: P54764
  ENST ID: ENST00000409938
  CDS Start-End: 276-3236
acgcgtgctcatcttgtgtaaaagtaaaagttgctcatgtcattagctcggctctgagtttgcatgagaaaccagcgcagctctcgagccacgggagaaaacacgatctgctgcggagcccagtgacctgaaactgtagcagtgactcgagacctgtcctctcctcgacgtcgccctataaccctcccgctttatttaggatccgcttttccgagagcagccactcaggcaacccccggaagaagcggcaggagcagcgttggcaccggcgaaccatggctgggattttctatttcgccctattttcgtgtctcttcgggatttgcgacgctgtcacaggttccagggtataccccgcgaatgaagttaccttattggattccagatctgttcagggagaacttgggtggatagcaagccctctggaaggagggtgggaggaagtgagtatcatggatgaaaaaaatacaccaatccgaacctaccaagtgtgcaatgtgatggaacccagccagaataactggctacgaactgattggatcacccgagaaggggctcagagggtgtatattgagattaaattcaccttgagggactgcaatagtcttccgggcgtcatggggacttgcaaggagacgtttaacctgtactactatgaatcagacaacgacaaagagcgtttcatcagagagaaccagtttgtcaaaattgacaccattgctgctgatgagagcttcacccaagtggacattggtgacagaatcatgaagctgaacaccgagatccgggatgtagggccattaagcaaaaaggggttttacctggcttttcaggatgtgggggcctgcatcgccctggtatcagtccgtgtgttctataaaaagtgtccactcacagtccgcaatctggcccagtttcctgacaccatcacaggggctgatacgtcttccctggtggaagttcgaggctcctgtgtcaacaactcagaagagaaagatgtgccaaaaatgtactgtggggcagatggtgaatggctggtacccattggcaactgcctatgcaacgctgggcatgaggagcggagcggagaatgccaagcttgcaaaattggatattacaaggctctctccacggatgccacctgtgccaagtgcccaccccacagctactctgtctgggaaggagccacctcgtgcacctgtgaccgaggctttttcagagctgacaacgatgctgcctctatgccctgcacccgtccaccatctgctcccctgaacttgatttcaaatgtcaacgagacatctgtgaacttggaatggagtagccctcagaatacaggtggccgccaggacatttcctataatgtggtatgcaagaaatgtggagctggtgaccccagcaagtgccgaccctgtggaagtggggtccactacaccccacagcagaatggcttgaagaccaccaaagtctccatcactgacctcctagctcataccaattacacctttgaaatctgggctgtgaatggagtgtccaaatataaccctaacccagaccaatcagtttctgtcactgtgaccaccaaccaagcagcaccatcatccattgctttggtccaggctaaagaagtcacaagatacagtgtggcactggcttggctggaaccagatcggcccaatggggtaatcctggaatatgaagtcaagtattatgagaaggatcagaatgagcgaagctatcgtatagttcggacagctgccaggaacacagatatcaaaggcctgaaccctctcacttcctatgttttccacgtgcgagccaggacagcagctggctatggagacttcagtgagcccttggaggttacaaccaacacagtgccttcccggatcattggagatggggctaactccacagtccttctggtctctgtctcgggcagtgtggtgctggtggtaattctcattgcagcttttgtcatcagccggagacggagtaaatacagtaaagccaaacaagaagcggatgaagagaaacatttgaatcaaggtgtaagaacatatgtggacccctttacgtacgaagatcccaaccaagcagtgcgagagtttgccaaagaaattgacgcatcctgcattaagattgaaaaagttataggagttggtgaatttggtgaggtatgcagtgggcgtctcaaagtgcctggcaagagagagatctgtgtggctatcaagactctgaaagctggttatacagacaaacagaggagagacttcctgagtgaggccagcatcatgggacagtttgaccatccgaacatcattcacttggaaggcgtggtcactaaatgtaaaccagtaatgatcataacagagtacatggagaatggctccttggatgcattcctcaggaaaaatgatggcagatttacagtcattcagctggtgggcatgcttcgtggcattgggtctgggatgaagtatttatctgatatgagctatgtgcatcgtgatctggccgcacggaacatcctggtgaacagcaacttggtctgcaaagtgtctgattttggcatgtcccgagtgcttgaggatgatccggaagcagcttacaccaccaggggtggcaagattcctatccggtggactgcgccagaagcaattgcctatcgtaaattcacatcagcaagtgatgtatggagctatggaatcgttatgtgggaagtgatgtcgtacggggagaggccctattgggatatgtccaatcaagatgtgattaaagccattgaggaaggctatcggttaccccctccaatggactgccccattgcgctccaccagctgatgctagactgctggcagaaggagaggagcgacaggcctaaatttgggcagattgtcaacatgttggacaaactcatccgcaaccccaacagcttgaagaggacagggacggagagctccagacctaacactgccttgttggatccaagctcccctgaattctctgctgtggtatcagtgggcgattggctccaggccattaaaatggaccggtataaggataacttcacagctgctggttataccacactagaggctgtggtgcacgtgaaccaggaggacctggcaagaattggtatcacagccatcacgcaccagaataagattttgagcagtgtccaggcaatgcgaacccaaatgcagcagatgcacggcagaatggttcccgtctgagccagtactgaataaactcaaaactcttgaaattagtttacctcatccatgcactttaattgaagaactgcactttttttacttcgtcttcgccctctgaaattaaagaaatgaaaaaaaaaaacaa

SEQ ID NO: 130062 - DNA, 545 bp, Homo sapiens
  Payload ID: 5447
  Gene Symbol: EPHA4
  Gene Name: EPH receptor A4
  ENST ID: ENST00000415749
  CDS Start-End: 53-169
atttattccactgggatagaagcggcaggagcagcgttggcaccggcgaaccatggctgggattttctatttcgccctattttcgtgtctcttcgggatttgcgacgctgtcacaggttccagggtataccccgcgaatgaagtgggaggaagtgagtatcatggatgaaaaaaatacaccaatccgaacctaccaagtgtgcaatgtgatggaacccagccagaataactggctacgaactgattggatcacccgagaaggggctcagagggtgtatattgagattaaattcaccttgagggactgcaatagtcttccgggcgtcatggggacttgcaaggagacgtttaacctgtactactatgaatcagacaacgacaaagagcgtttcatcagagagaaccagtttgtcaaaattgacaccattgctgctgatgagagcttcacccaagtggacattggtgacagaatcatgaagctgaacaccgagatccgggatgtagggccattaagcaaaaaggggttttacctggcttttcaggat

SEQ ID NO: 130063 - DNA, 584 bp, Homo sapiens
  Payload ID: 5447
  Gene Symbol: EPHA4
  Gene Name: EPH receptor A4
  ENST ID: ENST00000443796
  CDS Start-End: 53-584
atttattccactgggatagaagcggcaggagcagcgttggcaccggcgaaccatggctgggattttctatttcgccctattttcgtgtctcttcgggatttgcgacgctgtcacaggttccagggtataccccgcgaatgaaggtccaccatctgctcccctgaacttgatttcaaatgtcaacgagacatctgtgaacttggaatggagtagccctcagaatacaggtggccgccaggacatttcctataatgtggtatgcaagaaatgtggagctggtgaccccagcaagtgccgaccctgtggaagtggggtccactacaccccacagcagaatggcttgaagaccaccaaagtctccatcactgacctcctagctcataccaattacacctttgaaatctgggctgtgaatggagtgtccaaatataaccctaacccagaccaatcagtttctgtcactgtgaccaccaaccaagcagcaccatcatccattgctttggtccaggctaaagaagtcacaagatacagtgtggcactggcttggctggaaccagatcggcccaatggggtaatcctggaat

SEQ ID NO: 130064 - DNA, 565 bp, Homo sapiens
  Payload ID: 5447
  Gene Symbol: EPHA4
  Gene Name: EPH receptor A4
  ENST ID: ENST00000441679
  CDS Start-End: 1-565
agtttcatggatctctttctagtactcatttcacttgcaaaattggatattacaaggctctctccacggatgccacctgtgccaagtgcccaccccacagctactctgtctgggaaggagccacctcgtgcacctgtgaccgaggctttttcagagctgacaacgatgctgcctctatgccctgcacccgtccaccatctgctcccctgaacttgatttcaaatgtcaacgagacatctgtgaacttggaatggagtagccctcagaatacaggtggccgccaggacatttcctataatgtggtatgcaagaaatgtggagctggtgaccccagcaagtgccgaccctgtggaagtggggtccactacaccccacagcagaatggcttgaagaccaccaaagtctccatcactgacctcctagctcataccaattacacctttgaaatctgggctgtgaatggagtgtccaaatataaccctaacccagaccaatcagtttctgtcactgtgaccaccaaccaagcagcaccatcatccattgctttggtccaggctaaagaagt

SEQ ID NO: 130065 - DNA, 617 bp, Homo sapiens
  Payload ID: 5447
  Gene Symbol: EPHA4
  Gene Name: EPH receptor A4
  ENST ID: ENST00000434266
  CDS Start-End: 343-617
agctcggctctgagtttgcatgagaaaccagcgcagctctcgagccacgggagaaaacacgatctgctgcggagcccagtgacctgaaactgtagcagtgactcgagacctgtcctctcctcgacgtcgccctataaccctcccgctttatttaggatccgcttttccgagagcagccactcaggcaacccccggaaggtttgttaggagtttctccttgaaacgctttccgattccatcttttgaaatccagcaggcgagagtcacgacagactccaggacctcttgagcgctgtccgcagccccacgaagcggcaggagcagcgttggcaccggcgaaccatggctgggattttctatttcgccctattttcgtgtctcttcgggatttgcgacgctgtcacaggttccagggtataccccgcgaatgaagttaccttattggattccagatctgttcagggagaacttgggtggatagcaagccctctggaaggagggtgggaggaagtgagtatcatggatgaaaaaaatacaccaatccgaacctaccaagtgtgcaatgtgatggaacccagccagaataactggctacgaactgattggatcacccgaga

SEQ ID NO: 130066 - DNA, 492 bp, Homo sapiens
  Payload ID: 5447
  Gene Symbol: EPHA4
  Gene Name: EPH receptor A4
  ENST ID: ENST00000424339
  CDS Start-End: 1-114
gcctatcgtaaattcacatcagcaagtgatgtatggagctatggaatcgttatgtgggaagtgatgtcgtacggggagaggccctattgggatatgtccaatcaagatacctaacactgccttgttggatccaagctcccctgaattctctgctgtggtatcagtgggcgattggctccaggccattaaaatggaccggtataaggataacttcacagctgctggttataccacactagaggctgtggtgcacgtgaaccaggaggacctggcaagaattggtatcacagccatcacgcaccagaataagattttgagcagtgtccaggcaatgcgaacccaaatgcagcagatgcacggcagaatggttcccgtctgagccagtactgaataaactcaaaactcttgaaattagtttacctcatccatgcactttaattgaagaactgcactttttttacttcgtcttcgccctctgaaattaaagaaatg

SEQ ID NO: 130067 - DNA, 552 bp, Homo sapiens
  Payload ID: 5447
  Gene Symbol: EPHA4
  Gene Name: EPH receptor A4
  ENST ID: ENST00000419964
  CDS Start-End: 173-552
aaaattcaagccagtgatttcctacgggtggaagacgagtctctgattgtcccccaacacatcttgagaaagagagaatactttcgttaccttattggattccagatctgttcagggagaacttgggtggatagcaagccctctggaaggagggtgggaggaagtgagtatcatggatgaaaaaaatacaccaatccgaacctaccaagtgtgcaatgtgatggaacccagccagaataactggctacgaactgattggatcacccgagaaggggctcagagggtgtatattgagattaaattcaccttgagggactgcaatagtcttccgggcgtcatggggacttgcaaggagacgtttaacctgtactactatgaatcagacaacgacaaagagcgtttcatcagagagaaccagtttgtcaaaattgacaccattgctgctgatgagagcttcacccaagtggacattggtgacagaatcatgaagctgaacaccgagatccgggatgtagggccattaagcaaaaaggggttttacctggcttttca

SEQ ID NO: 130068 - DNA, 558 bp, Homo sapiens
  Payload ID: 5447
  Gene Symbol: EPHA4
  Gene Name: EPH receptor A4
  ENST ID: ENST00000541600
  CDS Start-End: 111-558
accggccgggcccgcccccttggcaatgtcttcagcccgctgctctcctaacttaagcatttattccactgggatagaagcggcaggagcagcgttggcaccggcgaaccatggctgggattttctatttcgccctattttcgtgtctcttcgggatttgcgacgctgtcacaggttccagggtataccccgcgaatgaagttaccttattggattccagatctgttcagggagaacttgggtggatagcaagccctctggaaggagggtgggaggaagtgagtatcatggatgaaaaaaatacaccaatccgaacctaccaagtgtgcaatgtgatggaacccagccagaataactggctacgaactgattggatcacccgagaaggggctcagagggtgtatattgagattaaattcaccttgagggactgcaatagtcttccgggcgtcatggggacttgcaaggagacgtttaacctgtactactatgaatcagacaacgacaaagagcgtttcatcagagagaaccagtttgtcaaaattgacaccattgctg

SEQ ID NO: 130069 - DNA, 8266 bp, Homo sapiens
  Payload ID: 5448
  Gene Symbol: EPHA5
  Gene Name: EPH receptor A5
  Uniprot ID: P54756
  ENST ID: ENST00000273854
  CDS Start-End: 602-3715
tccctcccctcttcagcactcagcccgcagctatttccttctgccagtctctttgaactctggatctttgcttttgctcgctgctctcctgtttttcattctccacattttctcaagtcctctttctttatccttagccaccctgcttttttcctccttttttaaaaaatcggagatttcgtcttaaaatgatttgccttccttaccttcgtccatttcaacactgaaggctgcaaagaaccttcacctttcccctagtggtatttaaaaattctcaatccgtaaaaagtctttttgaaaggcaaaggaacaggacccaggaccctctcgacacccttgatccgagtccagatctgcactagcaaccagaactaatatttcatttaaccccaccaaagggggaggcgagaggagccagaagcaaacttcagctgtctcagccggatccgtggttcctacatttggaggagccgcgtgccagaaggcgtaggaccccaaggggggacaaggaggactcccgagtctcccttcgccgctctgcgaggccgaagcggtggactgagccgctcgggacagcggcaccggaggaggctcggagaagatgcggggctcggggccccggggtgcgggacgccggcggcccccaagcggcggcggcgacacccccatcaccccagcgtccctggccggctgctactctgcacctcgacgggctcccctctggacgtgccttctcctgtgcgccgcactccggaccctcctggccagccccagcaacgaagtgaatttattggattcacgcactgtcatgggggacctgggatggattgcttttccaaaaaatgggtgggaagagattggtgaagtggatgaaaattatgcccctatccacacataccaagtatgcaaagtgatggaacagaatcagaataactggcttttgaccagttggatctccaatgaaggtgcttccagaatcttcatagaactcaaatttaccctgcgggactgcaacagccttcctggaggactggggacctgtaaggaaacctttaatatgtattactttgagtcagatgatcagaatgggagaaacatcaaggaaaaccaatacatcaaaattgataccattgctgccgatgaaagctttacagaacttgatcttggtgaccgtgttatgaaactgaatacagaggtcagagatgtaggacctctaagcaaaaagggattttatcttgcttttcaagatgttggtgcttgcattgctctggtttctgtgcgtgtatactataaaaaatgcccttctgtggtacgacacttggctgtcttccctgacaccatcactggagctgattcttcccaattgctcgaagtgtcaggctcctgtgtcaaccattctgtgaccgatgaacctcccaaaatgcactgcagcgccgaaggggagtggctggtgcccatcgggaaatgcatgtgcaaggcaggatatgaagagaaaaatggcacctgtcaagtgtgcagacctgggttcttcaaagcctcacctcacatccagagctgcggcaaatgtccacctcacagttatacccatgaggaagcttcaacctcttgtgtctgtgaaaaggattatttcaggagagagtctgatccacccacaatggcatgcacaagacccccctctgctcctcggaatgccatctcaaatgttaatgaaactagtgtctttctggaatggattccgcctgctgacactggtggaaggaaagacgtgtcatattatattgcatgcaagaagtgcaactcccatgcaggtgtgtgtgaggagtgtggcggtcatgtcaggtaccttccccggcaaagcggcctgaaaaacacctctgtcatgatggtggatctactcgctcacacaaactatacctttgagattgaggcagtgaatggagtgtccgacttgagcccaggagcccggcagtatgtgtctgtaaatgtaaccacaaatcaagcagctccatctccagtcaccaatgtgaaaaaagggaaaattgcaaaaaacagcatctctttgtcttggcaagaaccagatcgtcccaatggaatcatcctagagtatgaaatcaagtattttgaaaaggaccaagagaccagctacacgattatcaaatctaaagagacaactattactgcagagggcttgaaaccagcttcagtttatgtcttccaaattcgagcacgtacagcagcaggctatggtgtcttcagtcgaagatttgagtttgaaaccaccccagtgtttgcagcatccagcgatcaaagccagattcctgtaattgctgtgtctgtgacagtgggagtcattttgttggcagtggttatcggcgtcctcctcagtggaagttgctgcgaatgtggctgtgggagggcttcttccctgtgcgctgttgcccatccaagcctaatatggcggtgtggctacagcaaagcaaaacaagatccagaagaggaaaagatgcattttcataatgggcacattaaactgccaggagtaagaacttacattgatccacatacctatgaggatcccaatcaagctgtccacgaatttgctaaggagatagaagcatcatgtatcaccattgagagagttattggagcaggtgaatttggtgaagtttgtagtggacgtttgaaactaccaggaaaaagagaattacctgtggctatcaaaacccttaaagtaggctatactgaaaagcaacgcagagatttcctaggtgaagcaagtatcatgggacagtttgatcatcctaacatcatccatttagaaggtgtggtgaccaaaagtaaaccagtgatgatcgtgacagagtatatggagaatggctctttagatacatttttgaagaaaaacgatgggcagttcactgtgattcagcttgttggcatgctgagaggtatctctgcaggaatgaagtacctttctgacatgggctatgtgcatagagatcttgctgccagaaacatcttaatcaacagtaaccttgtgtgcaaagtgtctgactttggactttcccgggtactggaagatgatcccgaggcagcctacaccacaaggggaggaaaaattccaatcagatggactgccccagaagcaatagctttccgaaagtttacttctgccagtgatgtctggagttatggaatagtaatgtgggaagttgtgtcttatggagagagaccctactgggagatgaccaatcaagatgtgattaaagcggtagaggaaggctatcgtctgccaagccccatggattgtcctgctgctctctatcagttaatgctggattgctggcagaaagagcgaaatagcaggcccaagtttgatgaaatagtcaacatgttggacaagctgatacgtaacccaagtagtctgaagacgctggttaatgcatcctgcagagtatctaatttattggcagaacatagcccactaggatctggggcctacagatcagtaggtgaatggctagaggcaatcaagatgggccggtatacagagattttcatggaaaatggatacagttcaatggacgctgtggctcaggtgaccttggaggatttgagacggcttggagtgactcttgtcggtcaccagaagaagatcatgaacagccttcaagaaatgaaggtgcagctggtaaacggaatggtgccattgtaacttcatgtaaatgtcgcttcttcaagtgaatgattctgcactttgtaaacagcactgagatttattttaacaaaaaaagggggaaaagggaaaacagtgatttctaaaccttagaaaacatttgcctcagccacagaatttgtaatcatggttttactgaagtatccagttcttagtccttagtcttcatttttcatgaagcaaacatatcttgcattaaaagggacatgaagttagacatcatcttaagttacaacaacagaatccttcccactacttctacaaaattttgtacatgaaatatataattatatagcacttttatagactgaattaaggcaacccctttcaaaacttccagggatctacttgaaaggaaatgttttatagccatttgtgagctaacaaaagctacagtttactgaagtttacttcaagtcttaattgtctacaaaagtgtattgaagagcaatatgattagattatttcttaatagatatcttcttttgtaattttaaaatgctgttacacagcgttaagttatagaaactagtgtgtaaacatgttgcttgatcaagaaaaagtacaatacagggtgtatatttattttttgtgttataaagtttacttttagttgctcttctagagattattaggtaataaatgtgtatatactgtataatttgcaatatacccaggaactgatttaagatggaattgtgtgtgtgtttgcttgcacatgtgtgtgttaccattctgcttgcatttctaatagtgtttcaattttagcaacatataggagcaagtgttccagaatgtaatatgaataggagaaatagggaagcagtaaaacaaaatttaacacaagcttgtgtctcttttcctctcatgtgtccaaaagctaatctctttattcactaaaaggaaatgtgtataagactaaatcccctttggctttttaaaaacattttgtgatatcagtgacaatgcagttcttctagccattaatcttgtacccctgtaagaaatttcacctttctgagtcctgaaaagtatcttgtcaagcaaagttgacaccgaagggcacattttcagcaggatgtagaaggatttaactgtgcaggcttctgttaatgttgttaaatccaggcacatagcacgaagcatcacccttaagtgttaatccgttgtaaccattcccattttgactcagttctagaaattttgactctaaggcagcaatggaattatgacaaatatatatatatacacatacacacacacaaatatatatatatgcttatttcccttcagaattttatttcaataattgataagttttatttttaatggatgtttattcatttgttaatttcagtttgtattcagttacatggctttgagtttattttattgaaccaatccaaggtattatgtaattaggcttattaaggaatataacatatcttctatgtatgctctatataccacacatgatgaagacttatatttgtgatacaaattatgcagtgtattagaaattgtccaaaactgagctcctgagataaccaacatttttgtattattacactttataaaaattatggaatgtcatgtgattagtcaaaatcagagcatttaaataaaatacagcctactcatgattatcaatgttaatagtacagtagatcagagaagcctggattaatgaaatttatcagaaatatagccacgttatattaatggtattcttttttccaagcacttgttttatttgaatattagcacatataagaataaacttttgggaaataactacttcctattctgcccaccctttacttaagcagtaaagtacctcttttctaaagaaccaggaaacatcaaaataaccacaacaaaaatctaaacagttttcaaataatacattcagttctcataataataagggctatataccatgggtccacacaaactgtgctgcaaacatataatctattagtttagtaaaatttccagagatgtgaatttaatattttcttgataaaatcataaaaaagcatcaccattattaaagatgcatttgttcatttcaataaacagaaattaatgaaacaaattacttttgtacaaaataaatgatgattatgtggcactttattgaattttatagaaatattccaatctaagtgataaagtaacaactgagaaacttcagaatgaaagccttattgattcaaaaggaaaattaccatatgctttagggctgatgaacttgccacaattgcttagacataacaaagatattttctacattgttttccaactttatatgctgaaagataattaggaggtccgggtggagtgtatctaaatgactagaactttaagttgcaatatagattttctctttttaacaaaggaagaatataaattaatttggatcaaatttatttgccttctttgcaatcttggtgatcattttggaaagtaaattgaaaggaaagttaaatagccacatagttttcttttgcatctcaatttggttgagaatttctaaggaaggttaatatgactttagaatgaataaagagactgtcaaacaacaagtactctccctaaaaaagaggaaagaatgccttcctaaaatatttgtttcctattgtatatgtcaccaattggaaaatgccaatctcatctgcaagtgtgagaaatggaacaaggagaggagccaactctagtaaaatgtagtgaggccataatccaaggcaaagtttaacaaatcttgattgtgtaatttcttattctgttgattcattttgtcacccaccagactaccaaaaataaagcacagacatgacaattttagtatatacaacagatttggcaaataatacataatcttattgtaattgccagtagcaatatcttaaggggcatgagtctttcacagtattggactttgaaaaattggtacagggagtaattttcaacagactgatacttgaagtcactcaattactactttgacctatcataatttgtttctaatcttgtcatttgctcatatatactattaatataaccagttgctcttttcataatgtactatttctatgtaaagatgtaaagattttgattttcctatgttttaaaattgtaatgtgcatgatcttttatttcttgtgtttcaattaccaagtcagtattctaaggttgtaagattactgtaaaaattatattccaatattttatctaaacttaagtgtggccagcattattggtttcagagttgcctaaacaacacagaatatccttaattcagtttgtaaaagagttttgaccagtgtaaaaaagtgaagacacagtttcatgtttcaagtttaaaatggaaagttaatatcatttgagcacttatgtgttttcatgtcttctacttaatctgtatgtgaaagtaaaatatttttaacaccattatttatgccatgtaaagtgggttctcagaagcacaagcacagatatttaccttctgaagacatttttggctataaaagtgcattggatggcaaacactatttgagtcaggtgttagaaatttattagatgtattatattacatagtagaataaggtccctttctcattttgtttttcctaaaaataagaaaaaaaagaagtgtgatagtaaactgtctttgctaatgtcctgccagatgtttaacttcaaattaagcaaaaagtaggtacaatatgatgatgatcctgatgatgatgatgatgatgatgatgaagaataaatggaatcaaaatgctagctttatttgacattaataagtaaaataagtcatcattttttcaactctgtagcacagctgtttacattgaataattttctctattgtgctgttaattatatagtaatgtatcaaaatagaaataggaactttcttttcatttcttattcatttatgaagaaatcttttcacacataaatgattgaatgttcttgttcagaatgaccacataatcattgcttagaagaagataccaattcttttaaaagaaaaaaagtctgtttataataatcagaatcaaatgttgtttgtttcttctaaacgttaatggagaaaattgaaggtggtaaaatgtcatgtttattcaggctgggaactgtattcacagtagaagtttcagtggtcaacatatctatgactctttaggctgctgtagttttacagtcaattatttaaaagtgagtagttacatttataagagcctgagaatacttagactcagtcatttgttagtatttttaccaaaatctcttagtttcagacatgtcagaagcagctatatagcatatcttattctatgatatacatcaggctatctcaagttcctgtctcacagttaattcaaagaaggattaggatttctgtattttttctcatttgaatctttatgtgcatttggtttgtgtacatgctttttgtagtgtaagatatgaaattttatattttttcagaaaataaaaaccctttgaatacagtta

SEQ ID NO: 130070 - DNA, 3427 bp, Homo sapiens
  Payload ID: 5448
  Gene Symbol: EPHA5
  Gene Name: EPH receptor A5
  Uniprot ID: P54756
  ENST ID: ENST00000354839
  CDS Start-End: 194-3241
gaggagccagaagcaaacttcagctgtctcagccggatccgtggttcctacatttggaggagccgcgtgccagaaggcgtaggaccccaaggggggacaaggaggactcccgagtctcccttcgccgctctgcgaggccgaagcggtggactgagccgctcgggacagcggcaccggaggaggctcggagaagatgcggggctcggggccccggggtgcgggacgccggcggcccccaagcggcggcggcgacacccccatcaccccagcgtccctggccggctgctactctgcacctcgacgggctcccctctggacgtgccttctcctgtgcgccgcactccggaccctcctggccagccccagcaacgaagtgaatttattggattcacgcactgtcatgggggacctgggatggattgcttttccaaaaaatgggtgggaagagattggtgaagtggatgaaaattatgcccctatccacacataccaagtatgcaaagtgatggaacagaatcagaataactggcttttgaccagttggatctccaatgaaggtgcttccagaatcttcatagaactcaaatttaccctgcgggactgcaacagccttcctggaggactggggacctgtaaggaaacctttaatatgtattactttgagtcagatgatcagaatgggagaaacatcaaggaaaaccaatacatcaaaattgataccattgctgccgatgaaagctttacagaacttgatcttggtgaccgtgttatgaaactgaatacagaggtcagagatgtaggacctctaagcaaaaagggattttatcttgcttttcaagatgttggtgcttgcattgctctggtttctgtgcgtgtatactataaaaaatgcccttctgtggtacgacacttggctgtcttccctgacaccatcactggagctgattcttcccaattgctcgaagtgtcaggctcctgtgtcaaccattctgtgaccgatgaacctcccaaaatgcactgcagcgccgaaggggagtggctggtgcccatcgggaaatgcatgtgcaaggcaggatatgaagagaaaaatggcacctgtcaagtgtgcagacctgggttcttcaaagcctcacctcacatccagagctgcggcaaatgtccacctcacagttatacccatgaggaagcttcaacctcttgtgtctgtgaaaaggattatttcaggagagagtctgatccacccacaatggcatgcacaagacccccctctgctcctcggaatgccatctcaaatgttaatgaaactagtgtctttctggaatggattccgcctgctgacactggtggaaggaaagacgtgtcatattatattgcatgcaagaagtgcaactcccatgcaggtgtgtgtgaggagtgtggcggtcatgtcaggtaccttccccggcaaagcggcctgaaaaacacctctgtcatgatggtggatctactcgctcacacaaactatacctttgagattgaggcagtgaatggagtgtccgacttgagcccaggagcccggcagtatgtgtctgtaaatgtaaccacaaatcaagcagctccatctccagtcaccaatgtgaaaaaagggaaaattgcaaaaaacagcatctctttgtcttggcaagaaccagatcgtcccaatggaatcatcctagagtatgaaatcaagtattttgaaaaggaccaagagaccagctacacgattatcaaatctaaagagacaactattactgcagagggcttgaaaccagcttcagtttatgtcttccaaattcgagcacgtacagcagcaggctatggtgtcttcagtcgaagatttgagtttgaaaccaccccagtgtttgcagcatccagcgatcaaagccagattcctgtaattgctgtgtctgtgacagtgggagtcattttgttggcagtggttatcggcgtcctcctcagtggaaggcggtgtggctacagcaaagcaaaacaagatccagaagaggaaaagatgcattttcataatgggcacattaaactgccaggagtaagaacttacattgatccacatacctatgaggatcccaatcaagctgtccacgaatttgctaaggagatagaagcatcatgtatcaccattgagagagttattggagcaggtgaatttggtgaagtttgtagtggacgtttgaaactaccaggaaaaagagaattacctgtggctatcaaaacccttaaagtaggctatactgaaaagcaacgcagagatttcctaggtgaagcaagtatcatgggacagtttgatcatcctaacatcatccatttagaaggtgtggtgaccaaaagtaaaccagtgatgatcgtgacagagtatatggagaatggctctttagatacatttttgaagaaaaacgatgggcagttcactgtgattcagcttgttggcatgctgagaggtatctctgcaggaatgaagtacctttctgacatgggctatgtgcatagagatcttgctgccagaaacatcttaatcaacagtaaccttgtgtgcaaagtgtctgactttggactttcccgggtactggaagatgatcccgaggcagcctacaccacaaggggaggaaaaattccaatcagatggactgccccagaagcaatagctttccgaaagtttacttctgccagtgatgtctggagttatggaatagtaatgtgggaagttgtgtcttatggagagagaccctactgggagatgaccaatcaagatgtgattaaagcggtagaggaaggctatcgtctgccaagccccatggattgtcctgctgctctctatcagttaatgctggattgctggcagaaagagcgaaatagcaggcccaagtttgatgaaatagtcaacatgttggacaagctgatacgtaacccaagtagtctgaagacgctggttaatgcatcctgcagagtatctaatttattggcagaacatagcccactaggatctggggcctacagatcagtaggtgaatggctagaggcaatcaagatgggccggtatacagagattttcatggaaaatggatacagttcaatggacgctgtggctcaggtgaccttggaggatttgagacggcttggagtgactcttgtcggtcaccagaagaagatcatgaacagccttcaagaaatgaaggtgcagctggtaaacggaatggtgccattgtaacttcatgtaaatgtcgcttcttcaagtgaatgattctgcactttgtaaacagcactgagatttattttaacaaaaaaagggggaaaagggaaaacagtgatttctaaaccttagaaaacatttgcctcagccacagaatttgtaatcatggttttactgaagtatccagttcttagtccttagtct

SEQ ID NO: 130071 - DNA, 3662 bp, Homo sapiens
  Payload ID: 5448
  Gene Symbol: EPHA5
  Gene Name: EPH receptor A5
  ENST ID: ENST00000432638
  CDS Start-End: 319-2943
aaaaagtctttttgaaaggcaaaggaacaggacccaggaccctctcgacacccttgatccgagtccagatctgcactagcaaccagaactaatatttcatttaaccccaccaaagggggaggcgagaggagccagaagcaaacttcagctgtctcagccggatccgtggttcctacatttggaggagccgcgtgccagaaggcgtaggaccccaaggggggacaaggaggactcccgagtctcccttcgccgctctgcgaggccgaagcggtggactgagccgctcgggacagcggcaccggaggaggctcggagaagatgcggggctcggggccccggggtgcgggacgccggcggcccccaagcggcggcggcgacacccccatcaccccagcgtccctggccggctgctactctgcacctcgacgggctcccctctggacgtgccttctcctgtgcgccgcactccggaccctcctggccagccccagcaacgaagtgaatttattggattcacgcactgtcatgggggacctgggatggattgcttttccaaaaaatgggtgggaagagattggtgaagtggatgaaaattatgcccctatccacacataccaagtatgcaaagtgatggaacagaatcagaataactggcttttgaccagttggatctccaatgaaggtgcttccagaatcttcatagaactcaaatttaccctgcgggactgcaacagccttcctggaggactggggacctgtaaggaaacctttaatatgtattactttgagtcagatgatcagaatgggagaaacatcaaggaaaaccaatacatcaaaattgataccattgctgccgatgaaagctttacagaacttgatcttggtgaccgtgttatgaaactgaatacagaggtcagagatgtaggacctctaagcaaaaagggattttatcttgcttttcaagatgttggtgcttgcattgctctggtttctgtgcgtgtatactataaaaaatgcccttctgtggtacgacacttggctgtcttccctgacaccatcactggagctgattcttcccaattgctcgaagtgtcaggctcctgtgtcaaccattctgtgaccgatgaacctcccaaaatgcactgcagcgccgaaggggagtggctggtgcccatcgggaaatgcatgtgcaaggcaggatatgaagagaaaaatggcacctgtcaagctccatctccagtcaccaatgtgaaaaaagggaaaattgcaaaaaacagcatctctttgtcttggcaagaaccagatcgtcccaatggaatcatcctagagtatgaaatcaagtattttgaaaaggaccaagagaccagctacacgattatcaaatctaaagagacaactattactgcagagggcttgaaaccagcttcagtttatgtcttccaaattcgagcacgtacagcagcaggctatggtgtcttcagtcgaagatttgagtttgaaaccaccccagtgtcagttgcagcatccagcgatcaaagccagattcctgtaattgctgtgtctgtgacagtgggagtcattttgttggcagtggttatcggcgtcctcctcagtggaagttgctgcgaatgtggctgtgggagggcttcttccctgtgcgctgttgcccatccaagcctaatatggcggtgtggctacagcaaagcaaaacaagatccagaagaggaaaagatgcattttcataatgggcacattaaactgccaggagtaagaacttacattgatccacatacctatgaggatcccaatcaagctgtccacgaatttgctaaggagatagaagcatcatgtatcaccattgagagagttattggagcaggtgaatttggtgaagtttgtagtggacgtttgaaactaccaggaaaaagagaattacctgtggctatcaaaacccttaaagtaggctatactgaaaagcaacgcagagatttcctaggtgaagcaagtatcatgggacagtttgatcatcctaacatcatccatttagaaggtgtggtgaccaaaagtaaaccagtgatgatcgtgacagagtatatggagaatggctctttagatacatttttgaagaaaaacgatgggcagttcactgtgattcagcttgttggcatgctgagaggtatctctgcaggaatgaagtacctttctgacatgggctatgtgcatagagatcttgctgccagaaacatcttaatcaacagtaaccttgtgtgcaaagtgtctgactttggactttcccgggtactggaagatgatcccgaggcagcctacaccacaaggggaggaaaaattccaatcagatggactgccccagaagcaatagctttccgaaagtttacttctgccagtgatgtctggagttatggaatagtaatgtgggaagttgtgtcttatggagagagaccctactgggagatgaccaatcaagatgtgattaaagcggtagaggaaggctatcgtctgccaagccccatggattgtcctgctgctctctatcagttaatgctggattgctggcagaaagagcgaaatagcaggcccaagtttgatgaaatagtcaacatgttggacaagctgatacgtaacccaagtagtctgaagacgctggttaatgcatcctgcagagtatctaatttattggcagaacatagcccactaggatctggggcctacagatcagtaggtgaatggctagaggcaatcaagatgggccggtatacagagattttcatggaaaatggatacagttcaatggacgctgtggctcaggtgaccttggaggatttgagacggcttggagtgactcttgtcggtcaccagaagaagatcatgaacagccttcaagaaatgaaggtgcagctggtaaacggaatggtgccattgtaacttcatgtaaatgtcgcttcttcaagtgaatgattctgcactttgtaaacagcactgagatttattttaacaaaaaaagggggaaaagggaaaacagtgatttctaaaccttagaaaacatttgcctcagccacagaatttgtaatcatggttttactgaagtatccagttcttagtccttagtcttcatttttcatgaagcaaacatatcttgcattaaaagggacatgaagttagacatcatcttaagttacaacaacagaatccttcccactacttctacaaaattttgtacatgaaatatataattatatagcacttttatagactgaattaaggcaacccctttcaaaacttccagggatctacttgaaaggaaatgttttatagccatttgtgagctaacaaaagctacagtttactgaagtttacttcaagtcttaattgtctacaaaagtgtattgaagagcaatatgattagattatttcttaatagatatcttcttttgtaattttaaaatgctgttacacagcgttaagttatagaaactagtgtgtaaacatgttgcttgatcaagaaaaagtacaatacagggtgtatatttattttttgtgttataaagtttacttttagttgctcttctagagattattaggtaataaatgtgtatatactgtataatttgcaatatacccaggaactgatttaagatggaatt

SEQ ID NO: 130072 - DNA, 5176 bp, Homo sapiens
  Payload ID: 5448
  Gene Symbol: EPHA5
  Gene Name: EPH receptor A5
  ENST ID: ENST00000511294
  CDS Start-End: 754-3768
ccagacacagcaggagcgcgccttggcggtgcagtttcaacctcgacttcgcagccgcgcacacaccgcctgctccccgagcagcgggaaccgcagcagctcctgggccgccgcagcgcagctccgcgctcctaccggccggcagccgtcagtccctcccctcttcagcactcagcccgcagctatttccttctgccagtctctttgaactctggatctttgcttttgctcgctgctctcctgtttttcattctccacattttctcaagtcctctttctttatccttagccaccctgcttttttcctccttttttaaaaaatcggagatttcgtcttaaaatgatttgccttccttaccttcgtccatttcaacactgaaggctgcaaagaaccttcacctttcccctagtggtatttaaaaattctcaatccgtaaaaagtctttttgaaaggcaaaggaacaggacccaggaccctctcgacacccttgatccgagtccagatctgcactagcaaccagaactaatatttcatttaaccccaccaaagggggaggcgagaggagccagaagcaaacttcagctgtctcagccggatccgtggttcctacatttggaggagccgcgtgccagaaggcgtaggaccccaaggggggacaaggaggactcccgagtctcccttcgccgctctgcgaggccgaagcggtggactgagccgctcgggacagcggcaccggaggaggctcggagaagatgcggggctcggggccccggggtgcgggacgccggcggcccccaagcggcggcggcgacacccccatcaccccagcgtccctggccggctgctactctgcacctcgacgggctcccctctggacgtgccttctcctgtgcgccgcactccggaccctcctggccagccccagcaacgaagtgaatttattggattcacgcactgtcatgggggacctgggatggattgcttttccaaaaaatgggtgggaagagattggtgaagtggatgaaaattatgcccctatccacacataccaagtatgcaaagtgatggaacagaatcagaataactggcttttgaccagttggatctccaatgaaggtgcttccagaatcttcatagaactcaaatttaccctgcgggactgcaacagccttcctggaggactggggacctgtaaggaaacctttaatatgtattactttgagtcagatgatcagaatgggagaaacatcaaggaaaaccaatacatcaaaattgataccattgctgccgatgaaagctttacagaacttgatcttggtgaccgtgttatgaaactgaatacagaggtcagagatgtaggacctctaagcaaaaagggattttatcttgcttttcaagatgttggtgcttgcattgctctggtttctgtgcgtgtatactataaaaaatgcccttctgtggtacgacacttggctgtcttccctgacaccatcactggagctgattcttcccaattgctcgaagtgtcaggctcctgtgtcaaccattctgtgaccgatgaacctcccaaaatgcactgcagcgccgaaggggagtggctggtgcccatcgggaaatgcatgtgcaaggcaggatatgaagagaaaaatggcacctgtcaagtgtgcagacctgggttcttcaaagcctcacctcacatccagagctgcggcaaatgtccacctcacagttatacccatgaggaagcttcaacctcttgtgtctgtgaaaaggattatttcaggagagagtctgatccacccacaatggcatgcacaagacccccctctgctcctcggaatgccatctcaaatgttaatgaaactagtgtctttctggaatggattccgcctgctgacactggtggaaggaaagacgtgtcatattatattgcatgcaagaagtgcaactcccatgcaggtgtgtgtgaggagtgtggcggtcatgtcaggtaccttccccggcaaagcggcctgaaaaacacctctgtcatgatggtggatctactcgctcacacaaactatacctttgagattgaggcagtgaatggagtgtccgacttgagcccaggagcccggcagtatgtgtctgtaaatgtaaccacaaatcaagcagctccatctccagtcaccaatgtgaaaaaagggaaaattgcaaaaaacagcatctctttgtcttggcaagaaccagatcgtcccaatggaatcatcctagagtatgaaatcaagtattttgaaaaggaccaagagaccagctacacgattatcaaatctaaagagacaactattactgcagagggcttgaaaccagcttcagtttatgtcttccaaattcgagcacgtacagcagcaggctatggtgtcttcagtcgaagatttgagtttgaaaccaccccagtgtcagttgcagcatccagcgatcaaagccagattcctgtaattgctgtgtctgtgacagtgggagtcattttgttggcagtggttatcggcgtcctcctcagtggaagttgctgcgaatgtggctgtgggagggcttcttccctgtgcgctgttgcccatccaagcctaatatggcggtgtggctacagcaaagcaaaacaagatccagaagaggaaaagatgcattttcataatgggcacattaaactgccaggagtaagaacttacattgatccacatacctatgaggatcccaatcaagctgtccacgaatttgctaaggagatagaagcatcatgtatcaccattgagagagttattggagcaggtgaatttggtgaagtttgtagtggacgtttgaaactaccaggaaaaagagaattacctgtggctatcaaaacccttaaagtaggctatactgaaaagcaacgcagagatttcctaggtgaagcaagtatcatgggacagtttgatcatcctaacatcatccatttagaaggtgtggtgaccaaaagtaaaccagtgatgatcgtgacagagtatatggagaatggctctttagatacatttttgaagaaaaacgatgggcagttcactgtgattcagcttgttggcatgctgagaggtatctctgcaggaatgaagtacctttctgacatgggctatgtgcatagagatcttgctgccagaaacatcttaatcaacagtaaccttgtgtgcaaagtgtctgactttggactttcccgggtactggaagatgatcccgaggcagcctacaccacaaggggaggaaaaattccaatcagatggactgccccagaagcaatagctttccgaaagtttacttctgccagtgatgtctggagttatggaatagtaatgtgggaagttgtgtcttatggagagagaccctactgggagatgaccaatcaagatgtgattaaagcggtagaggaaggctatcgtctgccaagccccatggattgtcctgctgctctctatcagttaatgctggattgctggcagaaagagcgaaatagcaggcccaagtttgatgaaatagtcaacatgttggacaagctgatacgtaacccaagtagtctgaagacgctggttaatgcatcctgcagagtatctaatttattggcagaacatagcccactaggatctggggcctacagatcagtaggtgaatggctagaggcaatcaagatgggccggtatacagagattttcatggaaaatggatacagttcaatggacgctgtggctcaggtgaccttggagtgagtaatttttctgataatttttacataattgctggggcaagaaaaattgttcaaaaaccaatctggatgaggtaagggaaatcagttaacctttgcggatgtgtggcagctctcaaagaagcctcatcatctttagcctgtattgttaacaactgcatggttaatgctacatgtggccagtatctttgcttctttgcttcaaacaaataacattggcatacttgaataattggaataacagctccttggcaaaatactggtgttttgtgttgtggaaaagatgttttcttgacaagtttttttatactggtatctatgttatatgaatgtaaatacaaaacaaaataaactgtaagcacaattggtgtggctagtcctacataaggaccaaacatatttgtacattttggctctctacgatgaatatcaaggtaacagtagcttaaacaaagcttccctggcaggatctcatttaatttctaaatggtgcaccttacattctttcaatctaaggatgtatcagatcccgcctctgatttgttatttggtacaatctcagtggaaccaattgtgcccttttctgtttgcacgtttaagataaaatttatcaaaccttattaaataaaaatcactagagttaaatattaagttctttaaggttgtaagttgtttgtattttattatatactctgtacatgtggttgttttagcctaattgttatttgtgaaaattaactgtctttatggtggttccatctagattacattaacattaatgttttaacctgtgaatataatgataacttacttcaaattacctgccaattcaaaggttaaaatattgtaaggtttagaaaatggtagaatattctgaagcactaaaccatagttgttattttatttgtacacatgatatgaacattgagcagttcttgctcacccatctctattattctgacattctttgattcattgaattcattgttcctccccacagaaggtaacagggtaccaccatttatcaccaattaatgtcacattctcagcattctcttccttcataccgataactaaaaggacctgaaaccaaccactcagcttgctttctaaatttactgaatctcattctcacggtccaccagatcatatctacttgataacacatatgctttgtccattatttctttggacactcaaggaacccatttgtgctatatttaaactggtatactgaaaaatttactgataatttaaaactatttttacatgattgctatttaatttttcagtaaaaatggtcattttaatttattaaagtcatttgtcattttatattaaaatgatattgtaggtatttcttctacccaatgtcagattacttgtaaatatataataaaattatttgcatt

SEQ ID NO: 130073 - DNA, 8355 bp, Homo sapiens
  Payload ID: 5448
  Gene Symbol: EPHA5
  Gene Name: EPH receptor A5
  ENST ID: ENST00000613740
  CDS Start-End: 754-3804
ccagacacagcaggagcgcgccttggcggtgcagtttcaacctcgacttcgcagccgcgcacacaccgcctgctccccgagcagcgggaaccgcagcagctcctgggccgccgcagcgcagctccgcgctcctaccggccggcagccgtcagtccctcccctcttcagcactcagcccgcagctatttccttctgccagtctctttgaactctggatctttgcttttgctcgctgctctcctgtttttcattctccacattttctcaagtcctctttctttatccttagccaccctgcttttttcctccttttttaaaaaatcggagatttcgtcttaaaatgatttgccttccttaccttcgtccatttcaacactgaaggctgcaaagaaccttcacctttcccctagtggtatttaaaaattctcaatccgtaaaaagtctttttgaaaggcaaaggaacaggacccaggaccctctcgacacccttgatccgagtccagatctgcactagcaaccagaactaatatttcatttaaccccaccaaagggggaggcgagaggagccagaagcaaacttcagctgtctcagccggatccgtggttcctacatttggaggagccgcgtgccagaaggcgtaggaccccaaggggggacaaggaggactcccgagtctcccttcgccgctctgcgaggccgaagcggtggactgagccgctcgggacagcggcaccggaggaggctcggagaagatgcggggctcggggccccggggtgcgggacgccggcggcccccaagcggcggcggcgacacccccatcaccccagcgtccctggccggctgctactctgcacctcgacgggctcccctctggacgtgccttctcctgtgcgccgcactccggaccctcctggccagccccagcaacgaagtgaatttattggattcacgcactgtcatgggggacctgggatggattgcttttccaaaaaatgggtgggaagagattggtgaagtggatgaaaattatgcccctatccacacataccaagtatgcaaagtgatggaacagaatcagaataactggcttttgaccagttggatctccaatgaaggtgcttccagaatcttcatagaactcaaatttaccctgcgggactgcaacagccttcctggaggactggggacctgtaaggaaacctttaatatgtattactttgagtcagatgatcagaatgggagaaacatcaaggaaaaccaatacatcaaaattgataccattgctgccgatgaaagctttacagaacttgatcttggtgaccgtgttatgaaactgaatacagaggtcagagatgtaggacctctaagcaaaaagggattttatcttgcttttcaagatgttggtgcttgcattgctctggtttctgtgcgtgtatactataaaaaatgcccttctgtggtacgacacttggctgtcttccctgacaccatcactggagctgattcttcccaattgctcgaagtgtcaggctcctgtgtcaaccattctgtgaccgatgaacctcccaaaatgcactgcagcgccgaaggggagtggctggtgcccatcgggaaatgcatgtgcaaggcaggatatgaagagaaaaatggcacctgtcaagtgtgcagacctgggttcttcaaagcctcacctcacatccagagctgcggcaaatgtccacctcacagttatacccatgaggaagcttcaacctcttgtgtctgtgaaaaggattatttcaggagagagtctgatccacccacaatggcatgcacaagacccccctctgctcctcggaatgccatctcaaatgttaatgaaactagtgtctttctggaatggattccgcctgctgacactggtggaaggaaagacgtgtcatattatattgcatgcaagaagtgcaactcccatgcaggtgtgtgtgaggagtgtggcggtcatgtcaggtaccttccccggcaaagcggcctgaaaaacacctctgtcatgatggtggatctactcgctcacacaaactatacctttgagattgaggcagtgaatggagtgtccgacttgagcccaggagcccggcagtatgtgtctgtaaatgtaaccacaaatcaagcagctccatctccagtcaccaatgtgaaaaaagggaaaattgcaaaaaacagcatctctttgtcttggcaagaaccagatcgtcccaatggaatcatcctagagtatgaaatcaagtattttgaaaaggaccaagagaccagctacacgattatcaaatctaaagagacaactattactgcagagggcttgaaaccagcttcagtttatgtcttccaaattcgagcacgtacagcagcaggctatggtgtcttcagtcgaagatttgagtttgaaaccaccccagtgtcagttgcagcatccagcgatcaaagccagattcctgtaattgctgtgtctgtgacagtgggagtcattttgttggcagtggttatcggcgtcctcctcagtggaaggcggtgtggctacagcaaagcaaaacaagatccagaagaggaaaagatgcattttcataatgggcacattaaactgccaggagtaagaacttacattgatccacatacctatgaggatcccaatcaagctgtccacgaatttgctaaggagatagaagcatcatgtatcaccattgagagagttattggagcaggtgaatttggtgaagtttgtagtggacgtttgaaactaccaggaaaaagagaattacctgtggctatcaaaacccttaaagtaggctatactgaaaagcaacgcagagatttcctaggtgaagcaagtatcatgggacagtttgatcatcctaacatcatccatttagaaggtgtggtgaccaaaagtaaaccagtgatgatcgtgacagagtatatggagaatggctctttagatacatttttgaagaaaaacgatgggcagttcactgtgattcagcttgttggcatgctgagaggtatctctgcaggaatgaagtacctttctgacatgggctatgtgcatagagatcttgctgccagaaacatcttaatcaacagtaaccttgtgtgcaaagtgtctgactttggactttcccgggtactggaagatgatcccgaggcagcctacaccacaaggggaggaaaaattccaatcagatggactgccccagaagcaatagctttccgaaagtttacttctgccagtgatgtctggagttatggaatagtaatgtgggaagttgtgtcttatggagagagaccctactgggagatgaccaatcaagatgtgattaaagcggtagaggaaggctatcgtctgccaagccccatggattgtcctgctgctctctatcagttaatgctggattgctggcagaaagagcgaaatagcaggcccaagtttgatgaaatagtcaacatgttggacaagctgatacgtaacccaagtagtctgaagacgctggttaatgcatcctgcagagtatctaatttattggcagaacatagcccactaggatctggggcctacagatcagtaggtgaatggctagaggcaatcaagatgggccggtatacagagattttcatggaaaatggatacagttcaatggacgctgtggctcaggtgaccttggaggatttgagacggcttggagtgactcttgtcggtcaccagaagaagatcatgaacagccttcaagaaatgaaggtgcagctggtaaacggaatggtgccattgtaacttcatgtaaatgtcgcttcttcaagtgaatgattctgcactttgtaaacagcactgagatttattttaacaaaaaaagggggaaaagggaaaacagtgatttctaaaccttagaaaacatttgcctcagccacagaatttgtaatcatggttttactgaagtatccagttcttagtccttagtcttcatttttcatgaagcaaacatatcttgcattaaaagggacatgaagttagacatcatcttaagttacaacaacagaatccttcccactacttctacaaaattttgtacatgaaatatataattatatagcacttttatagactgaattaaggcaacccctttcaaaacttccagggatctacttgaaaggaaatgttttatagccatttgtgagctaacaaaagctacagtttactgaagtttacttcaagtcttaattgtctacaaaagtgtattgaagagcaatatgattagattatttcttaatagatatcttcttttgtaattttaaaatgctgttacacagcgttaagttatagaaactagtgtgtaaacatgttgcttgatcaagaaaaagtacaatacagggtgtatatttattttttgtgttataaagtttacttttagttgctcttctagagattattaggtaataaatgtgtatatactgtataatttgcaatatacccaggaactgatttaagatggaattgtgtgtgtgtttgcttgcacatgtgtgtgttaccattctgcttgcatttctaatagtgtttcaattttagcaacatataggagcaagtgttccagaatgtaatatgaataggagaaatagggaagcagtaaaacaaaatttaacacaagcttgtgtctcttttcctctcatgtgtccaaaagctaatctctttattcactaaaaggaaatgtgtataagactaaatcccctttggctttttaaaaacattttgtgatatcagtgacaatgcagttcttctagccattaatcttgtacccctgtaagaaatttcacctttctgagtcctgaaaagtatcttgtcaagcaaagttgacaccgaagggcacattttcagcaggatgtagaaggatttaactgtgcaggcttctgttaatgttgttaaatccaggcacatagcacgaagcatcacccttaagtgttaatccgttgtaaccattcccattttgactcagttctagaaattttgactctaaggcagcaatggaattatgacaaatatatatatatacacatacacacacacaaatatatatatatgcttatttcccttcagaattttatttcaataattgataagttttatttttaatggatgtttattcatttgttaatttcagtttgtattcagttacatggctttgagtttattttattgaaccaatccaaggtattatgtaattaggcttattaaggaatataacatatcttctatgtatgctctatataccacacatgatgaagacttatatttgtgatacaaattatgcagtgtattagaaattgtccaaaactgagctcctgagataaccaacatttttgtattattacactttataaaaattatggaatgtcatgtgattagtcaaaatcagagcatttaaataaaatacagcctactcatgattatcaatgttaatagtacagtagatcagagaagcctggattaatgaaatttatcagaaatatagccacgttatattaatggtattcttttttccaagcacttgttttatttgaatattagcacatataagaataaacttttgggaaataactacttcctattctgcccaccctttacttaagcagtaaagtacctcttttctaaagaaccaggaaacatcaaaataaccacaacaaaaatctaaacagttttcaaataatacattcagttctcataataataagggctatataccatgggtccacacaaactgtgctgcaaacatataatctattagtttagtaaaatttccagagatgtgaatttaatattttcttgataaaatcataaaaaagcatcaccattattaaagatgcatttgttcatttcaataaacagaaattaatgaaacaaattacttttgtacaaaataaatgatgattatgtggcactttattgaattttatagaaatattccaatctaagtgataaagtaacaactgagaaacttcagaatgaaagccttattgattcaaaaggaaaattaccatatgctttagggctgatgaacttgccacaattgcttagacataacaaagatattttctacattgttttccaactttatatgctgaaagataattaggaggtccgggtggagtgtatctaaatgactagaactttaagttgcaatatagattttctctttttaacaaaggaagaatataaattaatttggatcaaatttatttgccttctttgcaatcttggtgatcattttggaaagtaaattgaaaggaaagttaaatagccacatagttttcttttgcatctcaatttggttgagaatttctaaggaaggttaatatgactttagaatgaataaagagactgtcaaacaacaagtactctccctaaaaaagaggaaagaatgccttcctaaaatatttgtttcctattgtatatgtcaccaattggaaaatgccaatctcatctgcaagtgtgagaaatggaacaaggagaggagccaactctagtaaaatgtagtgaggccataatccaaggcaaagtttaacaaatcttgattgtgtaatttcttattctgttgattcattttgtcacccaccagactaccaaaaataaagcacagacatgacaattttagtatatacaacagatttggcaaataatacataatcttattgtaattgccagtagcaatatcttaaggggcatgagtctttcacagtattggactttgaaaaattggtacagggagtaattttcaacagactgatacttgaagtcactcaattactactttgacctatcataatttgtttctaatcttgtcatttgctcatatatactattaatataaccagttgctcttttcataatgtactatttctatgtaaagatgtaaagattttgattttcctatgttttaaaattgtaatgtgcatgatcttttatttcttgtgtttcaattaccaagtcagtattctaaggttgtaagattactgtaaaaattatattccaatattttatctaaacttaagtgtggccagcattattggtttcagagttgcctaaacaacacagaatatccttaattcagtttgtaaaagagttttgaccagtgtaaaaaagtgaagacacagtttcatgtttcaagtttaaaatggaaagttaatatcatttgagcacttatgtgttttcatgtcttctacttaatctgtatgtgaaagtaaaatatttttaacaccattatttatgccatgtaaagtgggttctcagaagcacaagcacagatatttaccttctgaagacatttttggctataaaagtgcattggatggcaaacactatttgagtcaggtgttagaaatttattagatgtattatattacatagtagaataaggtccctttctcattttgtttttcctaaaaataagaaaaaaaagaagtgtgatagtaaactgtctttgctaatgtcctgccagatgtttaacttcaaattaagcaaaaagtaggtacaatatgatgatgatcctgatgatgatgatgatgatgatgatgaagaataaatggaatcaaaatgctagctttatttgacattaataagtaaaataagtcatcattttttcaactctgtagcacagctgtttacattgaataattttctctattgtgctgttaattatatagtaatgtatcaaaatagaaataggaactttcttttcatttcttattcatttatgaagaaatcttttcacacataaatgattgaatgttcttgttcagaatgaccacataatcattgcttagaagaagataccaattcttttaaaagaaaaaaagtctgtttataataatcagaatcaaatgttgtttgtttcttctaaacgttaatggagaaaattgaaggtggtaaaatgtcatgtttattcaggctgggaactgtattcacagtagaagtttcagtggtcaacatatctatgactctttaggctgctgtagttttacagtcaattatttaaaagtgagtagttacatttataagagcctgagaatacttagactcagtcatttgttagtatttttaccaaaatctcttagtttcagacatgtcagaagcagctatatagcatatcttattctatgatatacatcaggctatctcaagttcctgtctcacagttaattcaaagaaggattaggatttctgtattttttctcatttgaatctttatgtgcatttggtttgtgtacatgctttttgtagtgtaagatatgaaattttatattttttcagaaaataaaaaccctttgaatacagtta

SEQ ID NO: 130074 - DNA, 8421 bp, Homo sapiens
  Payload ID: 5448
  Gene Symbol: EPHA5
  Gene Name: EPH receptor A5
  ENST ID: ENST00000622150
  CDS Start-End: 754-3870
ccagacacagcaggagcgcgccttggcggtgcagtttcaacctcgacttcgcagccgcgcacacaccgcctgctccccgagcagcgggaaccgcagcagctcctgggccgccgcagcgcagctccgcgctcctaccggccggcagccgtcagtccctcccctcttcagcactcagcccgcagctatttccttctgccagtctctttgaactctggatctttgcttttgctcgctgctctcctgtttttcattctccacattttctcaagtcctctttctttatccttagccaccctgcttttttcctccttttttaaaaaatcggagatttcgtcttaaaatgatttgccttccttaccttcgtccatttcaacactgaaggctgcaaagaaccttcacctttcccctagtggtatttaaaaattctcaatccgtaaaaagtctttttgaaaggcaaaggaacaggacccaggaccctctcgacacccttgatccgagtccagatctgcactagcaaccagaactaatatttcatttaaccccaccaaagggggaggcgagaggagccagaagcaaacttcagctgtctcagccggatccgtggttcctacatttggaggagccgcgtgccagaaggcgtaggaccccaaggggggacaaggaggactcccgagtctcccttcgccgctctgcgaggccgaagcggtggactgagccgctcgggacagcggcaccggaggaggctcggagaagatgcggggctcggggccccggggtgcgggacgccggcggcccccaagcggcggcggcgacacccccatcaccccagcgtccctggccggctgctactctgcacctcgacgggctcccctctggacgtgccttctcctgtgcgccgcactccggaccctcctggccagccccagcaacgaagtgaatttattggattcacgcactgtcatgggggacctgggatggattgcttttccaaaaaatgggtgggaagagattggtgaagtggatgaaaattatgcccctatccacacataccaagtatgcaaagtgatggaacagaatcagaataactggcttttgaccagttggatctccaatgaaggtgcttccagaatcttcatagaactcaaatttaccctgcgggactgcaacagccttcctggaggactggggacctgtaaggaaacctttaatatgtattactttgagtcagatgatcagaatgggagaaacatcaaggaaaaccaatacatcaaaattgataccattgctgccgatgaaagctttacagaacttgatcttggtgaccgtgttatgaaactgaatacagaggtcagagatgtaggacctctaagcaaaaagggattttatcttgcttttcaagatgttggtgcttgcattgctctggtttctgtgcgtgtatactataaaaaatgcccttctgtggtacgacacttggctgtcttccctgacaccatcactggagctgattcttcccaattgctcgaagtgtcaggctcctgtgtcaaccattctgtgaccgatgaacctcccaaaatgcactgcagcgccgaaggggagtggctggtgcccatcgggaaatgcatgtgcaaggcaggatatgaagagaaaaatggcacctgtcaagtgtgcagacctgggttcttcaaagcctcacctcacatccagagctgcggcaaatgtccacctcacagttatacccatgaggaagcttcaacctcttgtgtctgtgaaaaggattatttcaggagagagtctgatccacccacaatggcatgcacaagacccccctctgctcctcggaatgccatctcaaatgttaatgaaactagtgtctttctggaatggattccgcctgctgacactggtggaaggaaagacgtgtcatattatattgcatgcaagaagtgcaactcccatgcaggtgtgtgtgaggagtgtggcggtcatgtcaggtaccttccccggcaaagcggcctgaaaaacacctctgtcatgatggtggatctactcgctcacacaaactatacctttgagattgaggcagtgaatggagtgtccgacttgagcccaggagcccggcagtatgtgtctgtaaatgtaaccacaaatcaagcagctccatctccagtcaccaatgtgaaaaaagggaaaattgcaaaaaacagcatctctttgtcttggcaagaaccagatcgtcccaatggaatcatcctagagtatgaaatcaagtattttgaaaaggaccaagagaccagctacacgattatcaaatctaaagagacaactattactgcagagggcttgaaaccagcttcagtttatgtcttccaaattcgagcacgtacagcagcaggctatggtgtcttcagtcgaagatttgagtttgaaaccaccccagtgtcagttgcagcatccagcgatcaaagccagattcctgtaattgctgtgtctgtgacagtgggagtcattttgttggcagtggttatcggcgtcctcctcagtggaagttgctgcgaatgtggctgtgggagggcttcttccctgtgcgctgttgcccatccaagcctaatatggcggtgtggctacagcaaagcaaaacaagatccagaagaggaaaagatgcattttcataatgggcacattaaactgccaggagtaagaacttacattgatccacatacctatgaggatcccaatcaagctgtccacgaatttgctaaggagatagaagcatcatgtatcaccattgagagagttattggagcaggtgaatttggtgaagtttgtagtggacgtttgaaactaccaggaaaaagagaattacctgtggctatcaaaacccttaaagtaggctatactgaaaagcaacgcagagatttcctaggtgaagcaagtatcatgggacagtttgatcatcctaacatcatccatttagaaggtgtggtgaccaaaagtaaaccagtgatgatcgtgacagagtatatggagaatggctctttagatacatttttgaagaaaaacgatgggcagttcactgtgattcagcttgttggcatgctgagaggtatctctgcaggaatgaagtacctttctgacatgggctatgtgcatagagatcttgctgccagaaacatcttaatcaacagtaaccttgtgtgcaaagtgtctgactttggactttcccgggtactggaagatgatcccgaggcagcctacaccacaaggggaggaaaaattccaatcagatggactgccccagaagcaatagctttccgaaagtttacttctgccagtgatgtctggagttatggaatagtaatgtgggaagttgtgtcttatggagagagaccctactgggagatgaccaatcaagatgtgattaaagcggtagaggaaggctatcgtctgccaagccccatggattgtcctgctgctctctatcagttaatgctggattgctggcagaaagagcgaaatagcaggcccaagtttgatgaaatagtcaacatgttggacaagctgatacgtaacccaagtagtctgaagacgctggttaatgcatcctgcagagtatctaatttattggcagaacatagcccactaggatctggggcctacagatcagtaggtgaatggctagaggcaatcaagatgggccggtatacagagattttcatggaaaatggatacagttcaatggacgctgtggctcaggtgaccttggaggatttgagacggcttggagtgactcttgtcggtcaccagaagaagatcatgaacagccttcaagaaatgaaggtgcagctggtaaacggaatggtgccattgtaacttcatgtaaatgtcgcttcttcaagtgaatgattctgcactttgtaaacagcactgagatttattttaacaaaaaaagggggaaaagggaaaacagtgatttctaaaccttagaaaacatttgcctcagccacagaatttgtaatcatggttttactgaagtatccagttcttagtccttagtcttcatttttcatgaagcaaacatatcttgcattaaaagggacatgaagttagacatcatcttaagttacaacaacagaatccttcccactacttctacaaaattttgtacatgaaatatataattatatagcacttttatagactgaattaaggcaacccctttcaaaacttccagggatctacttgaaaggaaatgttttatagccatttgtgagctaacaaaagctacagtttactgaagtttacttcaagtcttaattgtctacaaaagtgtattgaagagcaatatgattagattatttcttaatagatatcttcttttgtaattttaaaatgctgttacacagcgttaagttatagaaactagtgtgtaaacatgttgcttgatcaagaaaaagtacaatacagggtgtatatttattttttgtgttataaagtttacttttagttgctcttctagagattattaggtaataaatgtgtatatactgtataatttgcaatatacccaggaactgatttaagatggaattgtgtgtgtgtttgcttgcacatgtgtgtgttaccattctgcttgcatttctaatagtgtttcaattttagcaacatataggagcaagtgttccagaatgtaatatgaataggagaaatagggaagcagtaaaacaaaatttaacacaagcttgtgtctcttttcctctcatgtgtccaaaagctaatctctttattcactaaaaggaaatgtgtataagactaaatcccctttggctttttaaaaacattttgtgatatcagtgacaatgcagttcttctagccattaatcttgtacccctgtaagaaatttcacctttctgagtcctgaaaagtatcttgtcaagcaaagttgacaccgaagggcacattttcagcaggatgtagaaggatttaactgtgcaggcttctgttaatgttgttaaatccaggcacatagcacgaagcatcacccttaagtgttaatccgttgtaaccattcccattttgactcagttctagaaattttgactctaaggcagcaatggaattatgacaaatatatatatatacacatacacacacacaaatatatatatatgcttatttcccttcagaattttatttcaataattgataagttttatttttaatggatgtttattcatttgttaatttcagtttgtattcagttacatggctttgagtttattttattgaaccaatccaaggtattatgtaattaggcttattaaggaatataacatatcttctatgtatgctctatataccacacatgatgaagacttatatttgtgatacaaattatgcagtgtattagaaattgtccaaaactgagctcctgagataaccaacatttttgtattattacactttataaaaattatggaatgtcatgtgattagtcaaaatcagagcatttaaataaaatacagcctactcatgattatcaatgttaatagtacagtagatcagagaagcctggattaatgaaatttatcagaaatatagccacgttatattaatggtattcttttttccaagcacttgttttatttgaatattagcacatataagaataaacttttgggaaataactacttcctattctgcccaccctttacttaagcagtaaagtacctcttttctaaagaaccaggaaacatcaaaataaccacaacaaaaatctaaacagttttcaaataatacattcagttctcataataataagggctatataccatgggtccacacaaactgtgctgcaaacatataatctattagtttagtaaaatttccagagatgtgaatttaatattttcttgataaaatcataaaaaagcatcaccattattaaagatgcatttgttcatttcaataaacagaaattaatgaaacaaattacttttgtacaaaataaatgatgattatgtggcactttattgaattttatagaaatattccaatctaagtgataaagtaacaactgagaaacttcagaatgaaagccttattgattcaaaaggaaaattaccatatgctttagggctgatgaacttgccacaattgcttagacataacaaagatattttctacattgttttccaactttatatgctgaaagataattaggaggtccgggtggagtgtatctaaatgactagaactttaagttgcaatatagattttctctttttaacaaaggaagaatataaattaatttggatcaaatttatttgccttctttgcaatcttggtgatcattttggaaagtaaattgaaaggaaagttaaatagccacatagttttcttttgcatctcaatttggttgagaatttctaaggaaggttaatatgactttagaatgaataaagagactgtcaaacaacaagtactctccctaaaaaagaggaaagaatgccttcctaaaatatttgtttcctattgtatatgtcaccaattggaaaatgccaatctcatctgcaagtgtgagaaatggaacaaggagaggagccaactctagtaaaatgtagtgaggccataatccaaggcaaagtttaacaaatcttgattgtgtaatttcttattctgttgattcattttgtcacccaccagactaccaaaaataaagcacagacatgacaattttagtatatacaacagatttggcaaataatacataatcttattgtaattgccagtagcaatatcttaaggggcatgagtctttcacagtattggactttgaaaaattggtacagggagtaattttcaacagactgatacttgaagtcactcaattactactttgacctatcataatttgtttctaatcttgtcatttgctcatatatactattaatataaccagttgctcttttcataatgtactatttctatgtaaagatgtaaagattttgattttcctatgttttaaaattgtaatgtgcatgatcttttatttcttgtgtttcaattaccaagtcagtattctaaggttgtaagattactgtaaaaattatattccaatattttatctaaacttaagtgtggccagcattattggtttcagagttgcctaaacaacacagaatatccttaattcagtttgtaaaagagttttgaccagtgtaaaaaagtgaagacacagtttcatgtttcaagtttaaaatggaaagttaatatcatttgagcacttatgtgttttcatgtcttctacttaatctgtatgtgaaagtaaaatatttttaacaccattatttatgccatgtaaagtgggttctcagaagcacaagcacagatatttaccttctgaagacatttttggctataaaagtgcattggatggcaaacactatttgagtcaggtgttagaaatttattagatgtattatattacatagtagaataaggtccctttctcattttgtttttcctaaaaataagaaaaaaaagaagtgtgatagtaaactgtctttgctaatgtcctgccagatgtttaacttcaaattaagcaaaaagtaggtacaatatgatgatgatcctgatgatgatgatgatgatgatgatgaagaataaatggaatcaaaatgctagctttatttgacattaataagtaaaataagtcatcattttttcaactctgtagcacagctgtttacattgaataattttctctattgtgctgttaattatatagtaatgtatcaaaatagaaataggaactttcttttcatttcttattcatttatgaagaaatcttttcacacataaatgattgaatgttcttgttcagaatgaccacataatcattgcttagaagaagataccaattcttttaaaagaaaaaaagtctgtttataataatcagaatcaaatgttgtttgtttcttctaaacgttaatggagaaaattgaaggtggtaaaatgtcatgtttattcaggctgggaactgtattcacagtagaagtttcagtggtcaacatatctatgactctttaggctgctgtagttttacagtcaattatttaaaagtgagtagttacatttataagagcctgagaatacttagactcagtcatttgttagtatttttaccaaaatctcttagtttcagacatgtcagaagcagctatatagcatatcttattctatgatatacatcaggctatctcaagttcctgtctcacagttaattcaaagaaggattaggatttctgtattttttctcatttgaatctttatgtgcatttggtttgtgtacatgctttttgtagtgtaagatatgaaattttatattttttcagaaaataaaaaccctttgaatacagtta

SEQ ID NO: 130075 - DNA, 3971 bp, Homo sapiens
  Payload ID: 5449
  Gene Symbol: EPHA6
  Gene Name: EPH receptor A6
  ENST ID: ENST00000389672
  CDS Start-End: 39-3431
aagtgaatagtcctcgcgcaagcgggacactgtggtggatgcaattcccctcgcctccagccgcgaggagctccccggcgccgcaggcagcgtcctcctccgaagcagctgcacctgcaactgggcagcctggaccctcgtgccctgttcccgggacctcgcgcagggggcgccccgggacaccccctgcgggccgggtggaggaggaagaggaggaggaggaagaagacgtggacaaggacccccatcctacccagaacacctgcctgcgctgccgccacttctctttaagggagaggaaaagagagcctaggagaaccatggggggctgcgaagtccgggaatttcttttgcaatttggtttcttcttgcctctgctgacagcgtggccaggcgactgcagtcacgtctccaacaaccaagttgtgttgcttgatacaacaactgtactgggagagctaggatggaaaacatatccattaaatgggtgggatgccatcactgaaatggatgaacataataggcccattcacacataccaggtatgtaatgtaatggaaccaaaccaaaacaactggcttcgtacaaactggatctcccgtgatgcagctcagaaaatttatgtggaaatgaaattcacactaagggattgtaacagcatcccatgggtcttggggacttgcaaagaaacatttaatctgttttatatggaatcagatgagtcccacggaattaaattcaagccaaaccagtatacaaagatcgacacaattgctgctgatgagagttttacccagatggatttgggtgatcgcatcctcaaactcaacactgaaattcgtgaggtggggcctatagaaaggaaaggattttatctggcttttcaagacattggggcgtgcattgccctggtttcagtccgtgttttctacaagaaatgccccttcactgttcgtaacttggccatgtttcctgataccattccaagggttgattcctcctctttggttgaagtacggggttcttgtgtgaagagtgctgaagagcgtgacactcctaaactgtattgtggagctgatggagattggctggttcctcttggaaggtgcatctgcagtacaggatatgaagaaattgagggttcttgccatgcttgcagaccaggattctataaagcttttgctgggaacacaaaatgttctaaatgtcctccacacagtttaacatacatggaagcaacttctgtctgtcagtgtgaaaagggttatttccgagctgaaaaagacccaccttctatggcatgtaccaggccaccttcagctcctaggaatgtggtttttaacatcaatgaaacagcccttattttggaatggagcccaccaagtgacacaggagggagaaaagatctcacatacagtgtaatctgtaagaaatgtggcttagacaccagccagtgtgaggactgtggtggaggactccgcttcatcccaagacatacaggcctgatcaacaattccgtgatagtacttgactttgtgtctcacgtgaattacacctttgaaatagaagcaatgaatggagtttctgagttgagtttttctcccaagccattcacagctattacagtgaccacggatcaagatgcaccttccctgataggtgtggtaaggaaggactgggcatcccaaaatagcattgccctatcatggcaagcacctgctttttccaatggagccattctggactacgagatcaagtactatgagaaagaacatgagcagctgacctactcttccacaaggtccaaagcccccagtgtcatcatcacaggtcttaagccagccaccaaatatgtatttcacatccgagtgagaactgcgacaggatacagtggctacagtcagaaatttgaatttgaaacaggagatgaaacttctgacatggcagcagaacaaggacagattctcgtgatagccaccgccgctgttggcggattcactctcctcgtcatcctcactttattcttcttgatcactgggagatgtcagtggtacataaaagccaagatgaagtcagaagagaagagaagaaaccacttacagaatgggcatttgcgcttcccgggaattaaaacttacattgatccagatacatatgaagacccatccctagcagtccatgaatttgcaaaggagattgatccctcaagaattcgtattgagagagtcattggggcaggtgaatttggagaagtctgtagtgggcgtttgaagacaccagggaaaagagagatcccagttgccattaaaactttgaaaggtggccacatggatcggcaaagaagagattttctaagagaagctagtatcatgggccagtttgaccatccaaacatcattcgcctagaaggggttgtcaccaaaagatccttcccggccattggggtggaggcgttttgccccagcttcctgagggcagggtttttaaatagcatccaggccccgcatccagtgccagggggaggatctttgccccccaggattcctgctggcagaccagtaatgattgtggtggaatatatggagaatggatccctagactcctttttgcggaagcatgatggccacttcacagtcatccagttggtcggaatgctccgaggcattgcatcaggcatgaagtatctttctgatatgggttatgttcatcgagacctagcggctcggaatatactggtcaatagcaacttagtatgcaaagtttctgattttggtctctccagagtgctggaagatgatccagaagctgcttatacaacaactggtggaaaaatccccataaggtggacagccccagaagccatcgcctacagaaaattctcctcagcaagcgatgcatggagctatggcattgtcatgtgggaggtcatgtcctatggagagagaccttattgggaaatgtctaaccaagatgtcattctgtccattgaagaagggtacagacttccagctcccatgggctgtccagcatctctacaccagctgatgctccactgctggcagaaggagagaaatcacagaccaaaatttactgacattgtcagcttccttgacaaactgatccgaaatcccagtgcccttcacaccctggtggaggacatccttgtaatgccagagtcccctggtgaagttccggaatatcctttgtttgtcacagttggtgactggctagattctataaagatggggcaatacaagaataacttcgtggcagcagggtttacaacatttgacctgatttcaagaatgagcattgatgacattagaagaattggagtcatacttattggacaccagagacgaatagtcagcagcatacagactttacgtttacacatgatgcacatacaggagaagggatttcatgtatgaaagtaccacaagcacctgtgttttgtgcctcagcatttctaaaatgaacgatatcctctctactactctctcttctgattctccaaacatcacttcacaaactgcagtcttctgttcagactataggcacacaccttatgtttatgcttccaaccaggattttaaaatcatgctacataaatccgttctgaataacctgcaactaaaaccctggcccactgcagattattgctacgcaatggtaaataactcagcatggatgtgtaattttgtataagccgtatatgggaagtgttcacggacttaacctaaaaaaatttatccaggtggggcttccttagtgatgtatgtagagtgtgatggtagatgagaaagaactagttgacctttctttcatgttttgtgatcaagtagcttccaaactgacagaaatgtttcatttttagataattatattcagctctattggttgtattattactttattttttaatactttaactgttggtgcctgatattgttagaattatttgcagaaat

SEQ ID NO: 130076 - DNA, 1690 bp, Homo sapiens
  Payload ID: 5449
  Gene Symbol: EPHA6
  Gene Name: EPH receptor A6
  ENST ID: ENST00000477384
  CDS Start-End: 277-1398
agagtggaacttcccagcctcagaaaggcagaaaccaggaaagctaagacaaacaaaactacaatggaagaagaaaacgtcctcaactagacatctgccaaaaatgaacatgagcagctgacctactcttccacaaggtccaaagcccccagtgtcatcatcacaggtcttaagccagccaccaaatatgtatttcacatccgagtgagaactgcgacaggatacagtggctacagtcagaaatttgaatttgaaacaggagatgaaacttctgacatggcagcagaacaaggacagattctcgtgatagccaccgccgctgttggcggattcactctcctcgtcatcctcactttattcttcttgatcactgggagatgtcagtggtacataaaagccaagatgaagtcagaagagaagagaagaaaccacttacagaatgggcatttgcgcttcccgggaattaaaacttacattgatccagatacatatgaagacccatccctagcagtccatgaatttgcaaaggagattgatccctcaagaattcgtattgagagagtcattggggcaggtgaatttggagaagtctgtagtgggcgtttgaagacaccagggaaaagagagatcccagttgccattaaaactttgaaaggtggccacatggatcggcaaagaagagattttctaagagaagctagtatcatgggccagtttgaccatccaaacatcattcgcctagaaggggttgtcaccaaaagcagaccagtaatgattgtggtggaatatatggagaatggatccctagactcctttttgcggaagcatgatggccacttcacagtcatccagttggtcggaatgctccgaggcattgcatcaggcatgaagtatctttctgatatgggttatgttcatcgagacctagcggctcggaatatactggtcaatagcaacttagtatgcaaagtttctgattttggtctctccagagtgctggaagatgatccagaagctgcttatacaacaactggtggaaaaatccccataaggtggacagccccagaagccatcgcctacagaaaattctcctcagcaagcgatgcatggagctatggcattgtcatgtgggaggtcatgtcctatggagagagaccttattgggaaatgtctaaccaagatgtcattctgtccattgaagaagggtacagacttccagctcccatgggctgtccagcatctctacaccagctgatgctccactgctggcagaaggagagaaatcacagaccaaaatttactgacattgtcagcttccttgacaaactgatccgaaatcccagtgcccttcacaccctggtggaggacatccttgtgtcaaatcatgaatcattttgatgttaattaaaatgaaacagcccacaatcaaaataacgttgcaatatgtagtacaggaaaaaagaatgcagcttaacagcctccaaataggaaatgcaatagaattgagtagtgttaaaaaggacagaagtcactgtatggataaccagacccaatattgactacagtgtaatcaatcacaagaatgccagagtcccctggtgaagttccggaatatcctttgtttgtcacagttggtgactggctagattctataaagatggggcaatacaagaataacttcgtggcagca

SEQ ID NO: 130077 - DNA, 2058 bp, Homo sapiens
  Payload ID: 5449
  Gene Symbol: EPHA6
  Gene Name: EPH receptor A6
  ENST ID: ENST00000470610
  CDS Start-End: 44-1687
ggcccaagtgaatagtcctcgcgcaagcgggacactgtggtggatgcaattcccctcgcctccagccgcgaggagctccccggcgccgcaggcagcgtcctcctccgaagcagctgcacctgcaactgggcagcctggaccctcgtgccctgttcccgggacctcgcgcagggggcgccccgggacaccccctgcgggccgggtggaggaggaagaggaggaggaggaagaagacgtggacaaggacccccatcctacccagaacacctgcctgcgctgccgccacttctctttaagggagaggaaaagagagcctaggagaaccatggggggctgcgaagtccgggaatttcttttgcaatttggtttcttcttgcctctgctgacagcgtggccaggcgactgcagtcacgtctccaacaaccaagttgtgttgcttgatacaacaactgtactgggagagctaggatggaaaacatatccattaaatgggtgggatgccatcactgaaatggatgaacataataggcccattcacacataccaggtatgtaatgtaatggaaccaaaccaaaacaactggcttcgtacaaactggatctcccgtgatgcagctcagaaaatttatgtggaaatgaaattcacactaagggattgtaacagcatcccatgggtcttggggacttgcaaagaaacatttaatctgttttatatggaatcagatgagtcccacggaattaaattcaagccaaaccagtatacaaagatcgacacaattgctgctgatgagagttttacccagatggatttgggtgatcgcatcctcaaactcaacactgaaattcgtgaggtggggcctatagaaaggaaaggattttatctggcttttcaagacattggggcgtgcattgccctggtttcagtccgtgttttctacaagaaatgccccttcactgttcgtaacttggccatgtttcctgataccattccaagggttgattcctcctctttggttgaagtacggggttcttgtgtgaagagtgctgaagagcgtgacactcctaaactgtattgtggagctgatggagattggctggttcctcttggaaggtgcatctgcagtacaggatatgaagaaattgagggttcttgccatgcttgcagaccaggattctataaagcttttgctgggaacacaaaatgttctaaatgtcctccacacagtttaacatacatggaagcaacttctgtctgtcagtgtgaaaagggttatttccgagctgaaaaagacccaccttctatggcatgtaccaggccaccttcagctcctaggaatgtggtttttaacatcaatgaaacagcccttattttggaatggagcccaccaagtgacacaggagggagaaaagatctcacatacagtgtaatctgtaagaaatgtggcttagacaccagccagtgtgaggactgtggtggaggactccgcttcatcccaagacatacaggcctgatcaacaattccgtgatagtacttgactttgtgtctcacgtgaattacacctttgaaatagaagcaatgaatggagtttctgagttgagtttttctcccaagccattcacagctattacagtgaccacggatcaagatggtaagttccactgctgttctctcaaaacagacccataatttcttttgatgcataaatatccctcatgggcatgtatttattgcaggtgctatgcagtcatatacgttatacactgcagaggtaatgcactggttgttgttcttgttctttcctaaaactcagaaagatatttttatattacttctcagcagtatgaataataagatgaaatgcttccctccactgtttatgtactcatgtattttgtataatcatataacaatatatcttaatgagtaagtccatattacttaccaatagaagtcagaaatcaataaaatgttattaaatgaattgaatttcaattgccccacttatgctgccatcctttttgcatgtcaaataaagcaaatagtaagaatttttaaaa

SEQ ID NO: 130078 - DNA, 1413 bp, Homo sapiens
  Payload ID: 5449
  Gene Symbol: EPHA6
  Gene Name: EPH receptor A6
  ENST ID: ENST00000503760
  CDS Start-End: 263-889
agagtggaacttcccagcctcagaaaggcagaaaccaggaaagctaagacaaacaaaactacaatggaagaagaaaacgtcctcaactagacatctgccaaaaatgaacatgagcagctgacctactcttccacaaggtccaaagcccccagtgtcatcatcacaggtcttaagccagccaccaaatatgtatttcacatccgagtgagaactgcgacaggatacagtggctacagtcagaaatttgaatttgaaacaggagatgaaagactctccatttcaagtgacaaaactgtactggcttaatgaaaagtgggactttattgcctcagcttctgacatggcagcagaacaaggacagattctcgtgatagccaccgccgctgttggcggattcactctcctcgtcatcctcactttattcttcttgatcactgggagatgtcagtggtacataaaagccaagatgaagtcagaagagaagagaagaaaccacttacagaatgggcatttgcgcttcccgggaattaaaacttacattgatccagatacatatgaagacccatccctagcagtccatgaatttgcaaaggagattgatccctcaagaattcgtattgagagagtcattggggcaggtgaatttggagaagtctgtagtgggcgtttgaagacaccagggaaaagagagatcccagttgccattaaaactttgaaaggtggccacatggatcggcaaagaagagattttctaagagaagctagtatcatgggccagtttgaccatccaaacatcattcgcctagaaggggttgtcaccaaaaagccactggaaatgatgacatatatcctcagggcaaaaggggaagcaggctttctaaagaagtaaatcaaggcacactagccacatttccagtgctcaatagccacatatggctggtggctactgtattggacaacacaaacatagaatattttcatcattgctgaaaattggagtgaacagctttgatcttggtgatatggatgaagacccagagaggggttatgactcctctgtgctgtcgtatagctggctcagaagagaccaactttcctgagctgtgaaaaatgacagttccttaaggaagagatgccacaatagatgaaagacctttttacccatggatccttcccggccattggggtggaggcgttttgccccagcttcctgagggcagggtttttaaatagcatccaggccccgcatccagtgccagggggaggatctttgccccccaggattcctgctgtgcccttcctactatacaccccatgagagcagagatcttgtattgattgacgatatgtctccagaactcagaagagtacttgctacctagcagaccagtaatgattgtggtggaatatatg

SEQ ID NO: 130079 - DNA, 681 bp, Homo sapiens
  Payload ID: 5449
  Gene Symbol: EPHA6
  Gene Name: EPH receptor A6
  ENST ID: ENST00000506349
  CDS Start-End: 1-168
ttcgtggcagcagggtttacaacatttgacctgatttcaagaatgagcattgatgacattagaagaattggagtcatacttattggacaccagagacgaatagtcagcagcatacagactttacgtttacacatgatgcacatacaggagaagggatttcatgtatgaaagtaccacaagcacctgtgttttgtgcctcagcatttctaaaatgaacgatatcctctctactactctctcttctgattctccaaacatcacttcacaaactgcagtcttctgttcagactataggcacacaccttatgtttatgcttccaaccaggattttaaaatcatgctacataaatccgttctgaataacctgcaactaaaaccctggcccactgcagattattgctacgcaatgcaacagctttaaaacctatctcagcccatgaatggaaaacaaatccaaatccgatccttgaaaagcaaaggctctaaagaagctcttcagaagagacggtaaagaatgaattcttttacttatcacccaaccacatttcttaaaaatgtgttttggtgtcttttcctaccaaatttctgctctacaaggcagtcagttaaatctctcatttcataattttcactgtgctagttctttcttttctcctcttttaataaattttctaaaacttt

SEQ ID NO: 130080 - DNA, 1682 bp, Homo sapiens
  Payload ID: 5449
  Gene Symbol: EPHA6
  Gene Name: EPH receptor A6
  Uniprot ID: Q9UF33
  ENST ID: ENST00000514100
  CDS Start-End: 243-1439
cagaaaggcagaaaccaggaaagctaagacaaacaaaactacaatggaagaagaaaacgtcctcaactagacatctgccaaaaatgaacatgagcagctgacctactcttccacaaggtccaaagcccccagtgtcatcatcacaggtcttaagccagccaccaaatatgtatttcacatccgagtgagaactgcgacaggatacagtggctacagtcagaaatttgaatttgaaacaggagatgaaagactctccatttcaagtgacaaaactgtactggcttaatgaaaagtgggactttattgcctcagcttctgacatggcagcagaacaaggacagattctcgtgatagccaccgccgctgttggcggattcactctcctcgtcatcctcactttattcttcttgatcactgggagatgtcagtggtacataaaagccaagatgaagtcagaagagaagagaagaaaccacttacagaatgggcatttgcgcttcccgggaattaaaacttacattgatccagatacatatgaagacccatccctagcagtccatgaatttgcaaaggagattgatccctcaagaattcgtattgagagagtcattggggcaggtgaatttggagaagtctgtagtgggcgtttgaagacaccagggaaaagagagatcccagttgccattaaaactttgaaaggtggccacatggatcggcaaagaagagattttctaagagaagctagtatcatgggccagtttgaccatccaaacatcattcgcctagaaggggttgtcaccaaaagatccttcccggccattggggtggaggcgttttgccccagcttcctgagggcagggtttttaaatagcatccaggccccgcatccagtgccagggggaggatctttgccccccaggattcctgctggcagaccagtaatgattgtggtggaatatatggagaatggatccctagactcctttttgcggaagcatgatggccacttcacagtcatccagttggtcggaatgctccgaggcattgcatcaggcatgaagtatctttctgatatgggttatgttcatcgagacctagcggctcggaatatactggtcaatagcaacttagtatgcaaagtttctgattttggtctctccagagtgctggaagatgatccagaagctgcttatacaacaactagacccacaaatcacaacaaagagcaatcagaactggttaaagaagatggtctggaaagcttgtgtgagcagtgcgagtccagctctggttatggtactggactggtcctcatgtggaagagaaacagaagggccatgggagccagtggccagaccagaaagcaatgtgacaagagagataaccctccaacagacctcttccaaactctaacacttaacctctgctattctgcataaattctgagaaaagccaaattttctgtcggtctaagaagacatagcctacacccaactggagataattataaaaaataatgaagcagcatgaggggaaggtatttaatgtgtattttaaagttgggagagattctccttcacctaatttaggtgtttgtgaattggcttgactttttgaagttaatttttaagccttgaacatgtccaactttaagaactttaagaataaatattttaacacaa

SEQ ID NO: 130081 - DNA, 1582 bp, Homo sapiens
  Payload ID: 5449
  Gene Symbol: EPHA6
  Gene Name: EPH receptor A6
  Uniprot ID: Q9UF33
  ENST ID: ENST00000502694
  CDS Start-End: 331-1335
acaaacaaaactacaatggaagaagaaaacgtcctcaactagacatctgccaaaaatatcatccagaatgccctggcaagttcacttccatttagtgaagtgagataatttggcaattcacgcaagagactgagaaccaagcctcaagccctgcctctgattctgcaggtatggaacatgagcagctgacctactcttccacaaggtccaaagcccccagtgtcatcatcacaggtcttaagccagccaccaaatatgtatttcacatccgagtgagaactgcgacaggatacagtggctacagtcagaaatttgaatttgaaacaggagatgaaagactctccatttcaagtgacaaaactgtactggcttaatgaaaagtgggactttattgcctcagcttctgacatggcagcagaacaaggacagattctcgtgatagccaccgccgctgttggcggattcactctcctcgtcatcctcactttattcttcttgatcactgggagatgtcagtggtacataaaagccaagatgaagtcagaagagaagagaagaaaccacttacagaatgggcatttgcgcttcccgggaattaaaacttacattgatccagatacatatgaagacccatccctagcagtccatgaatttgcaaaggagattgatccctcaagaattcgtattgagagagtcattggggcaggtgaatttggagaagtctgtagtgggcgtttgaagacaccagggaaaagagagatcccagttgccattaaaactttgaaaggtggccacatggatcggcaaagaagagattttctaagagaagctagtatcatgggccagtttgaccatccaaacatcattcgcctagaaggggttgtcaccaaaagatccttcccggccattggggtggaggcgttttgccccagcttcctgagggcagggtttttaaatagcatccaggccccgcatccagtgccagggggaggatctttgccccccaggattcctgctggcagaccagtaatgattgtggtggaatatatggagaatggatccctagactcctttttgcggaagcatgatggccacttcacagtcatccagttggtcggaatgctccgaggcattgcatcaggcatgaagtatctttctgatatgggttatgttcatcgagacctagcggctcggaatatactggtcaatagcaacttagtatgcaaagtttctgattttggtctctccagagtgctggaagatgatccagaagctgcttatacaacaactgacctcttccaaactctaacacttaacctctgctattctgcataaattctgagaaaagccaaattttctgtcggtctaagaagacatagcctacacccaactggagataattataaaaaataatgaagcagcatgaggggaaggtatttaatgtgtattttaaagttgggagagattctccttcacctaatttaggtgtttgtgaattggcttgactttttgaagttaatttttaagccttgaacatgtccaactttaagaactttaagaataaatattttaacacaagtga

SEQ ID NO: 130082 - DNA, 1189 bp, Homo sapiens
  Payload ID: 5449
  Gene Symbol: EPHA6
  Gene Name: EPH receptor A6
  ENST ID: ENST00000508345
  CDS Start-End: 229-954
acaaacaaaactacaatggaagaagaaaacgtcctcaactagacatctgccaaaaatgaacatgagcagctgacctactcttccacaaggtccaaagcccccagtgtcatcatcacaggtcttaagccagccaccaaatatgtatttcacatccgagtgagaactgcgacaggatacagtggctacagtcagaaatttgaatttgaaacaggagatgaaacttctgacatggcagcagaacaaggacagattctcgtgatagccaccgccgctgttggcggattcactctcctcgtcatcctcactttattcttcttgatcactgggagatgtcagtggtacataaaagccaagatgaagtcagaagagaagagaagaaaccacttacagaatgggcatttgcgcttcccgggaattaaaacttacattgatccagatacatatgaagacccatccctagcagtccatgaatttgcaaaggagattgatccctcaagaattcgtattgagagagtcattggggcaggtgaatttggagaagtctgtagtgggcgtttgaagacaccagggaaaagagagatcccagttgccattaaaactttgaaaggtggccacatggatcggcaaagaagagattttctaagagaagctagtatcatgggccagtttgaccatccaaacatcattcgcctagaaggggttgtcaccaaaagatccttcccggccattggggtggaggcgttttgccccagcttcctgagggcagggtttttaaatagcatccaggccccgcatccagtgccagggggaggatctttgccccccaggattcctgctggcagaccagtaatgattgtggtggaatatatggagaatggatccctagactcctttttgcggctgtatcctaaagcagaatataatggcaaacagtgtagcagatattcaatctaaattgctgctaaaaatggatcaaatgactaccacaagcaaataagaagcatgatggccacttcacagtcatccagttggtcggaatgctccgaggcattgcatcaggcatgaagtatctttctgatatgggttatgttcatcgagacctagcggctcggaatatactggtcaatagcaacttagtatgcaaagtttctgattttggtctctccagagtgctggaagatgatccaga

SEQ ID NO: 130083 - DNA, 1078 bp, Homo sapiens
  Payload ID: 5449
  Gene Symbol: EPHA6
  Gene Name: EPH receptor A6
  ENST ID: ENST00000506569
  CDS Start-End: 1-973
ggaagaggaggaggaggaagaagacgtggacaaggacccccatcctacccagaacacctgcctgcgctgccgccacttctctttaagggagaggaaaagagagcctaggagaaccatggggggctgcgaagtccgggaatttcttttgcaatttggtttcttcttgcctctgctgacagcgtggccaggcgactgcagtcacgtctccaacaaccaagttgtgttgcttgatacaacaactgtactgggagagctaggatggaaaacatatccattaaatgggtgggatgccatcactgaaatggatgaacataataggcccattcacacataccaggtatgtaatgtaatggaaccaaaccaaaacaactggcttcgtacaaactggatctcccgtgatgcagctcagaaaatttatgtggaaatgaaattcacactaagggattgtaacagcatcccatgggtcttggggacttgcaaagaaacatttaatctgttttatatggaatcagatgagtcccacggaattaaattcaagccaaaccagtatacaaagatcgacacaattgctgctgatgagagttttacccagatggatttgggtgatcgcatcctcaaactcaacactgaaattcgtgaggtggggcctatagaaaggaaaggattttatctggcttttcaagacattggggcgtgcattgccctggtttcagtccgtgttttctacaagaaatgccccttcactgttcgtaacttggccatgtttcctgataccattccaagggttgattcctcctctttggttgaagtacggggttcttgtgtgaagagtgctgaagagcgtgacactcctaaactgtattgtggagctgatggagattggctggttcctcttggaaggtgcatctgcagtacaggatatgaagaaattgagggttcttgccatggagcctccaaaggccgctgcttctagttggccatcttggccccaccccgaaacagtaacctttgaagaataaaagaaaaagcaaaagagtagcattactaaaatattaaacggttacatttacagccaaaa

SEQ ID NO: 130084 - DNA, 1885 bp, Homo sapiens
  Payload ID: 5450
  Gene Symbol: EPHA7
  Gene Name: EPH receptor A7
  Uniprot ID: Q15375
  ENST ID: ENST00000369297
  CDS Start-End: 207-1046
gagacttgcaggcagcaaacacggtgcgagcgaacaggagtgggggggaaattaaaaaaagctaaacgtggagcagccgatcggggaccgagaaggggaatcgatgcaaggagcacaataaaacaaaagctacttcggaacaaacagcatttaaaaatccacgactcaagataactgaaacctaaaataaaacctgctcatgcaccatggtttttcaaactcggtacccttcatggattattttatgctacatctggctgctccgctttgcacacacaggggaggcgcaggctgcgaaggaagtactactgctggattctaaagcacaacaaacagagttggagtggatttcctctccacccaatgggtgggaagaaattagtggtttggatgagaactataccccgatacgaacataccaggtgtgccaagtcatggagcccaaccaaaacaactggctgcggactaactggatttccaaaggcaatgcacaaaggatttttgtagaattgaaattcaccctgagggattgtaacagtcttcctggagtactgggaacttgcaaggaaacatttaatttgtactattatgaaacagactatgacactggcaggaatataagagaaaacctctatgtaaaaatagacaccattgctgcagatgaaagttttacccaaggtgaccttggtgaaagaaagatgaagcttaacactgaggtgagagagattggacctttgtccaaaaagggattctatcttgcctttcaggatgtaggggcttgcatagctttggtttctgtcaaagtgtactacaagaagtgctggtccattattgagaacttagctatctttccagatacagtgactggttcagaattttcctctttagtcgaggttcgagggacatgtgtcagcagtgcagaggaagaagcggaaaacgcccccaggatgcactgcagtgcagaaggagaatggttagtgcccattggaaaatgtatctgcaaagcaggctaccagcaaaaaggagacacttgtgaacgtaagtaatgtgtcctattaaaactccactttgcctttttaaatttcagtatcagacattttaaactttaatagttatttgaatacgtgaatctgctctgtaccagaagcgcaattcagtagatcttaaacaaagtcaccgttgaacttagtgattgccctacagtagcatctgcactaagtgtatgtaatcaatataggtgataatgaaatttgttactaaaatttaatgtgtcctatgcttaacatggaagtcaatagttgcacgttgggctatggagtttagagaggagtctgggtagttggacatatagcctggcaagactgaggtgacatttaacaggatttaatgagatgccattcctcctgtttttaaacccatattgtctgggcccttgagtagcagtaaataggaggttaagagggctgtgaataagagctctagtgacaggcagggcataaacgaatatatttacaaacttttagaattatcttatataaatactataactttaatacaaaattttcaaatttcacttacaaaatctctgtggttacttctgagaaaggtgtgtgttttttttttttttttttggactaagtaccaaaatgaccacatttttgtgaaagtgggccaaagtaaagttttaattattatagtacaccaattgcatgttttgaaacaatcatgtatgaattagtaaacttttttctttgttttataaaaccgttttttttctttcctagcattatgtggctaaatatttaaaactatgtcatatggaccttcaagattgatagatattctgtttctaggtttcatgaaaataaattataaagttatgtta

SEQ ID NO: 130085 - DNA, 6588 bp, Homo sapiens
  Payload ID: 5450
  Gene Symbol: EPHA7
  Gene Name: EPH receptor A7
  Uniprot ID: Q15375
  ENST ID: ENST00000369303
  CDS Start-End: 186-3182
cggtgcgagcgaacaggagtgggggggaaattaaaaaaagctaaacgtggagcagccgatcggggaccgagaaggggaatcgatgcaaggagcacaataaaacaaaagctacttcggaacaaacagcatttaaaaatccacgactcaagataactgaaacctaaaataaaacctgctcatgcaccatggtttttcaaactcggtacccttcatggattattttatgctacatctggctgctccgctttgcacacacaggggaggcgcaggctgcgaaggaagtactactgctggattctaaagcacaacaaacagagttggagtggatttcctctccacccaatgggtgggaagaaattagtggtttggatgagaactataccccgatacgaacataccaggtgtgccaagtcatggagcccaaccaaaacaactggctgcggactaactggatttccaaaggcaatgcacaaaggatttttgtagaattgaaattcaccctgagggattgtaacagtcttcctggagtactgggaacttgcaaggaaacatttaatttgtactattatgaaacagactatgacactggcaggaatataagagaaaacctctatgtaaaaatagacaccattgctgcagatgaaagttttacccaaggtgaccttggtgaaagaaagatgaagcttaacactgaggtgagagagattggacctttgtccaaaaagggattctatcttgcctttcaggatgtaggggcttgcatagctttggtttctgtcaaagtgtactacaagaagtgctggtccattattgagaacttagctatctttccagatacagtgactggttcagaattttcctctttagtcgaggttcgagggacatgtgtcagcagtgcagaggaagaagcggaaaacgcccccaggatgcactgcagtgcagaaggagaatggttagtgcccattggaaaatgtatctgcaaagcaggctaccagcaaaaaggagacacttgtgaaccctgtggccgtgggttctacaagtcttcctctcaagatcttcagtgctctcgttgtccaactcacagtttttctgataaagaaggctcctccagatgtgaatgtgaagatgggtattacagggctccatctgacccaccatacgttgcgtgcacaaggcctccatctgcaccacagaacctcattttcaacatcaaccaaaccacagtaagtttggaatggagtcctcctgcagacaatgggggaagaaacgatgtgacctacagaatattgtgtaagcggtgcagttgggagcagggcgaatgtgttccctgtgggagtaacattggatacatgccccagcagactggattagaggataactatgtcactgtcatggacctgctagcccacgctaattatacttttgaagttgaagctgtaaatggagtttctgacttaagccgatcccagaggctctttgctgctgtcagtatcaccactggtcaagcagctccctcgcaagtgagtggagtaatgaaggagagagtactgcagcggagtgtcgagctttcctggcaggaaccagagcatcccaatggagtcatcacagaatatgaaatcaagtattacgagaaagatcaaagggaacggacctactcaacagtaaaaaccaagtctacttcagcctccattaataatctgaaaccaggaacagtgtatgttttccagattcgggcttttactgctgctggttatggaaattacagtcccagacttgatgttgctacactagaggaagctacaggtaaaatgtttgaagctacagctgtctccagtgaacagaatcctgttattatcattgctgtggttgctgtagctgggaccatcattttggtgttcatggtctttggcttcatcattgggagaaggcactgtggttatagcaaagctgaccaagaaggcgatgaagagctttactttcattttaaatttccaggcaccaaaacctacattgaccctgaaacctatgaggacccaaatagagctgtccatcaattcgccaaggagctagatgcctcctgtattaaaattgagcgtgtgattggtgcaggagaattcggtgaagtctgcagtggccgtttgaaacttccagggaaaagagatgttgcagtagccataaaaaccctgaaagttggttacacagaaaaacaaaggagagactttttgtgtgaagcaagcatcatggggcagtttgaccacccgaatgttgtccatttggaaggggttgttacaagagggaaaccagtcatgatagtaatagagttcatggaaaatggagccctagatgcatttctcaggaaacatgatgggcaatttacagtcattcagttagtaggaatgctgagaggaattgctgctggaatgagatatttggctgatatgggatatgttcacagggaccttgcagctcgcaatattcttgtcaacagcaatctcgtttgtaaagtgtcagattttggcctgtcccgagttatagaggatgatccagaagctgtctatacaactactggtggaaaaattccagtaaggtggacagcacccgaagccatccagtaccggaaattcacatcagccagtgatgtatggagctatggaatagtcatgtgggaagttatgtcttatggagaaagaccttattgggacatgtcaaatcaagatgttataaaagcaatagaagaaggttatcgtttaccagcacccatggactgcccagctggccttcaccagctaatgttggattgttggcaaaaggagcgtgctgaaaggccaaaatttgaacagatagttggaattctagacaaaatgattcgaaacccaaatagtctgaaaactcccctgggaacttgtagtaggccaataagccctcttctggatcaaaacactcctgatttcactaccttttgttcagttggagaatggctacaagctattaagatggaaagatataaagataatttcacggcagctggctacaattcccttgaatcagtagccaggatgactattgaggatgtgatgagtttagggatcacactggttggtcatcaaaagaaaatcatgagcagcattcagactatgagagcacaaatgctacatttacatggaactggcattcaagtgtgatatgcatttctcccttttaagggagattacagactgcaagagaacagtactggccttcagtatatgcatagaatgctgctagaagacaagtgatgtcctgggtccttccaacagtgaagagaagatttaagaagcacctatagacttgaactcctaagtgccaccagaatatataaaaagggaatttaggatccaccatcggtggccaggaaaatagcagtgacaataaacaaagtactacctgaaaaacatccaaacaccttgagctctctaacctcctttttgtcttatagactttttaaaatgtacataaagaatttaagaaagaatatatttgtcaaataaaatcatgatcttattgttaaaattaatgaaatattttccttaaatatgtgatttcagactattcctttttaaaatcatttgtgtttattcttcataaggactttgttttagaaagctgtttatagctttggacctttttagtgttaaatctgtaacattactacactgggtacctttgaaagaatctcaaatttcaaaagaaatagcatgattgaagatacatctctgttagaacattggtatcctttttgtgccattttattctgtttaatcagtgctgttttgatattgtttgctaattggcaggtagtcaagaaaatgcaagttgccaagagctctgatattttttaaaaagaatttttttgtaaagatcagacaacacactatcttttcaatgaaaaaagcaataatgatccatacatactataaggcacttttaacagattgtttatagagtgattttactagaaagaatttaataaactcgaagtttaggtttatgagtatataaacaaatgaggcacttcatctgaagaatgttggtgaaggcaagtctctgaaagcagaactatccagtgttatctaaaaattaatctgagcacatcaagattttttcattctcgtgacattaggaaatttaggataaatagttgacatatattttatatcctcttctgttgaatgcagtccaaacatgaaaggaaataattgttttatattataactctgaagcatgataaaggggcagttcacaattttcaccatttaaacacaaatttgctgcacagaatatcaccattgcagttcaaaacaaaacaaaacaaaaagtcttttgtttgtgaacactgatgcaagaaacttgttaaatgaaaggactctttaccctagaaggaagaggtgaaggatctggcttgtttttaaagctttatttattaaaccatattatttgattactgtgttagaatttcataagcaataattaaatgtgtctttatagatattgcaggaatgtatacatattgtgattaatgctttcaaaacttatgaaaatcatgaactaccccagaattgaactgttgtacttccaaagagaattgggctgtttataatgattttaatagagaaagatcccagggatcggtcataattggtcttgtttgataatgtgggcatccacaaacaaacaaacaaataacagaaacaaaatctgtaaatgttcctttgtaaaacttgtaaattttatttatactgtcttgttttgtacacacatttctctgtagtgggctctgaatacattgaaaatgcactatatttttctattttacttgcagagcatcacaaaagaacaggtattttcagtgctacataatgtgttttcccacatttaggaccaaagacggctatagaaaaactcaaatggattgcttcccaaacccctccccaccctttttttttggttttaaatcactgtacagtgttatttgatattttaatttattttttgattgactagaaaaatcattttaatttcactaaaatgttttttgtccctaaggaaaagtaatctgtaaaaataattttaattagcataatacagtcacctagacacttccatttgtaatctttgtaatagactgtaaatatatttttggaactataacacaatgtgcttgagggttatttttcagtgtctgcagtgtgtacaagtgtttatactaagtccagcactttacaattctaatcagtagcattggcctttgtgagaatgagtgaaagagtttgagtgagtgttcttaattccttttggattctagactcactaataatgaagttcttttcttgttcatagcttaaggtgcttattttttctattaaaattaaattaacaaaagccattctagaaatagaagacatagtatggtacatgcaaacggtgtctttcctgcttttttctagcactagatttatagttgagtagtctttcttgagtagaagggcagaataaaagtttttttgagtttttttcaaaaataaatttttccttcagcaatatacctcatctgccttaaattttttacagctctttacagggaaaggggagaagggatgggaaagacacacagcacaataggaagtgtatgattacatcactatctcgtttgtaagtttcttttcctaatcaacattatgatttcgaaatacatgtatgtgaaacaaatattaagagaaaaagaattaacattgtaatgctgattgtaatactctcttccagaaagagatgagatggtataacgataagaatgtacaacttgcaccttgaaatctttttttttaaataaattagtgctcaggggaggaaaagtagagaaagtgaacgtcaaaaatagaattccaaaattataaaaatgcaaaaggaaatggcctccttgctttaatagagccaccttttttagaacactgtcctcacacttgacctgtgttttgcattcagtactgaaataaaagtaacttgttctacatttgaatctaacattttctcagcaattgatctggtccttgtttactagaactggtggtttatgcttgtcagagcactattagttgaatcatattgtatacttatgtaatctacattagctagtactgtttaggactatattttaattgctcttcttatccgtgtttttaagacaattaaaatggtgtgattcacctctcttttttatttaggtaatgctgatattctcccttttgtttcttgagtagcctagaactatgctactcactgatgtgcatgttcaaataaattactgatgtgtatttttttgctatatgtggagaaatcatggggaactcggggcgagatgtgcttttcgttggttgaatttgtccctccttgcctaagaaatactacaggggtcatccttttataaggacaaactgcttttgaacagtgtcttcaatgtatcaagcacaaataactctttcttcaacatgaatcataagtctctttttaccagcttaaaataataaacaagtctattagacaatgtaaagaaaa

SEQ ID NO: 130086 - DNA, 4943 bp, Homo sapiens
  Payload ID: 5451
  Gene Symbol: EPHA8
  Gene Name: EPH receptor A8
  Uniprot ID: P29322
  ENST ID: ENST00000166244
  CDS Start-End: 73-3090
tcccgacgcgcgggccgcagcggccaagcccgagggtgcgtggcgcccccgcccgcccggcccggcccggccatggcccccgcccggggccgcctgccccctgcgctctgggtcgtcacggccgcggcggcggcggccacctgcgtgtccgcggcgcgcggcgaagtgaatttgctggacacgtcgaccatccacggggactggggctggctcacgtatccggctcatgggtgggactccatcaacgaggtggacgagtccttccagcccatccacacgtaccaggtttgcaacgtcatgagccccaaccagaacaactggctgcgcacgagctgggtcccccgagacggcgcccggcgcgtctatgctgagatcaagtttaccctgcgcgactgcaacagcatgcctggtgtgctgggcacctgcaaggagaccttcaacctctactacctggagtcggaccgcgacctgggggccagcacacaagaaagccagttcctcaaaatcgacaccattgcggccgacgagagcttcacaggtgccgaccttggtgtgcggcgtctcaagctcaacacggaggtgcgcagtgtgggtcccctcagcaagcgcggcttctacctggccttccaggacataggtgcctgcctggccatcctctctctccgcatctactataagaagtgccctgccatggtgcgcaatctggctgccttctcggaggcagtgacgggggccgactcgtcctcactggtggaggtgaggggccagtgcgtgcggcactcagaggagcgggacacacccaagatgtactgcagcgcggagggcgagtggctcgtgcccatcggcaaatgcgtgtgcagtgccggctacgaggagcggcgggatgcctgtgtggcctgtgagctgggcttctacaagtcagcccctggggaccagctgtgtgcccgctgccctccccacagccactccgcagctccagccgcccaagcctgccactgtgacctcagctactaccgtgcagccctggacccgccgtcctcagcctgcacccggccaccctcggcaccagtgaacctgatctccagtgtgaatgggacatcagtgactctggagtgggcccctcccctggacccaggtggccgcagtgacatcacctacaatgccgtgtgccgccgctgcccctgggcactgagccgctgcgaggcatgtgggagcggcacccgctttgtgccccagcagacaagcctggtgcaggccagcctgctggtggccaacctgctggcccacatgaactactccttctggatcgaggccgtcaatggcgtgtccgacctgagccccgagccccgccgggccgctgtggtcaacatcaccacgaaccaggcagccccgtcccaggtggtggtgatccgtcaagagcgggcggggcagaccagcgtctcgctgctgtggcaggagcccgagcagccgaacggcatcatcctggagtatgagatcaagtactacgagaaggacaaggagatgcagagctactccaccctcaaggccgtcaccaccagagccaccgtctccggcctcaagccgggcacccgctacgtgttccaggtccgagcccgcacctcagcaggctgtggccgcttcagccaggccatggaggtggagaccgggaaaccccggccccgctatgacaccaggaccattgtctggatctgcctgacgctcatcacgggcctggtggtgcttctgctcctgctcatctgcaagaagaggcactgtggctacagcaaggccttccaggactcggacgaggagaagatgcactatcagaatggacaggcacccccacctgtcttcctgcctctgcatcaccccccgggaaagctcccagagccccagttctatgcggaaccccacacctacgaggagccaggccgggcgggccgcagtttcactcgggagatcgaggcctctaggatccacatcgagaaaatcatcggctctggagactccggggaagtctgctacgggaggctgcgggtgccagggcagcgggatgtgcccgtggccatcaaggccctcaaagccggctacacggagagacagaggcgggacttcctgagcgaggcgtccatcatggggcaattcgaccatcccaacatcatccgcctcgagggtgtcgtcacccgtggccgcctggcaatgattgtgactgagtacatggagaacggctctctggacaccttcctgaggacccacgacgggcagttcaccatcatgcagctggtgggcatgctgagaggagtgggtgccggcatgcgctacctctcagacctgggctatgtccaccgagacctggccgcccgcaacgtcctggttgacagcaacctggtctgcaaggtgtctgacttcgggctctcacgggtgctggaggacgacccggatgctgcctacaccaccacgggcgggaagatccccatccgctggacggccccagaggccatcgccttccgcaccttctcctcggccagcgacgtgtggagcttcggcgtggtcatgtgggaggtgctggcctatggggagcggccctactggaacatgaccaaccgggatgtcatcagctctgtggaggaggggtaccgcctgcccgcacccatgggctgcccccacgccctgcaccagctcatgctcgactgttggcacaaggaccgggcgcagcggcctcgcttctcccagattgtcagtgtcctcgatgcgctcatccgcagccctgagagtctcagggccaccgccacagtcagcaggtgcccaccccctgccttcgtccggagctgctttgacctccgagggggcagcggtggcggtgggggcctcaccgtgggggactggctggactccatccgcatgggccggtaccgagaccacttcgctgcgggcggatactcctctctgggcatggtgctacgcatgaacgcccaggacgtgcgcgccctgggcatcaccctcatgggccaccagaagaagatcctgggcagcattcagaccatgcgggcccagctgaccagcacccaggggccccgccggcacctctgatgtacagccagcagggcccaggcagccaccaagcccaccccaggtcatgccagcggcagaggacgtgaggggctggcagcaggcagggcggccccaggcctctgccctcctctcaggtgctggaggagctgaaggcttcgccacaggacctggagttatcaggggtcaggcgcctgggaaggggcctttggtggccaccctggtgaggacacctgtcccccagggcaggcaccttctcttttccagagcctggggcctccacgtcacagagtccaacagggacatcactcgcctgcctctgtgtgcgtgcatgtgtgtgtgtggtggggggtgttctcacaaggtcatgggatctcatgtgaacagtgtgtgatcaagtgtgtccaccccttcgggtctcagcatggacgtgtgcatgttatgagcgtgtgcttatccgttaaggctggaggcacatgtgggtgatggtggatgatgtgtcatgaatgaggaggtgtgtgagcagggaactcagtgtgacaccgccaggtccagcacccatgggggcgggggagaggctcacccctacgtccccccacacctggaggctggagccaggggccacttctgaactgcaccagcaccaggcccaccctcgtctctgcctgggtgagcccaccccggctgtatctcaggtctgggtcctccctctagccgaggaggccacctgcagcctccacccggctctcaccgctgcttcaacaggaaaacagggttcccggtcagtccggctggccgccttcatggaggcatcatggcagagcacatgagatgtcctcagctgggcttggctgcctggccagggccgggggctcagcagcctcctctagcctctgatgccttccctccacggcccaggtctcctcactcaaagtcccttcgccaacctttcaatgcccagccctgacacctgccctttgtcccccaggcctaggatcagggaccagaggatcctatcttctcagcacccagcccaccccttcctgtagcatatggggagactaaggcctggagagaggggtgatgccccgtcccaggttgcactgcaaccaagtgtcagagtcggggctccggcctcctgccaaggctcttgtccccatacaccatcccacaagggcgctgggggtggaagtgccctggaagcccctcccctctcacactgacctccccccttacggcccaccagggtatgtaaatatctcttttctaccatgtcagaatattttttcctcactcctgacaatgcaaaaatggtcttcaaagcacataaaaagcacccagggtgagaaagccccatcccgggggccgttggcaggcagggaagcaggaaccccaccgtgtgccccctgccagccccagagggagtggcgagcccagctgcccagccctgccccccctccccatagccagcacagctatcccgcggggacaccagcactgagccccctctccctcctgcaataattcggggagtctcagccccatccaggtgccgcggccagctctctacacctctatatattatattactatatagccgagctgttcttccttcctatggaagtcggaaacatggtcagaacacgatctgggggggggatcctgtcttcctccccaccccaccccactcttacccaatttctgggctctggatcctcacagtcatggaggcaccgtgggcctggcacttgcaaaagtgtggcccctcactctagtgtgtggtccctctcagggtcctggggatctgcctctctgtggtctccatcctgactcttgaacttacccacaataagaataaattctgcctcatcttt

SEQ ID NO: 130087 - DNA, 1802 bp, Homo sapiens
  Payload ID: 5451
  Gene Symbol: EPHA8
  Gene Name: EPH receptor A8
  Uniprot ID: P29322
  ENST ID: ENST00000374644
  CDS Start-End: 73-1560
tcccgacgcgcgggccgcagcggccaagcccgagggtgcgtggcgcccccgcccgcccggcccggcccggccatggcccccgcccggggccgcctgccccctgcgctctgggtcgtcacggccgcggcggcggcggccacctgcgtgtccgcggcgcgcggcgaagtgaatttgctggacacgtcgaccatccacggggactggggctggctcacgtatccggctcatgggtgggactccatcaacgaggtggacgagtccttccagcccatccacacgtaccaggtttgcaacgtcatgagccccaaccagaacaactggctgcgcacgagctgggtcccccgagacggcgcccggcgcgtctatgctgagatcaagtttaccctgcgcgactgcaacagcatgcctggtgtgctgggcacctgcaaggagaccttcaacctctactacctggagtcggaccgcgacctgggggccagcacacaagaaagccagttcctcaaaatcgacaccattgcggccgacgagagcttcacaggtgccgaccttggtgtgcggcgtctcaagctcaacacggaggtgcgcagtgtgggtcccctcagcaagcgcggcttctacctggccttccaggacataggtgcctgcctggccatcctctctctccgcatctactataagaagtgccctgccatggtgcgcaatctggctgccttctcggaggcagtgacgggggccgactcgtcctcactggtggaggtgaggggccagtgcgtgcggcactcagaggagcgggacacacccaagatgtactgcagcgcggagggcgagtggctcgtgcccatcggcaaatgcgtgtgcagtgccggctacgaggagcggcgggatgcctgtgtggcctgtgagctgggcttctacaagtcagcccctggggaccagctgtgtgcccgctgccctccccacagccactccgcagctccagccgcccaagcctgccactgtgacctcagctactaccgtgcagccctggacccgccgtcctcagcctgcacccggccaccctcggcaccagtgaacctgatctccagtgtgaatgggacatcagtgactctggagtgggcccctcccctggacccaggtggccgcagtgacatcacctacaatgccgtgtgccgccgctgcccctgggcactgagccgctgcgaggcatgtgggagcggcacccgctttgtgccccagcagacaagcctggtgcaggccagcctgctggtggccaacctgctggcccacatgaactactccttctggatcgaggccgtcaatggcgtgtccgacctgagccccgagccccgccgggccgctgtggtcaacatcaccacgaaccaggcaggtaggcggagaaactccgtcccgcagcgtcctggtcccccagcttcccctgcctcagacccatccagggatcagagctctgccggggacgtgctgtgggcctttaggcaagtgcctctctggccctgcgctcctcaccaggacccagagctggaggctcttcattgcctttagaaaagtggaacacattctataagtaagagaaatcccaaaagctcagaggcaggctagtgtggccgtcgaaagcctaggttccagaactttccctctctgtgcctcagtttcctccctggtgcaatgggaataatagtacctgcctgaggtcctctcaggaggcttaaatgagaggaatgaaattgcttagcccagcacctggcccgtggtaaatgctcaataaatgtcattaaaaaataaaa

SEQ ID NO: 130088 - DNA, 1773 bp, Homo sapiens
  Payload ID: 5451
  Gene Symbol: EPHA8
  Gene Name: EPH receptor A8
  Uniprot ID: P29322
  ENST ID: ENST00000538803
  CDS Start-End: 55-1542
gccgcagcggccaagcccgagggtgcgtggcgcccccgcccgcccggcccggccatggcccccgcccggggccgcctgccccctgcgctctgggtcgtcacggccgcggcggcggcggccacctgcgtgtccgcggcgcgcggcgaagtgaatttgctggacacgtcgaccatccacggggactggggctggctcacgtatccggctcatgggtgggactccatcaacgaggtggacgagtccttccagcccatccacacgtaccaggtttgcaacgtcatgagccccaaccagaacaactggctgcgcacgagctgggtcccccgagacggcgcccggcgcgtctatgctgagatcaagtttaccctgcgcgactgcaacagcatgcctggtgtgctgggcacctgcaaggagaccttcaacctctactacctggagtcggaccgcgacctgggggccagcacacaagaaagccagttcctcaaaatcgacaccattgcggccgacgagagcttcacaggtgccgaccttggtgtgcggcgtctcaagctcaacacggaggtgcgcagtgtgggtcccctcagcaagcgcggcttctacctggccttccaggacataggtgcctgcctggccatcctctctctccgcatctactataagaagtgccctgccatggtgcgcaatctggctgccttctcggaggcagtgacgggggccgactcgtcctcactggtggaggtgaggggccagtgcgtgcggcactcagaggagcgggacacacccaagatgtactgcagcgcggagggcgagtggctcgtgcccatcggcaaatgcgtgtgcagtgccggctacgaggagcggcgggatgcctgtgtggcctgtgagctgggcttctacaagtcagcccctggggaccagctgtgtgcccgctgccctccccacagccactccgcagctccagccgcccaagcctgccactgtgacctcagctactaccgtgcagccctggacccgccgtcctcagcctgcacccggccaccctcggcaccagtgaacctgatctccagtgtgaatgggacatcagtgactctggagtgggcccctcccctggacccaggtggccgcagtgacatcacctacaatgccgtgtgccgccgctgcccctgggcactgagccgctgcgaggcatgtgggagcggcacccgctttgtgccccagcagacaagcctggtgcaggccagcctgctggtggccaacctgctggcccacatgaactactccttctggatcgaggccgtcaatggcgtgtccgacctgagccccgagccccgccgggccgctgtggtcaacatcaccacgaaccaggcaggtaggcggagaaactccgtcccgcagcgtcctggtcccccagcttcccctgcctcagacccatccagggatcagagctctgccggggacgtgctgtgggcctttaggcaagtgcctctctggccctgcgctcctcaccaggacccagagctggaggctcttcattgcctttagaaaagtggaacacattctataagtaagagaaatcccaaaagctcagaggcaggctagtgtggccgtcgaaagcctaggttccagaactttccctctctgtgcctcagtttcctccctggtgcaatgggaataatagtacctgcctgaggtcctctcaggaggcttaaatgagaggaatgaaattgcttagcccagcacctggcccgtggtaaatgctcaataaatgtcatt

SEQ ID NO: 130089 - DNA, 4672 bp, Homo sapiens
  Payload ID: 5452
  Gene Symbol: EPHB1
  Gene Name: EPH receptor B1
  Uniprot ID: P54762
  ENST ID: ENST00000398015
  CDS Start-End: 371-3325
tctggccggctccgtcctcccgtaggctccgctgtagctagcaatgtgacaccaggacgcactcgctctcgcgcgctctcccaggctcgttctccctcgccctctctctctcacacacgcacgcacacacccacctctcccataaacacacacacacacatgcacacccacacccacgcgcgcccgcaccgccccacgcgcacacactcctgcccacgcccacgcagcgctccgggaagtccggtccgggcgagagcgcgaaaggataccgagaagccacccgcggagagcgcagcggcgccctgggacgcggcgctctcccggcgctgctgcctcggcttggtctcggcctgcgggccgtcggccggcgatggccctggattatctactactgctcctcctggcatccgcagtggctgcgatggaagaaacgttaatggacaccagaacggctactgcagagctgggctggacggccaatcctgcgtccgggtgggaagaagtcagtggctacgatgaaaacctgaacaccatccgcacctaccaggtgtgcaatgtcttcgagcccaaccagaacaattggctgctcaccaccttcatcaaccggcggggggcccatcgcatctacacagagatgcgcttcactgtgagagactgcagcagcctccctaatgtcccaggatcctgcaaggagaccttcaacttgtattactatgagactgactctgtcattgccaccaagaagtcagccttctggtctgaggccccctacctcaaagtagacaccattgctgcagatgagagcttctcccaggtggactttgggggaaggctgatgaaggtaaacacagaagtcaggagctttgggcctcttactcggaatggtttttacctcgcttttcaggattatggagcctgtatgtctcttctttctgtccgtgtcttcttcaaaaagtgtcccagcattgtgcaaaattttgcagtgtttccagagactatgacaggggcagagagcacatctctggtgattgctcggggcacatgcatccccaacgcagaggaagtggacgtgcccatcaaactctactgcaacggggatggggaatggatggtgcctattgggcgatgcacctgcaagcctggctatgagcctgagaacagcgtggcatgcaaggcttgccctgcagggacattcaaggccagccaggaagctgaaggctgctcccactgcccctccaacagccgctcccctgcagaggcgtctcccatctgcacctgtcggaccggttattaccgagcggactttgaccctccagaagtggcatgcactagcgtcccatcaggtccccgcaatgttatctccatcgtcaatgagacgtccatcattctggagtggcaccctccaagggagacaggtgggcgggatgatgtgacctacaacatcatctgcaaaaagtgccgggcagaccgccggagctgctcccgctgtgacgacaatgtggagtttgtgcccaggcagctgggcctgacggagtgccgcgtctccatcagcagcctgtgggcccacaccccctacacctttgacatccaggccatcaatggagtctccagcaagagtcccttccccccacagcacgtctctgtcaacatcaccacaaaccaagccgccccctccaccgttcccatcatgcaccaagtcagtgccactatgaggagcatcaccttgtcatggccacagccggagcagcccaatggcatcatcctggactatgagatccggtactatgagaaggaacacaatgagttcaactcctccatggccaggagtcagaccaacacagcaaggattgatgggctgcggcctggcatggtatatgtggtacaggtgcgtgcccgcactgttgctggctacggcaagttcagtggcaagatgtgcttccagactctgactgacgatgattacaagtcagagctgagggagcagctgcccctgattgctggctcggcagcggccggggtcgtgttcgttgtgtccttggtggccatctctatcgtctgtagcaggaaacgggcttatagcaaagaggctgtgtacagcgataagctccagcattacagcacaggccgaggctccccagggatgaagatctacattgaccccttcacttacgaggatcccaacgaagctgtccgggagtttgccaaggagattgatgtatcttttgtgaaaattgaagaggtcatcggagcaggggagtttggagaagtgtacaaggggcgtttgaaactgccaggcaagagggaaatctacgtggccatcaagaccctgaaggcagggtactcggagaagcagcgtcgggactttctgagtgaggcgagcatcatgggccagttcgaccatcctaacatcattcgcctggagggtgtggtcaccaagagtcggcctgtcatgatcatcacagagttcatggagaatggtgcattggattctttcctcaggcaaaatgacgggcagttcaccgtgatccagcttgtgggtatgctcaggggcatcgctgctggcatgaagtacctggctgagatgaattatgtgcatcgggacctggctgctaggaacattctggtcaacagtaacctggtgtgcaaggtgtccgactttggcctctcccgctacctccaggatgacacctcagatcccacctacaccagctccttgggagggaagatccctgtgagatggacagctccagaggccatcgcctaccgcaagttcacttcagccagcgacgtttggagctatgggatcgtcatgtgggaagtcatgtcatttggagagagaccctattgggatatgtccaaccaagatgtcatcaatgccatcgagcaggactaccggctgcccccacccatggactgtccagctgctctacaccagctcatgctggactgttggcagaaggaccggaacagccggccccggtttgcggagattgtcaacaccctagataagatgatccggaacccggcaagtctcaagactgtggcaaccatcaccgccgtgccttcccagcccctgctcgaccgctccatcccagacttcacggcctttaccaccgtggatgactggctcagcgccatcaaaatggtccagtacagggacagcttcctcactgctggcttcacctccctccagctggtcacccagatgacatcagaagacctcctgagaataggcatcaccttggcaggccatcagaagaagatcctgaacagcattcattctatgagggtccagataagtcagtcaccaacggcaatggcatgagaactcttgtttcttggggaaggagaggagggaaaaggaccagggtcaagggggaccagaggttgaccactgtggaatgtactggagagactggcttctcagctgaggaatgcatttccatcagtgaagaatcaaccggacctgttgctagcaggcaatctccatttctcagtgacagaagcatgtttgagatgccgtgggaaaccaaatatataataataaaaatataaaaaggtgatgttcaacagaagtgaagacaaaacaatatgcatcaggagaacaagagtaaacccagctcccattctcagtgggctgcagttgcccaaccacaggaagaaagggaaggaggtagagggaagaaacagaagcagtgttccattttcttcctcaccaatgacattcttttcttttctcctttcgtactcctccctgagagtcccctcccttctcccacactcgtttccctttgctcatgactcctgtagggaagtttcttcaaacaaaacccagctcctgagtctccagatgttgttctgtcagttgccaaaggactttgctgaccactgcatggggatccaaccaattcaattaatgtcttcatattgaagaagagatgtaccttcaattgaaaacctcgtttttcttttgtttgcattttctgcaaaaaggaaaaagaaaccacaaattggggaaaaaaaaagaagaaaaacctgtttccgtgtgcaaaagcacacatatgtatgtctgtgttataaaatgactgtgcttgttcgtaacagatgcaaacaagaaagaagaactgggaagtctttgtccctaggaaatccaaaggggctggaatatggtgttggtttggctttctggttggcccaatcggcctattggctcaatgggaagagaggagagggagaaaaataaaatgaaaggaaaaaaaaaagtttgcaaattcagacaggaaacaggtgagtggtttgaattggatgcagtgtgggccatcctggaatgatactgactgattaattattcctgataacatctcaagaaaaggagaaggaaagtgtttctggagaatgttctttcacatcactggaatctgcaattcaagaagtgacaagggagaattcttgctttacctatggactggcttaagccgtgtggcatccgaggaatgtttcaaatgtgtctgtgtttctctttacattccttgttgtacctcattgttcaattcacttttgtaaattccacctaacatttaattattttaaatttctccttttaccttaatctccttgctaattttatctgtctaattaaaaagagcagaagcatgtctgggtttacgtaaaa

SEQ ID NO: 130090 - DNA, 511 bp, Homo sapiens
  Payload ID: 5452
  Gene Symbol: EPHB1
  Gene Name: EPH receptor B1
  ENST ID: ENST00000473867
  CDS Start-End: 204-511
agatgcctgcaacagcagaatgagaagaaagcagggaaatgctctgtatcggccaaataaaatcaatctggctctcagatgcattggaaacttcaaattaaagcaggacaaatagcctaaggaggcttcacaaggatggaggcagtaggatgagagattcctgaaaggaggcagggatgactacatcataaaaagaaacgttaatggacaccagaacggctactgcagagctgggctggacggccaatcctgcgtccgggtgggaagaagtcagtggctacgatgaaaacctgaacaccatccgcacctaccaggtgtgcaatgtcttcgagcccaaccagaacaattggctgctcaccaccttcatcaaccggcggggggcccatcgcatctacacagagatgcgcttcactgtgagagactgcagcagcctccctaatgtcccaggatcctgcaaggagaccttcaacttgtattactatgagactgactctgtcattgccaccaagaa

SEQ ID NO: 130091 - DNA, 564 bp, Homo sapiens
  Payload ID: 5452
  Gene Symbol: EPHB1
  Gene Name: EPH receptor B1
  ENST ID: ENST00000460895
  CDS Start-End: 227-564
ttttttcacgtgtgaaaacatctattgggaaaatggaaaaatcatttgacctcatattcctcatagctgacatgacaaaaccaaaatgtggtggtgagccaacttcaattttgcagaaactgacttggaaagaactgattacctgaaggaccgtgaggatcaaagttgtcccactgaccaggctgtaaactttggaactgataagtgagagagataagaaacgttaatggacaccagaacggctactgcagagctgggctggacggccaatcctgcgtccgggtgggaagaagtcagtggctacgatgaaaacctgaacaccatccgcacctaccaggtgtgcaatgtcttcgagcccaaccagaacaattggctgctcaccaccttcatcaaccggcggggggcccatcgcatctacacagagatgcgcttcactgtgagagactgcagcagcctccctaatgtcccaggatcctgcaaggagaccttcaacttgtattactatgagactgactctgtcattgccaccaagaagtcagccttctggtctgaggccccctacct

SEQ ID NO: 130092 - DNA, 554 bp, Homo sapiens
  Payload ID: 5452
  Gene Symbol: EPHB1
  Gene Name: EPH receptor B1
  ENST ID: ENST00000474732
  CDS Start-End: 106-554
gatttttgtaggtgcatccaactgcaacagaatacatcagcctcatcggaaggagaatggaaggcctgagaacgcacaaaaggagcatttggagaggaaacgttaatggacaccagaacggctactgcagagctgggctggacggccaatcctgcgtccgggtgggaagaagtcagtggctacgatgaaaacctgaacaccatccgcacctaccaggtgtgcaatgtcttcgagcccaaccagaacaattggctgctcaccaccttcatcaaccggcggggggcccatcgcatctacacagagatgcgcttcactgtgagagactgcagcagcctccctaatgtcccaggatcctgcaaggagaccttcaacttgtattactatgagactgactctgtcattgccaccaagaagtcagccttctggtctgaggccccctacctcaaagtagacaccattgctgcagatgagagcttctcccaggtggactttgggggaaggctgatgaaggtaaacacagaagtcaggagctttgggcctcttactcggaatgg

SEQ ID NO: 130093 - DNA, 2786 bp, Homo sapiens
  Payload ID: 5452
  Gene Symbol: EPHB1
  Gene Name: EPH receptor B1
  Uniprot ID: P54762
  ENST ID: ENST00000493838
  CDS Start-End: 899-2536
actcccaccatccccctctaacagcacggagtcagtttccaggcagtgggcaaggagggctaagaacttgccccaggctacctgcctcccagctgaaaagggctttagttcttcccctgcctgtggagtctgcatgccagattcgcaccctcccctgagttctggccaggaggcttctgaacaagttcatattgttacaaagttcagctggagacttccttctccctgtggcattttcccagtgcctctggctgccctcctgagggatccctgtggtgccaggcaggaatttcctgcttggggaacccagtgggctcccagagcctttctcgcagcttcctctacccctgtatttcgctcggctctctaaattgactcagctccagcttgccctgcagggacattcaaggccagccaggaagctgaaggctgctcccactgcccctccaacagccgctcccctgcagaggcgtctcccatctgcacctgtcggaccggttattaccgagcggactttgaccctccagaagtggcatgcactagcgtcccatcaggtccccgcaatgttatctccatcgtcaatgagacgtccatcattctggagtggcaccctccaagggagacaggtgggcgggatgatgtgacctacaacatcatctgcaaaaagtgccgggcagaccgccggagctgctcccgctgtgacgacaatgtggagtttgtgcccaggcagctgggcctgacggagtgccgcgtctccatcagcagcctgtgggcccacaccccctacacctttgacatccaggccatcaatggagtctccagcaagagtcccttccccccacagcacgtctctgtcaacatcaccacaaaccaagccgccccctccaccgttcccatcatgcaccaagtcagtgccactatgaggagcatcaccttgtcatggccacagccggagcagcccaatggcatcatcctggactatgagatccggtactatgagaaggaacacaatgagttcaactcctccatggccaggagtcagaccaacacagcaaggattgatgggctgcggcctggcatggtatatgtggtacaggtgcgtgcccgcactgttgctggctacggcaagttcagtggcaagatgtgcttccagactctgactgacgatgattacaagtcagagctgagggagcagctgcccctgattgctggctcggcagcggccggggtcgtgttcgttgtgtccttggtggccatctctatcgtctgtagcaggaaacgggcttatagcaaagaggctgtgtacagcgataagctccagcattacagcacaggccgaggctccccagggatgaagatctacattgaccccttcacttacgaggatcccaacgaagctgtccgggagtttgccaaggagattgatgtatcttttgtgaaaattgaagaggtcatcggagcaggggagtttggagaagtgtacaaggggcgtttgaaactgccaggcaagagggaaatctacgtggccatcaagaccctgaaggcagggtactcggagaagcagcgtcgggactttctgagtgaggcgagcatcatgggccagttcgaccatcctaacatcattcgcctggagggtgtggtcaccaagagtcggcctgtcatgatcatcacagagttcatggagaatggtgcattggattctttcctcaggcaaaatgacgggcagttcaccgtgatccagcttgtgggtatgctcaggggcatcgctgctggcatgaagtacctggctgagatgaattatgtgcatcgggacctggctgctaggaacattctggtcaacagtaacctggtgtgcaaggtgtccgactttggcctctcccgctacctccaggatgacacctcagatcccacctacaccagctccttgggagggaagatccctgtgagatggacagctccagaggccatcgcctaccgcaagttcacttcagccagcgacgtttggagctatgggatcgtcatgtgggaagtcatgtcatttggagagagaccctattgggatatgtccaaccaagatgtcatcaatgccatcgagcaggactaccggctgcccccacccatggactgtccagctgctctacaccagctcatgctggactgttggcagaaggaccggaacagccggccccggtttgcggagattgtcaacaccctagataagatgatccggaacccggcaagtctcaagactgtggcaaccatcaccgccgtgccttcccagcccctgctcgaccgctccatcccagacttcacggcctttaccaccgtggatgactggctcagcgccatcaaaatggtccagtacagggacagcttcctcactgctggcttcacctccctccagctggtcacccagatgacatcagaagacctcctgagaataggcatcaccttggcaggccatcagaagaagatcctgaacagcattcattctatgagggtccagataagtcagtcaccaacggcaatggcatgagaactcttgtttcttggggaaggagaggagggaaaaggaccagggtcaagggggaccagaggttgaccactgtggaatgtactggagagactggcttctcagctgaggaatgcatttccatcagtgaagaatcaaccggacctgttgctagcaggcaatctccatttctcagtgacagaagcatgtttgagatgccgtgggaaaccaaatatataataataaaaatataaaaaggtgatgttcaacagaa

SEQ ID NO: 130094 - DNA, 389 bp, Homo sapiens
  Payload ID: 5452
  Gene Symbol: EPHB1
  Gene Name: EPH receptor B1
  ENST ID: ENST00000497173
  CDS Start-End: 262-389
cttttctccagctcgcagtccacgggctagtggactctgcttggcgtgcaagcactgcgcgcgggggccggagaagctctgccgtggtatcccgcaagtggccgccgaaggagaggggtggagttcattggccgtacccttggggaccagtctggtggtccgggcgcctgcgggactgcaggtttccagggtcagtcggggagaggtggaaacccttttcgcctcttgagccttggaacaggagtgggctgggaaacgttaatggacaccagaacggctactgcagagctgggctggacggccaatcctgcgtccgggtgggaagaagtcagtggctacgatgaaaacctgaacaccatccgcacctaccaggtgtgcaatgtcttcga

SEQ ID NO: 130095 - DNA, 1496 bp, Homo sapiens
  Payload ID: 5452
  Gene Symbol: EPHB1
  Gene Name: EPH receptor B1
  ENST ID: ENST00000482618
  CDS Start-End: 371-1216
tctggccggctccgtcctcccgtaggctccgctgtagctagcaatgtgacaccaggacgcactcgctctcgcgcgctctcccaggctcgttctccctcgccctctctctctcacacacgcacgcacacacccacctctcccataaacacacacacacacatgcacacccacacccacgcgcgcccgcaccgccccacgcgcacacactcctgcccacgcccacgcagcgctccgggaagtccggtccgggcgagagcgcgaaaggataccgagaagccacccgcggagagcgcagcggcgccctgggacgcggcgctctcccggcgctgctgcctcggcttggtctcggcctgcgggccgtcggccggcgatggccctggattatctactactgctcctcctggcatccgcagtggctgcgatggaagaaacgttaatggacaccagaacggctactgcagagctgggctggacggccaatcctgcgtccgggtgggaagaagtcagtggctacgatgaaaacctgaacaccatccgcacctaccaggtgtgcaatgtcttcgagcccaaccagaacaattggctgctcaccaccttcatcaaccggcggggggcccatcgcatctacacagagatgcgcttcactgtgagagactgcagcagcctccctaatgtcccaggatcctgcaaggagaccttcaacttgtattactatgagactgactctgtcattgccaccaagaagtcagccttctggtctgaggccccctacctcaaagtagacaccattgctgcagatgagagcttctcccaggtggactttgggggaaggctgatgaaggtaaacacagaagtcaggagctttgggcctcttactcggaatggtttttacctcgcttttcaggattatggagcctgtatgtctcttctttctgtccgtgtcttcttcaaaaagtgtcccagcattgtgcaaaattttgcagtgtttccagagactatgacaggggcagagagcacatctctggtgattgctcggggcacatgcatccccaacgcagaggaagtggacgtgcccatcaaactctactgcaacggggatggggaatggatggtgcctattgggcgatgcacctgcaagcctggctatgagcctgagaacagcgtggcatgcaaggtgtccaggcctttttggaggatccttagacagcaggattgacattggaggagcctggtatttctgccacactcacacagcctcctctgcatccaccccctctgaggaagcagcttgccctgcagggacattcaaggccagccaggaagctgaaggctgctcccactgcccctccaacagccgctcccctgcagaggcgtctcccatctgcacctgtcggaccggttattaccgagcggactttgaccctccagaagtggcatgcactagcgtcccatcaggtccccgcaatgttatctccatcgtcaatgagacgtccatc

SEQ ID NO: 130096 - DNA, 4014 bp, Homo sapiens
  Payload ID: 5453
  Gene Symbol: EPHB2
  Gene Name: EPH receptor B2
  ENST ID: ENST00000374627
  CDS Start-End: 25-2865
taacacagttgtgaaaatagatggatgtgggttccagtcctagccctgcctgtgtgcacttatgcagaaacgctaatggactccactacagcgactgctgagctgggctggatggtgcatcctccatcagggtgggaagaggtgagtggctacgatgagaacatgaacacgatccgcacgtaccaggtgtgcaacgtgtttgagtcaagccagaacaactggctacggaccaagtttatccggcgccgtggcgcccaccgcatccacgtggagatgaagttttcggtgcgtgactgcagcagcatccccagcgtgcctggctcctgcaaggagaccttcaacctctattactatgaggctgactttgactcggccaccaagaccttccccaactggatggagaatccatgggtgaaggtggataccattgcagccgacgagagcttctcccaggtggacctgggtggccgcgtcatgaaaatcaacaccgaggtgcggagcttcggacctgtgtcccgcagcggcttctacctggccttccaggactatggcggctgcatgtccctcatcgccgtgcgtgtcttctaccgcaagtgcccccgcatcatccagaatggcgccatcttccaggaaaccctgtcgggggctgagagcacatcgctggtggctgcccggggcagctgcatcgccaatgcggaagaggtggatgtacccatcaagctctactgtaacggggacggcgagtggctggtgcccatcgggcgctgcatgtgcaaagcaggcttcgaggccgttgagaatggcaccgtctgccgaggttgtccatctgggactttcaaggccaaccaaggggatgaggcctgtacccactgtcccatcaacagccggaccacttctgaaggggccaccaactgtgtctgccgcaatggctactacagagcagacctggaccccctggacatgccctgcacaaccatcccctccgcgccccaggctgtgatttccagtgtcaatgagacctccctcatgctggagtggacccctccccgcgactccggaggccgagaggacctcgtctacaacatcatctgcaagagctgtggctcgggccggggtgcctgcacccgctgcggggacaatgtacagtacgcaccacgccagctaggcctgaccgagccacgcatttacatcagtgacctgctggcccacacccagtacaccttcgagatccaggctgtgaacggcgttactgaccagagccccttctcgcctcagttcgcctctgtgaacatcaccaccaaccaggcagctccatcggcagtgtccatcatgcatcaggtgagccgcaccgtggacagcattaccctgtcgtggtcccagccggaccagcccaatggcgtgatcctggactatgagctgcagtactatgagaagcaggagctcagtgagtacaacgccacagccataaaaagccccaccaacacggtcaccgtgcagggcctcaaagccggcgccatctatgtcttccaggtgcgggcacgcaccgtggcaggttacgggcgctacagcggcaagatgtacttccagaccatgacagaagccgagtaccagacaagcatccaggagaagttgccactcatcatcggctcctcggccgctggcctggtcttcctcattgctgtggttgtcatcgccatcgtgtgtaacagacgggggtttgagcgtgctgactcggagtacacggacaagctgcaacactacaccagtggccacatgaccccaggcatgaagatctacatcgatcctttcacctacgaggaccccaacgaggcagtgcgggagtttgccaaggaaattgacatctcctgtgtcaaaattgagcaggtgatcggagcaggggagtttggcgaggtctgcagtggccacctgaagctgccaggcaagagagagatctttgtggccatcaagacgctcaagtcgggctacacggagaagcagcgccgggacttcctgagcgaagcctccatcatgggccagttcgaccatcccaacgtcatccacctggagggtgtcgtgaccaagagcacacctgtgatgatcatcaccgagttcatggagaatggctccctggactcctttctccggcaaaacgatgggcagttcacagtcatccagctggtgggcatgcttcggggcatcgcagctggcatgaagtacctggcagacatgaactatgttcaccgtgacctggctgcccgcaacatcctcgtcaacagcaacctggtctgcaaggtgtcggactttgggctctcacgctttctagaggacgatacctcagaccccacctacaccagtgccctgggcggaaagatccccatccgctggacagccccggaagccatccagtaccggaagttcacctcggccagtgatgtgtggagctacggcattgtcatgtgggaggtgatgtcctatggggagcggccctactgggacatgaccaaccaggatgtaatcaatgccattgagcaggactatcggctgccaccgcccatggactgcccgagcgccctgcaccaactcatgctggactgttggcagaaggaccgcaaccaccggcccaagttcggccaaattgtcaacacgctagacaagatgatccgcaatcccaacagcctcaaagccatggcgcccctctcctctggcatcaacctgccgctgctggaccgcacgatccccgactacaccagctttaacacggtggacgagtggctggaggccatcaagatggggcagtacaaggagagcttcgccaatgccggcttcacctcctttgacgtcgtgtctcagatgatgatggagtaagtgcccagccacttctgcttgtcaccttagcaccccctctccaccggccccaccagccaagtggggtgatctggagggtgaggaatagatcatgtcccaatagggaagcagggaccaaggggcaagatggccaactttggagtcacctgtggactgatacccaggtctgcctgccacctacaagctctgtgaccttggtcaaatcatagcacctccctcagcctccgttttctcacctacaaactgggggttggtaggaaggttgagggagatataaaggaagcgggtgcttagaaaatgcaagctggcagccgggcacagtggctcatgcctgtaatcttagtacattgggaggccgaggcgggcagatcacaaggtcaggagttcaagaccagcctgaccaacatggtgaaaccccgtctctactaaaatgcaaaaaattagccacgcaaggtggcatgcacctgtaatgccagctactcgggaggctgaggcaggggaattgcttgaaccaaggaggtagaggttgcagtgagctgagatcacgccactgcacaccagcctgggtgacagagcgagactctgtctcgaaaaagaaagaaaatgtaagctggcttccccctcccaatagcaggggagagaaggccccctagggaccctgattccgactcaagtgctcttccacctcacaccatagtcgctccctccagctgtggctgcctgcccactccccactccccactccccagtactccttgctttgccatcttcctcccggggaagcccaggcagctctctaccaggcacaggaccccttcacccgcatatttccctaacacacgtgcttctctcccaaagggacattctccgggttggggtcactttggctggccaccagaaaaaaatcctgaacagtatccaggtgatgcgggcgcagatgaaccagattcagtctgtggaggtttgacattcacctgcctcggctcacctcttcctccaagccccgccccctctgccccacgtgccggccctcctggtgctctatccactgcagggccagccactcgccaggaggccacgggccacgggaagaaccaagcggtgccagccacgagacgtcaccaagaaaacatgcaactcaaacgacgg

SEQ ID NO: 130097 - DNA, 3152 bp, Homo sapiens
  Payload ID: 5453
  Gene Symbol: EPHB2
  Gene Name: EPH receptor B2
  Uniprot ID: P29323
  ENST ID: ENST00000374630
  CDS Start-End: 19-2979
gccccgggaagcgcagccatggctctgcggaggctgggggccgcgctgctgctgctgccgctgctcgccgccgtggaagaaacgctaatggactccactacagcgactgctgagctgggctggatggtgcatcctccatcagggtgggaagaggtgagtggctacgatgagaacatgaacacgatccgcacgtaccaggtgtgcaacgtgtttgagtcaagccagaacaactggctacggaccaagtttatccggcgccgtggcgcccaccgcatccacgtggagatgaagttttcggtgcgtgactgcagcagcatccccagcgtgcctggctcctgcaaggagaccttcaacctctattactatgaggctgactttgactcggccaccaagaccttccccaactggatggagaatccatgggtgaaggtggataccattgcagccgacgagagcttctcccaggtggacctgggtggccgcgtcatgaaaatcaacaccgaggtgcggagcttcggacctgtgtcccgcagcggcttctacctggccttccaggactatggcggctgcatgtccctcatcgccgtgcgtgtcttctaccgcaagtgcccccgcatcatccagaatggcgccatcttccaggaaaccctgtcgggggctgagagcacatcgctggtggctgcccggggcagctgcatcgccaatgcggaagaggtggatgtacccatcaagctctactgtaacggggacggcgagtggctggtgcccatcgggcgctgcatgtgcaaagcaggcttcgaggccgttgagaatggcaccgtctgccgaggttgtccatctgggactttcaaggccaaccaaggggatgaggcctgtacccactgtcccatcaacagccggaccacttctgaaggggccaccaactgtgtctgccgcaatggctactacagagcagacctggaccccctggacatgccctgcacaaccatcccctccgcgccccaggctgtgatttccagtgtcaatgagacctccctcatgctggagtggacccctccccgcgactccggaggccgagaggacctcgtctacaacatcatctgcaagagctgtggctcgggccggggtgcctgcacccgctgcggggacaatgtacagtacgcaccacgccagctaggcctgaccgagccacgcatttacatcagtgacctgctggcccacacccagtacaccttcgagatccaggctgtgaacggcgttactgaccagagccccttctcgcctcagttcgcctctgtgaacatcaccaccaaccaggcagctccatcggcagtgtccatcatgcatcaggtgagccgcaccgtggacagcattaccctgtcgtggtcccagccggaccagcccaatggcgtgatcctggactatgagctgcagtactatgagaaggagctcagtgagtacaacgccacagccataaaaagccccaccaacacggtcaccgtgcagggcctcaaagccggcgccatctatgtcttccaggtgcgggcacgcaccgtggcaggttacgggcgctacagcggcaagatgtacttccagaccatgacagaagccgagtaccagacaagcatccaggagaagttgccactcatcatcggctcctcggccgctggcctggtcttcctcattgctgtggttgtcatcgccatcgtgtgtaacagacgggggtttgagcgtgctgactcggagtacacggacaagctgcaacactacaccagtggccacatgaccccaggcatgaagatctacatcgatcctttcacctacgaggaccccaacgaggcagtgcgggagtttgccaaggaaattgacatctcctgtgtcaaaattgagcaggtgatcggagcaggggagtttggcgaggtctgcagtggccacctgaagctgccaggcaagagagagatctttgtggccatcaagacgctcaagtcgggctacacggagaagcagcgccgggacttcctgagcgaagcctccatcatgggccagttcgaccatcccaacgtcatccacctggagggtgtcgtgaccaagagcacacctgtgatgatcatcaccgagttcatggagaatggctccctggactcctttctccggcaaaacgatgggcagttcacagtcatccagctggtgggcatgcttcggggcatcgcagctggcatgaagtacctggcagacatgaactatgttcaccgtgacctggctgcccgcaacatcctcgtcaacagcaacctggtctgcaaggtgtcggactttgggctctcacgctttctagaggacgatacctcagaccccacctacaccagtgccctgggcggaaagatccccatccgctggacagccccggaagccatccagtaccggaagttcacctcggccagtgatgtgtggagctacggcattgtcatgtgggaggtgatgtcctatggggagcggccctactgggacatgaccaaccaggatgtaatcaatgccattgagcaggactatcggctgccaccgcccatggactgcccgagcgccctgcaccaactcatgctggactgttggcagaaggaccgcaaccaccggcccaagttcggccaaattgtcaacacgctagacaagatgatccgcaatcccaacagcctcaaagccatggcgcccctctcctctggcatcaacctgccgctgctggaccgcacgatccccgactacaccagctttaacacggtggacgagtggctggaggccatcaagatggggcagtacaaggagagcttcgccaatgccggcttcacctcctttgacgtcgtgtctcagatgatgatggaggacattctccgggttggggtcactttggctggccaccagaaaaaaatcctgaacagtatccaggtgatgcgggcgcagatgaaccagattcagtctgtggaggtttgacattcacctgcctcggctcacctcttcctccaagccccgccccctctgccccacgtgccggccctcctggtgctctatccactgcagggccagccactcgccaggaggccacgggccacgggaagaaccaagcggtgccagccacgagacgtcaccaagaaaacatgcaactc

SEQ ID NO: 130098 - DNA, 3677 bp, Homo sapiens
  Payload ID: 5453
  Gene Symbol: EPHB2
  Gene Name: EPH receptor B2
  Uniprot ID: P29323
  ENST ID: ENST00000374632
  CDS Start-End: 14-2977
gggaagcgcagccatggctctgcggaggctgggggccgcgctgctgctgctgccgctgctcgccgccgtggaagaaacgctaatggactccactacagcgactgctgagctgggctggatggtgcatcctccatcagggtgggaagaggtgagtggctacgatgagaacatgaacacgatccgcacgtaccaggtgtgcaacgtgtttgagtcaagccagaacaactggctacggaccaagtttatccggcgccgtggcgcccaccgcatccacgtggagatgaagttttcggtgcgtgactgcagcagcatccccagcgtgcctggctcctgcaaggagaccttcaacctctattactatgaggctgactttgactcggccaccaagaccttccccaactggatggagaatccatgggtgaaggtggataccattgcagccgacgagagcttctcccaggtggacctgggtggccgcgtcatgaaaatcaacaccgaggtgcggagcttcggacctgtgtcccgcagcggcttctacctggccttccaggactatggcggctgcatgtccctcatcgccgtgcgtgtcttctaccgcaagtgcccccgcatcatccagaatggcgccatcttccaggaaaccctgtcgggggctgagagcacatcgctggtggctgcccggggcagctgcatcgccaatgcggaagaggtggatgtacccatcaagctctactgtaacggggacggcgagtggctggtgcccatcgggcgctgcatgtgcaaagcaggcttcgaggccgttgagaatggcaccgtctgccgaggttgtccatctgggactttcaaggccaaccaaggggatgaggcctgtacccactgtcccatcaacagccggaccacttctgaaggggccaccaactgtgtctgccgcaatggctactacagagcagacctggaccccctggacatgccctgcacaaccatcccctccgcgccccaggctgtgatttccagtgtcaatgagacctccctcatgctggagtggacccctccccgcgactccggaggccgagaggacctcgtctacaacatcatctgcaagagctgtggctcgggccggggtgcctgcacccgctgcggggacaatgtacagtacgcaccacgccagctaggcctgaccgagccacgcatttacatcagtgacctgctggcccacacccagtacaccttcgagatccaggctgtgaacggcgttactgaccagagccccttctcgcctcagttcgcctctgtgaacatcaccaccaaccaggcagctccatcggcagtgtccatcatgcatcaggtgagccgcaccgtggacagcattaccctgtcgtggtcccagccggaccagcccaatggcgtgatcctggactatgagctgcagtactatgagaaggagctcagtgagtacaacgccacagccataaaaagccccaccaacacggtcaccgtgcagggcctcaaagccggcgccatctatgtcttccaggtgcgggcacgcaccgtggcaggttacgggcgctacagcggcaagatgtacttccagaccatgacagaagccgagtaccagacaagcatccaggagaagttgccactcatcatcggctcctcggccgctggcctggtcttcctcattgctgtggttgtcatcgccatcgtgtgtaacagaagacgggggtttgagcgtgctgactcggagtacacggacaagctgcaacactacaccagtggccacatgaccccaggcatgaagatctacatcgatcctttcacctacgaggaccccaacgaggcagtgcgggagtttgccaaggaaattgacatctcctgtgtcaaaattgagcaggtgatcggagcaggggagtttggcgaggtctgcagtggccacctgaagctgccaggcaagagagagatctttgtggccatcaagacgctcaagtcgggctacacggagaagcagcgccgggacttcctgagcgaagcctccatcatgggccagttcgaccatcccaacgtcatccacctggagggtgtcgtgaccaagagcacacctgtgatgatcatcaccgagttcatggagaatggctccctggactcctttctccggcaaaacgatgggcagttcacagtcatccagctggtgggcatgcttcggggcatcgcagctggcatgaagtacctggcagacatgaactatgttcaccgtgacctggctgcccgcaacatcctcgtcaacagcaacctggtctgcaaggtgtcggactttgggctctcacgctttctagaggacgatacctcagaccccacctacaccagtgccctgggcggaaagatccccatccgctggacagccccggaagccatccagtaccggaagttcacctcggccagtgatgtgtggagctacggcattgtcatgtgggaggtgatgtcctatggggagcggccctactgggacatgaccaaccaggatgtaatcaatgccattgagcaggactatcggctgccaccgcccatggactgcccgagcgccctgcaccaactcatgctggactgttggcagaaggaccgcaaccaccggcccaagttcggccaaattgtcaacacgctagacaagatgatccgcaatcccaacagcctcaaagccatggcgcccctctcctctggcatcaacctgccgctgctggaccgcacgatccccgactacaccagctttaacacggtggacgagtggctggaggccatcaagatggggcagtacaaggagagcttcgccaatgccggcttcacctcctttgacgtcgtgtctcagatgatgatggaggacattctccgggttggggtcactttggctggccaccagaaaaaaatcctgaacagtatccaggtgatgcgggcgcagatgaaccagattcagtctgtggaggtttgacattcacctgcctcggctcacctcttcctccaagccccgccccctctgccccacgtgccggccctcctggtgctctatccactgcagggccagccactcgccaggaggccacgggccacgggaagaaccaagcggtgccagccacgagacgtcaccaagaaaacatgcaactcaaacgacggaaaaaaaaagggaatgggaaaaaagaaaacagatcctgggagggggcgggaaatacaaggaatattttttaaagaggattctcataaggaaagcaatgactgttcttgcgggggataaaaaagggcttgggagattcatgcgatgtgtccaatcggagacaaaagcagtttctctccaactccctctgggaaggtgacctggccagagccaagaaacactttcagaaaaacaaatgtgaaggggagagacaggggccgcccttggctcctgtccctgctgctcctctaggcctcactcaacaaccaagcgcctggaggacgggacagatggacagacagccaccctgagaacccctctgggaaaatctattcctgccaccactgggcaaacagaagaatttttctgtctttggagagtattttagaaactccaatgaaagacactgtttctcctgttggctcacagggctgaaaggggcttttgtcctcctgggtcagggagaacgcggggaccccag

SEQ ID NO: 130099 - DNA, 10816 bp, Homo sapiens
  Payload ID: 5453
  Gene Symbol: EPHB2
  Gene Name: EPH receptor B2
  Uniprot ID: P29323
  ENST ID: ENST00000400191
  CDS Start-End: 19-3186
gccccgggaagcgcagccatggctctgcggaggctgggggccgcgctgctgctgctgccgctgctcgccgccgtggaagaaacgctaatggactccactacagcgactgctgagctgggctggatggtgcatcctccatcagggtgggaagaggtgagtggctacgatgagaacatgaacacgatccgcacgtaccaggtgtgcaacgtgtttgagtcaagccagaacaactggctacggaccaagtttatccggcgccgtggcgcccaccgcatccacgtggagatgaagttttcggtgcgtgactgcagcagcatccccagcgtgcctggctcctgcaaggagaccttcaacctctattactatgaggctgactttgactcggccaccaagaccttccccaactggatggagaatccatgggtgaaggtggataccattgcagccgacgagagcttctcccaggtggacctgggtggccgcgtcatgaaaatcaacaccgaggtgcggagcttcggacctgtgtcccgcagcggcttctacctggccttccaggactatggcggctgcatgtccctcatcgccgtgcgtgtcttctaccgcaagtgcccccgcatcatccagaatggcgccatcttccaggaaaccctgtcgggggctgagagcacatcgctggtggctgcccggggcagctgcatcgccaatgcggaagaggtggatgtacccatcaagctctactgtaacggggacggcgagtggctggtgcccatcgggcgctgcatgtgcaaagcaggcttcgaggccgttgagaatggcaccgtctgccgaggttgtccatctgggactttcaaggccaaccaaggggatgaggcctgtacccactgtcccatcaacagccggaccacttctgaaggggccaccaactgtgtctgccgcaatggctactacagagcagacctggaccccctggacatgccctgcacaaccatcccctccgcgccccaggctgtgatttccagtgtcaatgagacctccctcatgctggagtggacccctccccgcgactccggaggccgagaggacctcgtctacaacatcatctgcaagagctgtggctcgggccggggtgcctgcacccgctgcggggacaatgtacagtacgcaccacgccagctaggcctgaccgagccacgcatttacatcagtgacctgctggcccacacccagtacaccttcgagatccaggctgtgaacggcgttactgaccagagccccttctcgcctcagttcgcctctgtgaacatcaccaccaaccaggcagctccatcggcagtgtccatcatgcatcaggtgagccgcaccgtggacagcattaccctgtcgtggtcccagccggaccagcccaatggcgtgatcctggactatgagctgcagtactatgagaaggagctcagtgagtacaacgccacagccataaaaagccccaccaacacggtcaccgtgcagggcctcaaagccggcgccatctatgtcttccaggtgcgggcacgcaccgtggcaggttacgggcgctacagcggcaagatgtacttccagaccatgacagaagccgagtaccagacaagcatccaggagaagttgccactcatcatcggctcctcggccgctggcctggtcttcctcattgctgtggttgtcatcgccatcgtgtgtaacagacgggggtttgagcgtgctgactcggagtacacggacaagctgcaacactacaccagtggccacatgaccccaggcatgaagatctacatcgatcctttcacctacgaggaccccaacgaggcagtgcgggagtttgccaaggaaattgacatctcctgtgtcaaaattgagcaggtgatcggagcaggggagtttggcgaggtctgcagtggccacctgaagctgccaggcaagagagagatctttgtggccatcaagacgctcaagtcgggctacacggagaagcagcgccgggacttcctgagcgaagcctccatcatgggccagttcgaccatcccaacgtcatccacctggagggtgtcgtgaccaagagcacacctgtgatgatcatcaccgagttcatggagaatggctccctggactcctttctccggcaaaacgatgggcagttcacagtcatccagctggtgggcatgcttcggggcatcgcagctggcatgaagtacctggcagacatgaactatgttcaccgtgacctggctgcccgcaacatcctcgtcaacagcaacctggtctgcaaggtgtcggactttgggctctcacgctttctagaggacgatacctcagaccccacctacaccagtgccctgggcggaaagatccccatccgctggacagccccggaagccatccagtaccggaagttcacctcggccagtgatgtgtggagctacggcattgtcatgtgggaggtgatgtcctatggggagcggccctactgggacatgaccaaccaggatgtaatcaatgccattgagcaggactatcggctgccaccgcccatggactgcccgagcgccctgcaccaactcatgctggactgttggcagaaggaccgcaaccaccggcccaagttcggccaaattgtcaacacgctagacaagatgatccgcaatcccaacagcctcaaagccatggcgcccctctcctctggcatcaacctgccgctgctggaccgcacgatccccgactacaccagctttaacacggtggacgagtggctggaggccatcaagatggggcagtacaaggagagcttcgccaatgccggcttcacctcctttgacgtcgtgtctcagatgatgatggaggacattctccgggttggggtcactttggctggccaccagaaaaaaatcctgaacagtatccaggtgatgcgggcgcagatgaaccagattcagtctgtggagggccagccactcgccaggaggccacgggccacgggaagaaccaagcggtgccagccacgagacgtcaccaagaaaacatgcaactcaaacgacggaaaaaaaaagggaatgggaaaaaagaaaacagatcctgggagggggcgggaaatacaaggaatattttttaaagaggattctcataaggaaagcaatgactgttcttgcgggggataaaaaagggcttgggagattcatgcgatgtgtccaatcggagacaaaagcagtttctctccaactccctctgggaaggtgacctggccagagccaagaaacactttcagaaaaacaaatgtgaaggggagagacaggggccgcccttggctcctgtccctgctgctcctctaggcctcactcaacaaccaagcgcctggaggacgggacagatggacagacagccaccctgagaacccctctgggaaaatctattcctgccaccactgggcaaacagaagaatttttctgtctttggagagtattttagaaactccaatgaaagacactgtttctcctgttggctcacagggctgaaaggggcttttgtcctcctgggtcagggagaacgcggggaccccagaaaggtcagccttcctgaggatgggcaacccccaggtctgcagctccaggtacatatcacgcgcacagcctggcagcctggccctcctggtgcccactcccgccagcccctgcctcgaggactgatactgcagtgactgccgtcagctccgactgccgctgagaagggttgatcctgcatctgggtttgtttacagcaattcctggactcgggggtattttggtcacagggtggttttggtttagggggtttgtttgttgggttgttttttgttttttggttttttttaatgacaatgaagtgacactttgacatttcctaccttttgaggacttgatccttctccaggaagaaggtgctttctgcttactgacttaggcaatacaccaagggcgagattttatatgcacatttctggatttttttatacggttttcattgacactcttccctcctcccacctgccaccaggcctcaccaaagcccactgccatggggccatctgggccattcagagactggagtgagatttgggtgtggagggggaggcgccaaggtggaggagcttcccactccaggactgttgatgaaagggacagattgaggaggaagtgggctctgaggctgcagggctggaagtccttgcccacttcccactctcctgccccaatctatctagtacttcccaggcaaataggcccctttgaggctcctgagtgccctcagatggtcaaaacccagttttccctctgggagcctaaaccaggctgcatcggaggccaggacccggatcattcactgtgataccctgccctccagagggtgcgctcagagacacgggcaagcatgcctcttcccttccctggagagaaagtgtgtgatttctctcccacctccttccccccaccagacctttgctgggcctaaaggtcttggccatggggacgccctcagtctagggatctggccacagactccctcctgtgaaccaacacagacacccaagcagagcaatcagttagtgaattgaatggaaataaacgctttagttataatatgacccctgttctctgtaagttccaagggagaccttggtacccttgggatgcacgtgacccaggtgctaagggttgctcttctaagcagcccttcctccctcaggcttccagaaagcccagggcagagaaaacacatggagaacgacagctccacgtggcctttctggccctggcttgtcaaaagcacaggcaacaaaggaagtgagttggaagtggctcagaactcagccttcgatgccctgggaatcagggtgagcccctgcaggtacataagtagcagagaattgacgagagtgcactcggaagagggtctgagtgtcaggtgagctgtcatagtgggaacgtgagggtcttagagtgctcatgtacccccaggcacagccaactctggttttctctgtgcaaatgagctcttgctcacattaaaatcagaattgtccacgtggcaggaggaggcagggagatggatgtgccatggatatcgggtctggctgaggaaggggagccaaggagactacctctcgggacctttcccagatccgaggagatggccagtgagaaagattcgggccacaggcagccagctagaagcgccacggtcagagtgaacatccagcacagcacagcccatcgtctgtcactcacctgttccgggagcctgagctgcaaagggaaggaagggattagagagaagtgtgggccccccatggggacagcagggcaagccacagggaaagcattggcaggtttcccacaaactggccggcagtggcccactggccttcactttgtgccccaaaggtgccctgcgcgggtggcagctgtctcggcacacaaggtcaccttctggtgggagctgccctgatgctctttagattagttctgtctccccagcccaccccccaactgttctggggccccacatggggctggcagtcggtgcttcccgtcagatggcttcctgtcctaagccgctgagctggtgaccactagccagcatgtctgcccctccaccctccagggccgaggtcctcagtggccatggccccctgcaaacctgcttcccagagcacaggtgctaccagacctctgtgtctccacttcagggtaacaaacagatgtcactgtgactgtcccaggggtacaggcgctgctcacatctcttccacccccacccacccaccccacccgctaccggggcagtcgccccgccccaacctcttgcttgctgctcagcggggagtggcaggccatgttgccaagcgccttccacttacaccacccgctcacccaggcacacagctctgagccacccgctgcctggttactaatcctttcctggctcaacctccccaagtgccagcccccgcctgcccagcagtgttaggggagtttccggctgctctgcacacagttggtactgcaggaaagaaagctgccttgtaaacacaggccagggcaccgtggaaatggggaccagctgctctgggagggtgcagctagcagagctgtgcagcgccaggctgggtaggagagagccatgctacccacccgcacccctactgctacgaagcccccagaatgggtcattgttggtgctcagcagtcctctccctcggggatgatatccaaaatatcaactgcgaagactcgggcagaccaatcagaatagatgatggcctgagtgctggaccagaggcctcagagcagggacccgggtggcggggcagtaggagacacttaagggactcagggctatggctgtttactaaccagcagtgcctcttactcagatggcatcagctgaactttccccatcatttctagttggtccccaccctgccaccatctaggggcttctctgccaccaccttgtgagcagttgctagcctcacactcctctcccatcaggggctcatctccaaaaggctgggagctcccgccctgcccagttaatcctcctgcctcactgaagcacaggaaggacccaggccccagaccatcacccaccccagggctgggccctgggccactcctggctcactccagggcccctgttgtttgaagatggtaccaaaggctggaagactcttgctagggaagataacgtaaatgcattcaaaagacagggtaccacatgatgctagggaaagtgcgtcatgaccgcagggtagcagcctgctcctgtcactagggatgtgaatctggggagacacttcccctcactgagccatctgtaaaatgagagcattggactgggtgaggcaggctgtgcaaaacacttatacaccttagtcccatgaggaaggagtattccccctgcatattttggggggaaactgaggctcagggggatgaagtactttgctcagggtaacacagccaggaaggagcagagcaaggccatgagctttggatttttctgtttccaatgtctcctctaccgtgctcaattagatgatgagaaacagttggtgtctgatgctggccaataagagaaaagaaagctcaagtgggctggggctgtcagggagggcttcatggagaggctgtcttgaaaatgacagaggtcaaaagaaaggtcactccaagacgcagctgccagaatggtccaacacagtgaggagttgtgtctggatgggccagtggaacgggggaagtgaaggttgatataagtggaggttgaggcagtttaggcgtgatgtacagtccagccacagcaggttcttgagcaggagggtagcatagtgagcatcaggttctaggaagaagcaccagttcagccatcagatggggcaggatgcctcccagctactcctctccccgagaaggaattgcccccggagcggccctcatttattccaggagaagccaggccctgctgcttcagtttccatcctcactgacgcagataatccaaagagtcacttcagctgcttggaacagcagggttgggtcttgtgctacctgattcttaatttggctgatgtctaccccatttcctccaggcttctctagaggtggcaggggtggggtggggagaaagctgccagacaccaaaggagctgagcctggcgggggcgggcgtgcgggtgggcatgagaaattgctcaggaaacccatccctgccctggtcaccctagtcctggagagatcacccagacatgttggaatgagtctggggtcctgtcttttccaataatgtgttatcctggggaaacccagagggaagttgagggagccccactgtgctgtgtgatgctacatacgcatgcgaatacaccaccgggtggccttgacccagccttctgcaaaatggcttctgccatcaaacttaaggtggagaatggtcttgcagctgccagtttttccttcagagaaactaaggtcagagtgttggctgcagaaaaggacttggcctttgtcacataacaggaaagagagtcaactccgggcacaccccctcggaggctaatctcaggaggttggaaccacagggattgcaataatcgctgaatacttaccatatgccaggtgccaaagcattatcctctccactttatgagtgaggaaactgattcccagaggtgattcccagaagattccaaccaggccatctgtctgtagtccttccttcccacctcctgggatttctcaaaatgtttgccatcgcccacctgtatcagaatctcctgggctatttattgtttaacttgcagactcctgggcgccaccccaaccccctaaatcagaatccctggggttgggcccaagagtctccattttttgacaagctcctccaggagattcctccagacatggaaatcctcacttgactcttcccccataacaaactgccctgatgtctgcagagagagggtctgctgtagacagggattaagaaaaagcaggacattttcagataggatgcccaaacccagacgcagattaggacccatgaagtagggggtagagctgaccctcaggaatgtgcccagacagagctaagctttcaggaaaattagaaagaccctcagacccagagtctgtctgagtttagcttcgcagcatgaaggctgccttgagaaagctgatataacaagaagcagcagaaatttaatactttggaggggcccagcaacccactcagggccaccctgggagaccccacagaccccaaggctatggtccagacctgttcactcaacacctggccaggcggggcctccagctggacctagagctacagatgccccaccaccactaccaagcccggctacccagaccaagacacggcttttcctggaggagagagagagcaaaggccctgtctctacccaagacctaacggcccctgttgaaggagagggagcaggagagggaggagggaggaggtcacagccaggaccacatacactcttgggggccctgctgagactgcaagagtcatgaattctaacgttccacaggtgaaagattccaagattctaggattgcaaaaccccatcattctaagattccaatggaatgattccatgtttctaagattccatcacactatgattctatgctgctaattcttgaaatttcgagtctcattgttcgttgctgttccccagacctgtgggccctagcatttttttaaaagcacaaaaaaaaaagagcaagaaagagagaaagagatggggagggagacagctgaaaacagatactaagaaaagctccatcccttggatctgagttacagatgcaccttggcaagggccaaagaccctccttttgagtggggtgcagaacgtctttccctggtagagtggcagaattgcatgcatcaggccttcctgggggtaaaaggggctggctgttccaggctacagctgagtaaagccccacacaggccacagtgcccactggctggtggacctaggaaccaagcagggccccactggctcagtctggggagggactcatctggggtggaatttccctccctgcagcaaggaagctgcagggccaggaatttgccttgggagacccccactgaggaatatttccgaagcagaaccccttcctattcagagccagagtcttaacactggacaaccacagggtgttgctgcaaactccagagccaggtgccttccctctgacatttgggacatagcttccatggccacacagccttcgcccccttccaagaccccccttgacctttctaatcttagtcactgccttccagagctgggaggccacacggcagaggtgcctgtgaatcactccgtcatcagcctggccgctttcccctctgtggagagggactctgatgggcagggggcaccaagttgagcctctgaggctggcccagcataggccaggcagggacattcactcacaaccagcctttttggactctagagaagagtaattaccacttggtcatgcccagcccccaaatcataatcatagctgctatttcttgagtgccagcaatgtgccaggcaccgtgcccaactttttatacacaatgtcttgcctaatcctcacacctctgtgagacaggtacaattattactcccattccacagactagcaaactcagagacgtgacatggtggctctcccaggtcacacagccagtaagtggcctctgaccccagtaccccccacttaatcaccatgctatgctgctaccagtggtacacactcagcccctctccactgtcagatcctttgccagtcaaatcccagatccccgggggggcactgtggcaccctctttgagcgtggcctccctggagctgctgtcagagccatgggctgtgggagtgagtgtgcacactccttctcctgaagtgtctgccccagcctgagctatgcagaccggagctctcaaccagggtatggggctgtctggcagggtttcccagaaccctgtttcctgtggtcataaatatgggttttcctgacaatgttgggaggtcagggactgatacagctggggttccaaccgccgtgggtcagacctggctcctccggaccccactgctgtgaccaaggaaatctcaccagctgtgtccaagatcaaccctgaccctgttactccaatgcctttgtaggagtatttttagcagaaccgtttttttcccaaaataaatgtgaattgtaaaaatta

SEQ ID NO: 130100 - DNA, 1709 bp, Homo sapiens
  Payload ID: 5453
  Gene Symbol: EPHB2
  Gene Name: EPH receptor B2
  ENST ID: ENST00000544305
  CDS Start-End: 145-1593
attctgctggctgcgcggtggcggcggctgtgtgtgcgccgcgccttgccgccccccctggccccccgagcccggggcgcgcgctcccgcccgggccgtccgggccccgcggcgccgcggcccgaggccccgggaagcgcagccatggctctgcggaggctgggggccgcgctgctgctgctgccgctgctcgccgccgtggaagaaacgctaatggactccactacagcgactgctgagctgggctggatggtgcatcctccatcagggtgggaagaggtgagtggctacgatgagaacatgaacacgatccgcacgtaccaggtgtgcaacgtgtttgagtcaagccagaacaactggctacggaccaagtttatccggcgccgtggcgcccaccgcatccacgtggagatgaagttttcggtgcgtgactgcagcagcatccccagcgtgcctggctcctgcaaggagaccttcaacctctattactatgaggctgactttgactcggccaccaagaccttccccaactggatggagaatccatgggtgaaggtggataccattgcagccgacgagagcttctcccaggtggacctgggtggccgcgtcatgaaaatcaacaccgaggtgcggagcttcggacctgtgtcccgcagcggcttctacctggccttccaggactatggcggctgcatgtccctcatcgccgtgcgtgtcttctaccgcaagtgcccccgcatcatccagaatggcgccatcttccaggaaaccctgtcgggggctgagagcacatcgctggtggctgcccggggcagctgcatcgccaatgcggaagaggtggatgtacccatcaagctctactgtaacggggacggcgagtggctggtgcccatcgggcgctgcatgtgcaaagcaggcttcgaggccgttgagaatggcaccgtctgccgaggttgtccatctgggactttcaaggccaaccaaggggatgaggcctgtacccactgtcccatcaacagccggaccacttctgaaggggccaccaactgtgtctgccgcaatggctactacagagcagacctggaccccctggacatgccctgcacaaccatcccctccgcgccccaggctgtgatttccagtgtcaatgagacctccctcatgctggagtggacccctccccgcgactccggaggccgagaggacctcgtctacaacatcatctgcaagagctgtggctcgggccggggtgcctgcacccgctgcggggacaatgtacagtacgcaccacgccagctaggcctgaccgagccacgcatttacatcagtgacctgctggcccacacccagtacaccttcgagatccaggctgtgaacggcgttactgaccagagccccttctcgcctcagttcgcctctgtgaacatcaccaccaaccaggcagctccatcggcagtgtccatcatgcatcaggtgagccgcaccgtggacagcattaccctgtcgtggtcccagccggaccagcccaatggcgtgatcctggactatgagctgcagtactatgagaagatgaagacacagagaagttaaggaacttgcccaaggtcacagaggtcatatatactagagccaggatttgaacccaagaagtctggctccagcttgtgatcttaacctccatgctataaagcctgtaataacattgc

SEQ ID NO: 130101 - DNA, 4236 bp, Homo sapiens
  Payload ID: 5454
  Gene Symbol: EPHB3
  Gene Name: EPH receptor B3
  Uniprot ID: P54753
  ENST ID: ENST00000330394
  CDS Start-End: 453-3449
cagcagaagtgagtacgtgagcggcgcagcaagatcccagctcggaccccggacggcgcgcgcccccgaagccccggatcccagtcgggcccgcagctgaccgccagattactgtgcatcccgaatcacgaccacctgcaccctcctgccccggcccgccccccaagtcctcaggcacccagctccccggcgccccggatcctcctggaccggtccgtccagattcccgcgggaccgacctgtccgcatccccaggaccgccgggctcggtgcaccgcctcggtcccggagccgcccgcctggattgcattccctcctctcctggatctcctgggacccgacgcgagcctgccccggagcccgccgagcgcaccctctctcgggtgcctgcagccccgccggcgcggcccggcccggcgcggcccggctcggctcctagagctgccacggccatggccagagcccgcccgccgccgccgccgtcgccgccgccggggcttctgccgctgctccctccgctgctgctgctgccgctgctgctgctgcccgccggctgccgggcgctggaagagaccctcatggacacaaaatgggtaacatctgagttggcgtggacatctcatccagaaagtgggtgggaagaggtgagtggctacgatgaggccatgaatcccatccgcacataccaggtgtgtaatgtgcgcgagtcaagccagaacaactggcttcgcacggggttcatctggcggcgggatgtgcagcgggtctacgtggagctcaagttcactgtgcgtgactgcaacagcatccccaacatccccggctcctgcaaggagaccttcaacctcttctactacgaggctgacagcgatgtggcctcagcctcctcccccttctggatggagaacccctacgtgaaagtggacaccattgcacccgatgagagcttctcgcggctggatgccggccgtgtcaacaccaaggtgcgcagctttgggccactttccaaggctggcttctacctggccttccaggaccagggcgcctgcatgtcgctcatctccgtgcgcgccttctacaagaagtgtgcatccaccaccgcaggcttcgcactcttccccgagaccctcactggggcggagcccacctcgctggtcattgctcctggcacctgcatccctaacgccgtggaggtgtcggtgccactcaagctctactgcaacggcgatggggagtggatggtgcctgtgggtgcctgcacctgtgccaccggccatgagccagctgccaaggagtcccagtgccgcccctgtccccctgggagctacaaggcgaagcagggagaggggccctgcctcccatgtccccccaacagccgtaccacctccccagccgccagcatctgcacctgccacaataacttctaccgtgcagactcggactctgcggacagtgcctgtaccaccgtgccatctccaccccgaggtgtgatctccaatgtgaatgaaacctcactgatcctcgagtggagtgagccccgggacctgggtggccgggatgacctcctgtacaatgtcatctgcaagaagtgccatggggctggaggggcctcagcctgctcacgctgtgatgacaacgtggagtttgtgcctcggcagctgggcctgacggagcgccgggtccacatcagccatctgctggcccacacgcgctacacctttgaggtgcaggcggtcaacggtgtctcgggcaagagccctctgccgcctcgttatgcggccgtgaatatcaccacaaaccaggctgccccgtctgaagtgcccacactacgcctgcacagcagctcaggcagcagcctcaccctatcctgggcacccccagagcggcccaacggagtcatcctggactacgagatgaagtactttgagaagagcgagggcatcgcctccacagtgaccagccagatgaactccgtgcagctggacgggcttcggcctgacgcccgctatgtggtccaggtccgtgcccgcacagtagctggctatgggcagtacagccgccctgccgagtttgagaccacaagtgagagaggctctggggcccagcagctccaggagcagcttcccctcatcgtgggctccgctacagctgggcttgtcttcgtggtggctgtcgtggtcatcgctatcgtctgcctcaggaagcagcgacacggctctgattcggagtacacggagaagctgcagcagtacattgctcctggaatgaaggtttatattgacccttttacctacgaggaccctaatgaggctgttcgggagtttgccaaggagatcgacgtgtcctgcgtcaagatcgaggaggtgatcggagctggggaatttggggaagtgtgccgtggtcgactgaaacagcctggccgccgagaggtgtttgtggccatcaagacgctgaaggtgggctacaccgagaggcagcggcgggacttcctaagcgaggcctccatcatgggtcagtttgatcaccccaatataatccggctcgagggcgtggtcaccaaaagtcggccagttatgatcctcactgagttcatggaaaactgcgccctggactccttcctccggctcaacgatgggcagttcacggtcatccagctggtgggcatgttgcggggcattgctgccggcatgaagtacctgtccgagatgaactatgtgcaccgcgacctggctgctcgcaacatccttgtcaacagcaacctggtctgcaaagtctcagactttggcctctcccgcttcctggaggatgacccctccgatcctacctacaccagttccctgggcgggaagatccccatccgctggactgccccagaggccatagcctatcggaagttcacttctgctagtgatgtctggagctacggaattgtcatgtgggaggtcatgagctatggagagcgaccctactgggacatgagcaaccaggatgtcatcaatgccgtggagcaggattaccggctgccaccacccatggactgtcccacagcactgcaccagctcatgctggactgctgggtgcgggaccggaacctcaggcccaaattctcccagattgtcaataccctggacaagctcatccgcaatgctgccagcctcaaggtcattgccagcgctcagtctggcatgtcacagcccctcctggaccgcacggtcccagattacacaaccttcacgacagttggtgattggctggatgccatcaagatggggcggtacaaggagagcttcgtcagtgcggggtttgcatcttttgacctggtggcccagatgacggcagaagacctgctccgtattggggtcaccctggccggccaccagaagaagatcctgagcagtatccaggacatgcggctgcagatgaaccagacgctgcctgtgcaggtctgacaccggctcccacggggaccctgaggaccgtgcagggatgccaagcagccggctggactttcggactcttggacttttggatgcctggccttaggctgtggcccagaagctggaagtttgggaaaggcccaagctgggacttctccaggcctgtgttccctccccaggaagtgcgccccaaacctcttcatattgaagatggattaggagagggggtgatgacccctccccaagcccctcagggcccagaccttcctgctctccagcaggggatccccacaacctcacacttgtctgttcttcagtgctggaggtcctggcagggtcaggctggggtaagccggggttccacagggcccagccctggcaggggtctggccccccaggtaggcggagagcagtccctccctcaggaactggaggaggggactccaggaatggggaaatgtgacaccaccatcctgaagccagcttgcacctccagtttgcacagggatttgttctgggggctgagggccctgtccccacccccgcccttggtgctgtcataaaagggcaggcaggggcaggctgaggagttgccctttgccccccagagactgactctcagagccagagatgggatgtgtgagtgtgtgtgtgtgtgtgtgtgtgtgcgcgcgcgcgcgcgtgtgtgtgtgcacgcactggcctgcacagagagcatgggtgagcgtgtaaaagcttggccctgtgccctacaatggggccagctgggccgacagcagaataaaggcaataagatgat

SEQ ID NO: 130102 - DNA, 4329 bp, Homo sapiens
  Payload ID: 5455
  Gene Symbol: EPHB4
  Gene Name: EPH receptor B4
  Uniprot ID: P54760
  ENST ID: ENST00000358173
  CDS Start-End: 470-3433
cccggcccggcccgcccggctccgcgccgcagtctccctccctcccgctccgtccccgctcgggctcccaccatccccgcccgcgaggagagcactcggcccggcggcgcgagcagagccactccagggagggggggagaccgcgagcggccggctcagcccccgccacccggggcgggaccccgaggccccggagggaccccaactccagccacgtcttgctgcgcgcccgcccggcgcggccactgccagcacgctccgggcccgccgcccgcgcgcgcggcacagacgcggggccacacttggcgccgccgcccggtgccccgcacgctcgcatgggcccgcgctgagggccccgacgaggagtcccgcgcggagtatcggcgtccacccgcccagggagagtcagacctgggggggcgagggccccccaaactcagttcggatcctacccgagtgaggcggcgccatggagctccgggtgctgctctgctgggcttcgttggccgcagctttggaagagaccctgctgaacacaaaattggaaactgctgatctgaagtgggtgacattccctcaggtggacgggcagtgggaggaactgagcggcctggatgaggaacagcacagcgtgcgcacctacgaagtgtgtgacgtgcagcgtgccccgggccaggcccactggcttcgcacaggttgggtcccacggcggggcgccgtccacgtgtacgccacgctgcgcttcaccatgctcgagtgcctgtccctgcctcgggctgggcgctcctgcaaggagaccttcaccgtcttctactatgagagcgatgcggacacggccacggccctcacgccagcctggatggagaacccctacatcaaggtggacacggtggccgcggagcatctcacccggaagcgccctggggccgaggccaccgggaaggtgaatgtcaagacgctgcgtctgggaccgctcagcaaggctggcttctacctggccttccaggaccagggtgcctgcatggccctgctatccctgcacctcttctacaaaaagtgcgcccagctgactgtgaacctgactcgattcccggagactgtgcctcgggagctggttgtgcccgtggccggtagctgcgtggtggatgccgtccccgcccctggccccagccccagcctctactgccgtgaggatggccagtgggccgaacagccggtcacgggctgcagctgtgctccggggttcgaggcagctgaggggaacaccaagtgccgagcctgtgcccagggcaccttcaagcccctgtcaggagaagggtcctgccagccatgcccagccaatagccactctaacaccattggatcagccgtctgccagtgccgcgtcgggtacttccgggcacgcacagacccccggggtgcaccctgcaccacccctccttcggctccgcggagcgtggtttcccgcctgaacggctcctccctgcacctggaatggagtgcccccctggagtctggtggccgagaggacctcacctacgccctccgctgccgggagtgccgacccggaggctcctgtgcgccctgcgggggagacctgacttttgaccccggcccccgggacctggtggagccctgggtggtggttcgagggctacgtcctgacttcacctatacctttgaggtcactgcattgaacggggtatcctccttagccacggggcccgtcccatttgagcctgtcaatgtcaccactgaccgagaggtacctcctgcagtgtctgacatccgggtgacgcggtcctcacccagcagcttgagcctggcctgggctgttccccgggcacccagtggggctgtgctggactacgaggtcaaataccatgagaagggcgccgagggtcccagcagcgtgcggttcctgaagacgtcagaaaaccgggcagagctgcgggggctgaagcggggagccagctacctggtgcaggtacgggcgcgctctgaggccggctacgggcccttcggccaggaacatcacagccagacccaactggatgagagcgagggctggcgggagcagctggccctgattgcgggcacggcagtcgtgggtgtggtcctggtcctggtggtcattgtggtcgcagttctctgcctcaggaagcagagcaatgggagagaagcagaatattcggacaaacacggacagtatctcatcggacatggtactaaggtctacatcgaccccttcacttatgaagaccctaatgaggctgtgagggaatttgcaaaagagatcgatgtctcctacgtcaagattgaagaggtgattggtgcaggtgagtttggcgaggtgtgccgggggcggctcaaggccccagggaagaaggagagctgtgtggcaatcaagaccctgaagggtggctacacggagcggcagcggcgtgagtttctgagcgaggcctccatcatgggccagttcgagcaccccaatatcatccgcctggagggcgtggtcaccaacagcatgcccgtcatgattctcacagagttcatggagaacggcgccctggactccttcctgcggctaaacgacggacagttcacagtcatccagctcgtgggcatgctgcggggcatcgcctcgggcatgcggtaccttgccgagatgagctacgtccaccgagacctggctgctcgcaacatcctagtcaacagcaacctcgtctgcaaagtgtctgactttggcctttcccgattcctggaggagaactcttccgatcccacctacacgagctccctgggaggaaagattcccatccgatggactgccccggaggccattgccttccggaagttcacttccgccagtgatgcctggagttacgggattgtgatgtgggaggtgatgtcatttggggagaggccgtactgggacatgagcaatcaggacgtgatcaatgccattgaacaggactaccggctgcccccgcccccagactgtcccacctccctccaccagctcatgctggactgttggcagaaagaccggaatgcccggccccgcttcccccaggtggtcagcgccctggacaagatgatccggaaccccgccagcctcaaaatcgtggcccgggagaatggcggggcctcacaccctctcctggaccagcggcagcctcactactcagcttttggctctgtgggcgagtggcttcgggccatcaaaatgggaagatacgaagaaagtttcgcagccgctggctttggctccttcgagctggtcagccagatctctgctgaggacctgctccgaatcggagtcactctggcgggacaccagaagaaaatcttggccagtgtccagcacatgaagtcccaggccaagccgggaaccccgggtgggacaggaggaccggccccgcagtactgacctgcaggaactccccaccccagggacaccgcctccccattttccggggcagagtggggactcacagaggcccccagccctgtgccccgctggattgcactttgagcccgtggggtgaggagttggcaatttggagagacaggatttgggggttctgccataataggaggggaaaatcaccccccagccacctcggggaactccagaccaagggtgagggcgcctttccctcaggactgggtgtgaccagaggaaaaggaagtgcccaacatctcccagcctccccaggtgcccccctcaccttgatgggtgcgttcccgcagaccaaagagagtgtgactcccttgccagctccagagtgggggggctgtcccagggggcaagaaggggtgtcagggcccagtgacaaaatcattggggtttgtagtcccaacttgctgctgtcaccaccaaactcaatcatttttttcccttgtaaatgcccctcccccagctgctgccttcatattgaaggtttttgagttttgtttttggtcttaatttttctccccgttccctttttgtttcttcgttttgtttttctaccgtccttgtcataactttgtgttggagggaacctgtttcactatggcctcctttgcccaagttgaaacaggggcccatcatcatgtctgtttccagaacagtgccttggtcatcccacatccccggaccccgcctgggacccccaagctgtgtcctatgaaggggtgtggggtgaggtagtgaaaagggcggtagttggtggtggaacccagaaacggacgccggtgcttggaggggttcttaaattatatttaaaaaagtaactttttgtataaataaaagaaaatgggacgtgtcccagctccaggggt

SEQ ID NO: 130103 - DNA, 3789 bp, Homo sapiens
  Payload ID: 5455
  Gene Symbol: EPHB4
  Gene Name: EPH receptor B4
  ENST ID: ENST00000360620
  CDS Start-End: 86-2893
cgtccacccgcccagggagagtcagacctgggggggcgagggccccccaaactcagttcggatcctacccgagtgaggcggcgccatggagctccgggtgctgctctgctgggcttcgttggccgcagctttggaagagaccctgctgaacacaaaattggaaactgctgatctgaagtgggtgacattccctcaggtggacgggcagtgggaggaactgagcggcctggatgaggaacagcacagcgtgcgcacctacgaagtgtgtgacgtgcagcgtgccccgggccaggcccactggcttcgcacaggttgggtcccacggcggggcgccgtccacgtgtacgccacgctgcgcttcaccatgctcgagtgcctgtccctgcctcgggctgggcgctcctgcaaggagaccttcaccgtcttctactatgagagcgatgcggacacggccacggccctcacgccagcctggatggagaacccctacatcaaggtggacacggtggccgcggagcatctcacccggaagcgccctggggccgaggccaccgggaaggtgaatgtcaagacgctgcgtctgggaccgctcagcaaggctggcttctacctggccttccaggaccagggtgcctgcatggccctgctatccctgcacctcttctacaaaaagtgcgcccagctgactgtgaacctgactcgattcccggagactgtgcctcgggagctggttgtgcccgtggccggtagctgcgtggtggatgccgtccccgcccctggccccagccccagcctctactgccgtgaggatggccagtgggccgaacagccggtcacgggctgcagctgtgctccggggttcgaggcagctgaggggaacaccaagtgccgagcctgtgcccagggcaccttcaagcccctgtcaggagaagggtcctgccagccatgcccagccaatagccactctaacaccattggatcagccgtctgccagtgccgcgtcgggtacttccgggcacgcacagacccccggggtgcaccctgcaccacccctccttcggctccgcggagcgtggtttcccgcctgaacggctcctccctgcacctggaatggagtgcccccctggagtctggtggccgagaggacctcacctacgccctccgctgccgggagtgccgacccggaggctcctgtgcgccctgcgggggagacctgacttttgaccccggcccccgggacctggtggagccctgggtggtggttcgagggctacgtcctgacttcacctatacctttgaggtcactgcattgaacggggtatcctccttagccacggggcccgtcccatttgagcctgtcaatgtcaccactgaccgagaggtacctcctgcagtgtctgacatccgggtgacgcggtcctcacccagcagcttgagcctggcctgggctgttccccgggcacccagtggggctgtgctggactacgaggtcaaataccatgagaagggcgccgagggtcccagcagcgtgcggttcctgaagacgtcagaaaaccgggcagagctgcgggggctgaagcggggagccagctacctggtgcaggtacgggcgcgctctgaggccggctacgggcccttcggccaggaacatcacagccagacccaactggatgagagcgagggctggcgggagcagctggccctgattgcgggcacggcagtcgtgggtgtggtcctggtcctggtggtcattgtggtcgcagttctctgcctcaggaagcagagcaatgggagagaagcagaatattcggacaaacacggacagtatctcatcggacatggtactaaggtctacatcgaccccttcacttatgaagaccctaatgaggctgtgagggaatttgcaaaagagatcgatgtctcctacgtcaagattgaagaggtgattggtgcaggtgagtttggcgaggtgtgccgggggcggctcaaggccccagggaagaaggagagctgtgtggcaatcaagaccctgaagggtggctacacggagcggcagcggcgtgagtttctgagcgaggcctccatcatgggccagttcgagcaccccaatatcatccgcctggagggcgtggtcaccaacagcatgcccgtcatgattctcacagagttcatggagaacggcgccctggactccttcctgcggctaaacgacggacagttcacagtcatccagctcgtgggcatgctgcggggcatcgcctcgggcatgcggtaccttgccgagatgagctacgtccaccgagacctggctgctcgcaacatcctagtcaacagcaacctcgtctgcaaagtgtctgactttggcctttcccgattcctggaggagaactcttccgatcccacctacacgagctccctgggaggaaagattcccatccgatggactgccccggaggccattgccttccggaagttcacttccgccagtgatgcctggagttacgggattgtgatgtgggaggtgatgtcatttggggagaggccgtactgggacatgagcaatcaggacgtgatcaatgccattgaacaggactaccggctgcccccgcccccagactgtcccacctccctccaccagctcatgctggactgttggcagaaagaccggaatgcccggccccgcttcccccaggtggtcagcgccctggacaagatgatccggaaccccgccagcctcaaaatcgtggcccgggagaatggcggggacctgctccgaatcggagtcactctggcgggacaccagaagaaaatcttggccagtgtccagcacatgaagtcccaggccaagccgggaaccccgggtgggacaggaggaccggccccgcagtactgacctgcaggaactccccaccccagggacaccgcctccccattttccggggcagagtggggactcacagaggcccccagccctgtgccccgctggattgcactttgagcccgtggggtgaggagttggcaatttggagagacaggatttgggggttctgccataataggaggggaaaatcaccccccagccacctcggggaactccagaccaagggtgagggcgcctttccctcaggactgggtgtgaccagaggaaaaggaagtgcccaacatctcccagcctccccaggtgcccccctcaccttgatgggtgcgttcccgcagaccaaagagagtgtgactcccttgccagctccagagtgggggggctgtcccagggggcaagaaggggtgtcagggcccagtgacaaaatcattggggtttgtagtcccaacttgctgctgtcaccaccaaactcaatcatttttttcccttgtaaatgcccctcccccagctgctgccttcatattgaaggtttttgagttttgtttttggtcttaatttttctccccgttccctttttgtttcttcgttttgtttttctaccgtccttgtcataactttgtgttggagggaacctgtttcactatggcctcctttgcccaagttgaaacaggggcccatcatcatgtctgtttccagaacagtgccttggtcatcccacatccccggaccccgcctgggacccccaagctgtgtcctatgaaggggtgtggggtgaggtagtgaaaagggcggtagttggtggtggaacccagaaacggacgccggtgcttggaggggttcttaaattatatttaaaaaagtaactttttgtataaataaaagaaaatgggacgtgtcccagctccaggggt

SEQ ID NO: 130104 - DNA, 3737 bp, Homo sapiens
  Payload ID: 5455
  Gene Symbol: EPHB4
  Gene Name: EPH receptor B4
  Uniprot ID: P54760
  ENST ID: ENST00000616502
  CDS Start-End: 492-1412
ttccagcgcagctcagcccctgcccggcccggcccgcccggctccgcgccgcagtctccctccctcccgctccgtccccgctcgggctcccaccatccccgcccgcgaggagagcactcggcccggcggcgcgagcagagccactccagggagggggggagaccgcgagcggccggctcagcccccgccacccggggcgggaccccgaggccccggagggaccccaactccagccacgtcttgctgcgcgcccgcccggcgcggccactgccagcacgctccgggcccgccgcccgcgcgcgcggcacagacgcggggccacacttggcgccgccgcccggtgccccgcacgctcgcatgggcccgcgctgagggccccgacgaggagtcccgcgcggagtatcggcgtccacccgcccagggagagtcagacctgggggggcgagggccccccaaactcagttcggatcctacccgagtgaggcggcgccatggagctccgggtgctgctctgctgggcttcgttggccgcagctttggaagagaccctgctgaacacaaaattggaaactgctgatctgaagtgggtgacattccctcaggtggacgggcagtgggaggaactgagcggcctggatgaggaacagcacagcgtgcgcacctacgaagtgtgtgacgtgcagcgtgccccgggccaggcccactggcttcgcacaggttgggtcccacggcggggcgccgtccacgtgtacgccacgctgcgcttcaccatgctcgagtgcctgtccctgcctcgggctgggcgctcctgcaaggagaccttcaccgtcttctactatgagagcgatgcggacacggccacggccctcacgccagcctggatggagaacccctacatcaaggtggacacggtggccgcggagcatctcacccggaagcgccctggggccgaggccaccgggaaggtgaatgtcaagacgctgcgtctgggaccgctcagcaaggctggcttctacctggccttccaggaccagggtgcctgcatggccctgctatccctgcacctcttctacaaaaagtgcgcccagctgactgtgaacctgactcgattcccggagactgtgcctcgggagctggttgtgcccgtggccggtagctgcgtggtggatgccgtccccgcccctggccccagccccagcctctactgccgtgaggatggccagtgggccgaacagccggtcacgggctgcagctgtgctccggggttcgaggcagctgaggggaacaccaagtgccgagggcgccgagggtcccagcagcgtgcggttcctgaagacgtcagaaaaccgggcagagctgcgggggctgaagcggggagccagctacctggtgcaggtacgggcgcgctctgaggccggctacgggcccttcggccaggaacatcacagccagacccaactggatgagagcgagggctggcgggagcagctggccctgattgcgggcacggcagtcgtgggtgtggtcctggtcctggtggtcattgtggtcgcagttctctgcctcaggaagcagagcaatgggagagaagcagaatattcggacaaacacggacagtatctcatcggacatggtactaaggtctacatcgaccccttcacttatgaagaccctaatgaggctgtgagggaatttgcaaaagagatcgatgtctcctacgtcaagattgaagaggtgattggtgcaggtgagtttggcgaggtgtgccgggggcggctcaaggccccagggaagaaggagagctgtgtggcaatcaagaccctgaagggtggctacacggagcggcagcggcgtgagtttctgagcgaggcctccatcatgggccagttcgagcaccccaatatcatccgcctggagggcgtggtcaccaacagcatgcccgtcatgattctcacagagttcatggagaacggcgccctggactccttcctgcggctaaacgacggacagttcacagtcatccagctcgtgggcatgctgcggggcatcgcctcgggcatgcggtaccttgccgagatgagctacgtccaccgagacctggctgctcgcaacatcctagtcaacagcaacctcgtctgcaaagtgtctgactttggcctttcccgattcctggaggagaactcttccgatcccacctacacgagctccctgggaggaaagattcccatccgatggactgccccggaggccattgccttccggaagttcacttccgccagtgatgcctggagttacgggattgtgatgtgggaggtgatgtcatttggggagaggccgtactgggacatgagcaatcaggacgtgatcaatgccattgaacaggactaccggctgcccccgcccccagactgtcccacctccctccaccagctcatgctggactgttggcagaaagaccggaatgcccggccccgcttcccccaggtggtcagcgccctggacaagatgatccggaaccccgccagcctcaaaatcgtggcccgggagaatggcggggcctcacaccctctcctggaccagcggcagcctcactactcagcttttggctctgtgggcgagtggcttcgggccatcaaaatgggaagatacgaagaaagtttcgcagccgctggctttggctccttcgagctggtcagccagatctctgctgaggacctgctccgaatcggagtcactctggcgggacaccagaagaaaatcttggccagtgtccagcacatgaagtcccaggccaagccgggaaccccgggtgggacaggaggaccggccccgcagtactgacctgcaggaactccccaccccagggacaccgcctccccattttccggggcagagtggggactcacagaggcccccagccctgtgccccgctggattgcactttgagcccgtggggtgaggagttggcaatttggagagacaggatttgggggttctgccataataggaggggaaaatcaccccccagccacctcggggaactccagaccaagggtgagggcgcctttccctcaggactgggtgtgaccagaggaaaaggaagtgcccaacatctcccagcctccccaggtgcccccctcaccttgatgggtgcgttcccgcagaccaaagagagtgtgactcccttgccagctccagagtgggggggctgtcccagggggcaagaaggggtgtcagggcccagtgacaaaatcattggggtttgtagtcccaacttgctgctgtcaccaccaaactcaatcatttttttcccttgtaaatgcccctcccccagctgctgccttcatattgaaggtttttgagttttgtttttggtcttaatttttctccccgttccctttttgtttcttcgttttgtttttctaccgtccttgtcataactttgtgttggagggaacctgtttcactatggcctcctttgcccaagttgaaacaggggcccatcatcatgtctgtttccagaacagtgccttggtcatcccacatccccggaccccgcctgggacccccaagctgtgtcctatgaaggggtgtggggtgaggtagtgaaaagggcggtagttggtggtggaacccagaaacggacgccggtgcttggaggggttcttaaattatatttaaaaaagtaactttttgtataaataaaagaaaatgggacgtgtcccagctccaggggt

SEQ ID NO: 130105 - DNA, 3436 bp, Homo sapiens
  Payload ID: 5456
  Gene Symbol: EPHB6
  Gene Name: EPH receptor B6
  ENST ID: ENST00000422643
  CDS Start-End: 180-3248
ggtggctgttggaggaagggaggagagtaaatgaagagaaagaactggaataaccccttgcagaaaaaaaaaaaaagggaagcaagcttagctgtacaccctgagtcttgcaaaagctgcagccccacccaggagcagggtggtggctggggcgatggtggacgccctgaagatgtcccatggctactgaaggggctgcccagttagggaacagagtggcgggcatggtgtgtagcctatgggtgctgctcctggtgtcttcagttctggctctggaagaggtattgctggacaccaccggagagacatctgagattggctggctcacctacccaccaggggggtgggacgaggtgagtgttctggacgaccagcgacgcctgactcggacctttgaggcatgtcatgtggcaggggcccctccaggcaccgggcaggacaattggttgcagacacactttgtggagcggcgcggggcccagagggcgcacattcgactccacttctctgtgcgggcatgctccagcctgggtgtgagcggcggcacctgccgggagaccttcaccctttactaccgtcaggctgaggagcccgacagccctgacagcgtttcctcctggcacctcaaacgctggaccaaggtggacacaattgcagcagacgagagctttccctcctcctcctcctcctcctcctcctcttcttcctctgcagcgtgggctgtgggaccccacggggctgggcagcgggctggactgcaactgaacgtcaaagagcggagctttgggcctctcacccaacgcggcttctacgtggccttccaggacacgggggcctgcctggccctggtcgctgtcaggctcttctcctacacctgccctgccgtgctccgatcctttgcttcctttccagagacgcaggccagtggggctgggggggcctccctggtggcagctgtgggcacctgtgtggctcatgcagagccagaggaggatggagtagggggccaggcaggaggcagcccccccaggctgcactgcaacggggagggcaagtggatggtagctgtcgggggctgccgctgccagcctggataccaaccagcacgaggagacaaggcctgccaagcctgcccacgggggctctataaggcttctgctgggaatgctccctgctcaccatgccctgcccgcagtcacgctcccaacccagcagcccccgtttgcccctgcctggagggcttctaccgggccagttccgacccaccagaggccccctgcactggtcctccatcggctccccaggagctttggtttgaggtgcaaggctcagcactcatgctacactggcgcctgcctcgggagctggggggtcgaggggacctgctcttcaatgtcgtgtgcaaggagtgtgaaggccgccaggaacctgccagcggtggtgggggcacttgtcaccgctgcagggatgaggtccacttcgaccctcgccagagaggcctgactgagagccgagtgttagtggggggactccgggcacacgtaccctacatcttagaggtgcaggctgttaatggggtgtctgagctcagccctgaccctcctcaggctgcagccatcaatgtcagcaccagccatgaagtgccctctgctgtccctgtggtgcaccaggtgagccgggcatccaacagcatcacggtgtcctggccgcagcccgaccagaccaatgggaacatcctggactatcagctccgctactatgaccaggcagaagacgaatcccactccttcaccctgaccagcgagaccaacactgccaccgtgacacagctgagccctggccacatctatggtttccaggtgcgggcccggactgctgccggccacggcccctacgggggcaaagtctatttccagacacttcctcaaggggagctgtcttcccagcttccagaaagactctccttggtgatcggctccatcctgggggctttggccttcctcctgctggcagccatcaccgtgctggcggtcgtcttccagcggaagcggcgtgggactggctacacagagcagctgcagcaatacagcagcccaggactcggggtgaagtattacatcgacccctccacctacgaggacccctgtcaggccatccgagaacttgcccgggaagtcgatcctgcttatatcaagattgaggaggtcattgggacaggctcttttggagaagtgcgccagggccgcctgcagccacggggacggagggagcagactgtggccatccaggccctgtgggccgggggcgccgaaagcctgcagatgaccttcctgggccgggccgcagtgctgggtcagttccagcaccccaacatcctgcggctggagggcgtggtcaccaagagccgacccctcatggtgctgacggagttcatggagcttggccccctggacagcttcctcaggcagcgggagggccagttcagcagcctgcagctggtggccatgcagcggggagtggctgctgccatgcagtacctgtccagctttgccttcgtccatcgctcgctgtctgcccacagcgtgctggtgaatagccacttggtgtgcaaggtggcccgtcttggccacagtcctcagggcccaagttgtttgcttcgctgggcagccccagaggtcattgcacatggaaagcatacaacatccagtgatgtctggagctttgggatactcatgtgggaagtgatgagttatggagaacggccttactgggacatgagtgagcaggaggtactaaatgcaatagagcaggagttccggctgcccccgcctccaggctgtcctcctggattacatctacttatgttggacacttggcagaaggaccgtgcccggcggcctcattttgaccagctggtggctgcatttgacaagatgatccgcaagccagataccctgcaggctggcggggacccaggggaaaggccttcccaggcccttctgacccctgtggccctggactttccttgtctggactcaccccaggcctggctttcagccattggactggagtgctaccaggacaacttctccaagtttggcctctgtaccttcagtgatgtggctcagctcagcctagaagacctgcctgccctgggcatcaccctggctggccaccagaagaagctgctgcaccacatccagctccttcagcaacacctgaggcagcagggctcagtggaggtctgagaatgacgatacccgtgactcagccctggacactggtccgagaagggacatgtgggacgtgagccgggctccaacagcctctgtgagagatgccccacaccaaacccaaccctcccgatggctgcattccctggtcctccgcctctccaccagccccctcctcattaaagggaaagaagggaatttgc

SEQ ID NO: 130106 - DNA, 3367 bp, Homo sapiens
  Payload ID: 5456
  Gene Symbol: EPHB6
  Gene Name: EPH receptor B6
  ENST ID: ENST00000411471
  CDS Start-End: 990-3179
ggtggctgttggaggaagggaggagagtaaatgaagagaaagaactggaataaccccttgcagaaaaaaaaaaaaaggcaagcttagctgtacaccctgagtcttgcaaaagctgcagccccacccaggagcagggtggtggctggggcgatggtggacgccctgaagatgtcccatggctactgaaggggctgcccagttagggaacagagtggcgggcatggtgtgtagcctatgggtgctgctcctggtgtcttcagttctggctctggaagtgggacgaggtgagtgttctggacgaccagcgacgcctgactcggacctttgaggcatgtcatgtggcaggggcccctccaggcaccgggcaggacaattggttgcagacacactttgtggagcggcgcggggcccagagggcgcacattcgactccacttctctgtgcgggcatgctccagcctgggtgtgagcggcggcacctgccgggagaccttcaccctttactaccgtcaggctgaggagcccgacagccctgacagcgtttcctcctggcacctcaaacgctggaccaaggtggacacaattgcagcagacgagagctttccctcctcctcctcctcctcctcctcctcttcttcctctgcagcgtgggctgtgggaccccacggggctgggcagcgggctggactgcaactgaacgtcaaagagcggagctttgggcctctcacccaacgcggcttctacgtggccttccaggacacgggggcctgcctggccctggtcgctgtcaggctcttctcctacacctgccctgccgtgctccgatcctttgcttcctttccagagacgcaggccagtggggctgggggggcctccctggtggcagctgtgggcacctgtgtggctcatgcagagccagaggaggatggagtagggggccaggcaggaggcagcccccccaggctgcactgcaacggggagggcaagtggatggtagctgtcgggggctgccgctgccagcctggataccaaccagcacgaggagacaaggcctgccaagcctgcccacgggggctctataaggcttctgctgggaatgctccctgctcaccatgccctgcccgcagtcacgctcccaacccagcagcccccgtttgcccctgcctggagggcttctaccgggccagttccgacccaccagaggccccctgcactggtcctccatcggctccccaggagctttggtttgaggtgcaaggctcagcactcatgctacactggcgcctgcctcgggagctggggggtcgaggggacctgctcttcaatgtcgtgtgcaaggagtgtgaaggccgccaggaacctgccagcggtggtgggggcacttgtcaccgctgcagggatgaggtccacttcgaccctcgccagagaggcctgactgagagccgagtgttagtggggggactccgggcacacgtaccctacatcttagaggtgcaggctgttaatggggtgtctgagctcagccctgaccctcctcaggctgcagccatcaatgtcagcaccagccatgaagtgccctctgctgtccctgtggtgcaccaggtgagccgggcatccaacagcatcacggtgtcctggccgcagcccgaccagaccaatgggaacatcctggactatcagctccgctactatgaccaggcagaagacgaatcccactccttcaccctgaccagcgagaccaacactgccaccgtgacacagctgagccctggccacatctatggtttccaggtgcgggcccggactgctgccggccacggcccctacgggggcaaagtctatttccagacacttcctcaaggggagctgtcttcccagcttccagaaagactctccttggtgatcggctccatcctgggggctttggccttcctcctgctggcagccatcaccgtgctggcggtcgtcttccagcggaagcggcgtgggactggctacacagagcagctgcagcaatacagcagcccaggactcggggtgaagtattacatcgacccctccacctacgaggacccctgtcaggccatccgagaacttgcccgggaagtcgatcctgcttatatcaagattgaggaggtcattgggacaggctcttttggagaagtgcgccagggccgcctgcagccacggggacggagggagcagactgtggccatccaggccctgtgggccgggggcgccgaaagcctgcagatgaccttcctgggccgggccgcagtgctgggtcagttccagcaccccaacatcctgcggctggagggcgtggtcaccaagagccgacccctcatggtgctgacggagttcatggagcttggccccctggacagcttcctcaggcagcgggagggccagttcagcagcctgcagctggtggccatgcagcggggagtggctgctgccatgcagtacctgtccagctttgccttcgtccatcgctcgctgtctgcccacagcgtgctggtgaatagccacttggtgtgcaaggtggcccgtcttggccacagtcctcagggcccaagttgtttgcttcgctgggcagccccagaggtcattgcacatggaaagcatacaacatccagtgatgtctggagctttgggatactcatgtgggaagtgatgagttatggagaacggccttactgggacatgagtgagcaggaggtactaaatgcaatagagcaggagttccggctgcccccgcctccaggctgtcctcctggattacatctacttatgttggacacttggcagaaggaccgtgcccggcggcctcattttgaccagctggtggctgcatttgacaagatgatccgcaagccagataccctgcaggctggcggggacccaggggaaaggccttcccaggcccttctgacccctgtggccctggactttccttgtctggactcaccccaggcctggctttcagccattggactggagtgctaccaggacaacttctccaagtttggcctctgtaccttcagtgatgtggctcagctcagcctagaagacctgcctgccctgggcatcaccctggctggccaccagaagaagctgctgcaccacatccagctccttcagcaacacctgaggcagcagggctcagtggaggtctgagaatgacgatacccgtgactcagccctggacactggtccgagaagggacatgtgggacgtgagccgggctccaacagcctctgtgagagatgccccacaccaaacccaaccctcccgatggctgcattccctggtcctccgcctctccaccagccccctcctcattaaagggaaagaagggaatttgc

SEQ ID NO: 130107 - DNA, 3224 bp, Homo sapiens
  Payload ID: 5456
  Gene Symbol: EPHB6
  Gene Name: EPH receptor B6
  ENST ID: ENST00000611578
  CDS Start-End: 279-830
caagatcagggtgccggcatggtcagttcctggcgaagcctctcttctaggtttcagactgccctcttctttgttgtgtcctcgaatggcagaaaaaggggtggctgttggaggaagggaggagagtaaatgaagagaaagaactggaataaccccttgcagaaaaaaaaaaaaagggaagcaagcttagctgtacaccctgagtcttgcaaaagctgcagccccacccaggagcagggtggtggctggggcgatggtggacgccctgaagatgtcccatggctactgaaggggctgcccagttagggaacagagtggcgggcatggtgtgtagcctatgggtgctgctcctggtgtcttcagttctggctctggaagaggtattgctggacaccaccggagagacatctgagattggctggctcacctacccaccaggggggtgggacgaggtgagtgttctggacgaccagcgacgcctgactcggacctttgaggcatgtcatgtggcaggggcccctccaggcaccgggcaggacaattggttgcagacacactttgtggagcggcgcggggcccagagggcgcacattcgactccacttctctgtgcgggcatgctccagcctgggtgtgagcggcggcacctgccgggagaccttcaccctttactaccgtcaggctgaggagcccgacagccctgacagcgtttcctcctggcacctcaaacgctggaccaagagacgcaggccagtggggctgggggggcctccctggtggcagctgtgggcacctgtgtggctcatgcagagccagaggaggatggagtagggggccaggcaggaggcagcccccccaggctgcactgcaacggggagggcaagtggatggtagctgtcgggggctgccgctgccagcctggataccaaccagcacgaggagacaaggcctgccaagcctgcccacgggggctctataaggcttctgctgggaatgctccctgctcaccatgccctgcccgcagtcacgctcccaacccagcagcccccgtttgcccctgcctggagggcttctaccgggccagttccgacccaccagaggccccctgcactggtcctccatcggctccccaggagctttggtttgaggtgcaaggctcagcactcatgctacactggcgcctgcctcgggagctggggggtcgaggggacctgctcttcaatgtcgtgtgcaaggagtgtgaaggccgccaggaacctgccagcggtggtgggggcacttgtcaccgctgcagggatgaggtccacttcgaccctcgccagagaggcctgactgagagccgagtgttagtggggggactccgggcacacgtaccctacatcttagaggtgcaggctgttaatggggtgtctgagctcagccctgaccctcctcaggctgcagccatcaatgtcagcaccagccatgaagtgccctctgctgtccctgtggtgcaccaggtgagccgggcatccaacagcatcacggtgtcctggccgcagcccgaccagaccaatgggaacatcctggactatcagctccgctactatgaccagcgagaccaacactgccaccgtgacacagctgagccctggccacatctatggtttccaggtgcgggcccggactgctgccggccacggcccctacgggggcaaagtctatttccagacacttcctcaaggggagctgtcttcccagcttccagaaagactctccttggtgatcggctccatcctgggggctttggccttcctcctgctggcagccatcaccgtgctggcggtcgtcttccagcggaagcggcgtgggactggctacacagagcagctgcagcaatacagcagcccaggactcggggtgaagtattacatcgacccctccacctacgaggacccctgtcaggccatccgagaacttgcccgggaagtcgatcctgcttatatcaagattgaggaggtcattgggacaggctcttttggagaagtgcgccagggccgcctgcagccacggggacggagggagcagactgtggccatccaggccctgtgggccgggggcgccgaaagcctgcagatgaccttcctgggccgggccgcagtgctgggtcagttccagcaccccaacatcctgcggctggagggcgtggtcaccaagagccgacccctcatggtgctgacggagttcatggagcttggccccctggacagcttcctcaggcagcgggagggccagttcagcagcctgcagctggtggccatgcagcggggagtggctgctgccatgcagtacctgtccagctttgccttcgtccatcgctcgctgtctgcccacagcgtgctggtgaatagccacttggtgtgcaaggtggcccgtcttggccacagtcctcagggcccaagttgtttgcttcgctgggcagccccagaggtcattgcacatggaaagcatacaacatccagtgatgtctggagctttgggatactcatgtgggaagtgatgagttatggagaacggccttactgggacatgagtgagcaggaggtactaaatgcaatagagcaggagttccggctgcccccgcctccaggctgtcctcctggattacatctacttatgttggacacttggcagaaggaccgtgcccggcggcctcattttgaccagctggtggctgcatttgacaagatgatccgcaagccagataccctgcaggctggcggggacccaggggaaaggccttcccaggcccttctgacccctgtggccctggactttccttgtctggactcaccccaggcctggctttcagccattggactggagtgctaccaggacaacttctccaagtttggcctctgtaccttcagtgatgtggctcagctcagcctagaagacctgcctgccctgggcatcaccctggctggccaccagaagaagctgctgcaccacatccagctccttcagcaacacctgaggcagcagggctcagtggaggtctgagaatgacgatacccgtgactcagccctggacactggtccgagaagggacatgtgggacgtgagccgggctccaacagcctctgtgagagatgccccacaccaaacccaaccctcccgatggctgcattccctggtcctccgcctctccaccagccccctcctcattaaagggaaagaagggaa

SEQ ID NO: 130108 - DNA, 3365 bp, Homo sapiens
  Payload ID: 5456
  Gene Symbol: EPHB6
  Gene Name: EPH receptor B6
  ENST ID: ENST00000615824
  CDS Start-End: 989-3178
ggtggctgttggaggaagggaggagagtaaatgaagagaaagaactggaataaccccttgcagaaaaaaaaaaaaggcaagcttagctgtacaccctgagtcttgcaaaagctgcagccccacccaggagcagggtggtggctggggcgatggtggacgccctgaagatgtcccatggctactgaaggggctgcccagttagggaacagagtggcgggcatggtgtgtagcctatgggtgctgctcctggtgtcttcagttctggctctggaagtgggacgaggtgagtgttctggacgaccagcgacgcctgactcggacctttgaggcatgtcatgtggcaggggcccctccaggcaccgggcaggacaattggttgcagacacactttgtggagcggcgcggggcccagagggcgcacattcgactccacttctctgtgcgggcatgctccagcctgggtgtgagcggcggcacctgccgggagaccttcaccctttactaccgtcaggctgaggagcccgacagccctgacagcgtttcctcctggcacctcaaacgctggaccaaggtggacacaattgcagcagacgagagctttccctcctcctcctcctcctcctcctcctcttcttcctctgcagcgtgggctgtgggaccccacggggctgggcagcgggctggactgcaactgaacgtcaaagagcggagctttgggcctctcacccaacgcggcttctacgtggccttccaggacacgggggcctgcctggccctggtcgctgtcaggctcttctcctacacctgccctgccgtgctccgatcctttgcttcctttccagagacgcaggccagtggggctgggggggcctccctggtggcagctgtgggcacctgtgtggctcatgcagagccagaggaggatggagtagggggccaggcaggaggcagcccccccaggctgcactgcaacggggagggcaagtggatggtagctgtcgggggctgccgctgccagcctggataccaaccagcacgaggagacaaggcctgccaagcctgcccacgggggctctataagtcttctgctgggaatgctccctgctcaccatgccctgcccgcagtcacgctcccaacccagcagcccccgtttgcccctgcctggagggcttctaccgggccagttccgacccaccagaggccccctgcactggtcctccatcggctccccaggagctttggtttgaggtgcaaggctcagcactcatgctacactggcgcctgcctcgggagctggggggtcgaggggacctgctcttcaatgtcgtgtgcaaggagtgtgaaggccgccaggaacctgccagcggtggtgggggcacttgtcaccgctgcagggatgaggtccacttcgaccctcgccagagaggcctgactgagagccgagtgttagtggggggactccgggcacacgtaccctacatcttagaggtgcaggctgttaatggggtgtctgagctcagccctgaccctcctcaggctgcagccatcaatgtcagcaccagccatgaagtgccctctgctgtccctgtggtgcaccaggtgagccgggcatccaacagcatcacggtgtcctggccgcagcccgaccagaccaatgggaacatcctggactatcagctccgctactatgaccaggcagaagacgaatcccactccttcaccctgaccagcgagaccaacactgccaccgtgacacagctgagccctggccacatctatggtttccaggtgcgggcccggactgctgccggccacggcccctacgggggcaaagtctatttccagacacttcctcaaggggagctgtcttcccagcttccggaaagactctccttggtgatcggctccatcctgggggctttggccttcctcctgctggcagccatcaccgtgctggcggtcgtcttccagcggaagcggcgtgggactggctacacggagcagctgcagcaatacagcagcccaggactcggggtgaagtattacatcgacccctccacctacgaggacccctgtcaggccatccgagaacttgcccgggaagtcgatcctgcttatatcaagattgaggaggtcattgggacaggctcttttggagaagtgcgccagggccgcctgcagccacggggacggagggagcagactgtggccatccaggccctgtgggccgggggcgccgaaagcctgcagatgaccttcctgggccgggctgcagtgctgggtcagttccagcaccccaacatcctgcggctggagggcgtggtcaccaagagccgacccctcatggtgctgacggagttcatggagcttggccccctggacagcttcctcaggcagcgggagggccagttcagcagcctgcagctggtggccatgcagcggggagtggctgctgccatgcagtacctgtccagctttgccttcgtccatcgctcgctgtctgcccacagcgtgctggtgaatagccacttggtgtgcaaggtggcccgtcttggccacagtcctcagggcccaagttgtttgcttcgctgggcagccccagaggtcattgcacatggaaagcatacaacatccagtgatgtctggagctttgggatactcatgtgggaagtgatgagttatggagaacggccttactgggacatgagtgagcaggaggtactaaatgcaatagagcaggagttccggctgcccccgcctccaggctgtcctcctggattacatctacttatgttggacacttggcagaaggaccgtgcccggcggcctcattttgaccagctggtggctgcatttgacaagatgatccgcaagccagataccctgcaggctggcggggacccaggggaaaggccttcccaggcccttctgacccctgtggccctggactttccttgtctggactcaccccaggcctggctttcagccattggactggagtgctaccaggacaacttctccaagtttggcctctgtaccttcagtgatgtggctcagctcagcctagaagacctgcctgccctgggcatcaccctggctggccaccagaagaagctgctgcaccacatccagctccttcagcaacacctgaggcagcagggctcagtggaggtctgagaatgacgatacccgtgactcagccctggacactggtccgagaagggacatgtgggacgtgagccgggctccaacagcctctgtgagagatgccccacaccaaacccaaccctccgatggctgcattccctggtcctccgcctctccaccagccccctcctcattaaagggaaagaagggaatttgc

SEQ ID NO: 130109 - DNA, 3434 bp, Homo sapiens
  Payload ID: 5456
  Gene Symbol: EPHB6
  Gene Name: EPH receptor B6
  ENST ID: ENST00000618483
  CDS Start-End: 179-3247
ggtggctgttggaggaagggaggagagtaaatgaagagaaagaactggaataaccccttgcagaaaaaaaaaaaagggaagcaagcttagctgtacaccctgagtcttgcaaaagctgcagccccacccaggagcagggtggtggctggggcgatggtggacgccctgaagatgtcccatggctactgaaggggctgcccagttagggaacagagtggcgggcatggtgtgtagcctatgggtgctgctcctggtgtcttcagttctggctctggaagaggtattgctggacaccaccggagagacatctgagattggctggctcacctacccaccaggggggtgggacgaggtgagtgttctggacgaccagcgacgcctgactcggacctttgaggcatgtcatgtggcaggggcccctccaggcaccgggcaggacaattggttgcagacacactttgtggagcggcgcggggcccagagggcgcacattcgactccacttctctgtgcgggcatgctccagcctgggtgtgagcggcggcacctgccgggagaccttcaccctttactaccgtcaggctgaggagcccgacagccctgacagcgtttcctcctggcacctcaaacgctggaccaaggtggacacaattgcagcagacgagagctttccctcctcctcctcctcctcctcctcctcttcttcctctgcagcgtgggctgtgggaccccacggggctgggcagcgggctggactgcaactgaacgtcaaagagcggagctttgggcctctcacccaacgcggcttctacgtggccttccaggacacgggggcctgcctggccctggtcgctgtcaggctcttctcctacacctgccctgccgtgctccgatcctttgcttcctttccagagacgcaggccagtggggctgggggggcctccctggtggcagctgtgggcacctgtgtggctcatgcagagccagaggaggatggagtagggggccaggcaggaggcagcccccccaggctgcactgcaacggggagggcaagtggatggtagctgtcgggggctgccgctgccagcctggataccaaccagcacgaggagacaaggcctgccaagcctgcccacgggggctctataagtcttctgctgggaatgctccctgctcaccatgccctgcccgcagtcacgctcccaacccagcagcccccgtttgcccctgcctggagggcttctaccgggccagttccgacccaccagaggccccctgcactggtcctccatcggctccccaggagctttggtttgaggtgcaaggctcagcactcatgctacactggcgcctgcctcgggagctggggggtcgaggggacctgctcttcaatgtcgtgtgcaaggagtgtgaaggccgccaggaacctgccagcggtggtgggggcacttgtcaccgctgcagggatgaggtccacttcgaccctcgccagagaggcctgactgagagccgagtgttagtggggggactccgggcacacgtaccctacatcttagaggtgcaggctgttaatggggtgtctgagctcagccctgaccctcctcaggctgcagccatcaatgtcagcaccagccatgaagtgccctctgctgtccctgtggtgcaccaggtgagccgggcatccaacagcatcacggtgtcctggccgcagcccgaccagaccaatgggaacatcctggactatcagctccgctactatgaccaggcagaagacgaatcccactccttcaccctgaccagcgagaccaacactgccaccgtgacacagctgagccctggccacatctatggtttccaggtgcgggcccggactgctgccggccacggcccctacgggggcaaagtctatttccagacacttcctcaaggggagctgtcttcccagcttccggaaagactctccttggtgatcggctccatcctgggggctttggccttcctcctgctggcagccatcaccgtgctggcggtcgtcttccagcggaagcggcgtgggactggctacacggagcagctgcagcaatacagcagcccaggactcggggtgaagtattacatcgacccctccacctacgaggacccctgtcaggccatccgagaacttgcccgggaagtcgatcctgcttatatcaagattgaggaggtcattgggacaggctcttttggagaagtgcgccagggccgcctgcagccacggggacggagggagcagactgtggccatccaggccctgtgggccgggggcgccgaaagcctgcagatgaccttcctgggccgggctgcagtgctgggtcagttccagcaccccaacatcctgcggctggagggcgtggtcaccaagagccgacccctcatggtgctgacggagttcatggagcttggccccctggacagcttcctcaggcagcgggagggccagttcagcagcctgcagctggtggccatgcagcggggagtggctgctgccatgcagtacctgtccagctttgccttcgtccatcgctcgctgtctgcccacagcgtgctggtgaatagccacttggtgtgcaaggtggcccgtcttggccacagtcctcagggcccaagttgtttgcttcgctgggcagccccagaggtcattgcacatggaaagcatacaacatccagtgatgtctggagctttgggatactcatgtgggaagtgatgagttatggagaacggccttactgggacatgagtgagcaggaggtactaaatgcaatagagcaggagttccggctgcccccgcctccaggctgtcctcctggattacatctacttatgttggacacttggcagaaggaccgtgcccggcggcctcattttgaccagctggtggctgcatttgacaagatgatccgcaagccagataccctgcaggctggcggggacccaggggaaaggccttcccaggcccttctgacccctgtggccctggactttccttgtctggactcaccccaggcctggctttcagccattggactggagtgctaccaggacaacttctccaagtttggcctctgtaccttcagtgatgtggctcagctcagcctagaagacctgcctgccctgggcatcaccctggctggccaccagaagaagctgctgcaccacatccagctccttcagcaacacctgaggcagcagggctcagtggaggtctgagaatgacgatacccgtgactcagccctggacactggtccgagaagggacatgtgggacgtgagccgggctccaacagcctctgtgagagatgccccacaccaaacccaaccctccgatggctgcattccctggtcctccgcctctccaccagccccctcctcattaaagggaaagaagggaatttgc

SEQ ID NO: 130110 - DNA, 4011 bp, Homo sapiens
  Payload ID: 5456
  Gene Symbol: EPHB6
  Gene Name: EPH receptor B6
  ENST ID: ENST00000619012
  CDS Start-End: 753-3821
cggagggggcgggccgggctgcgttcgctccagccgcggctctacagcagcgggcggcgggacccgggacccagcttggcgacggcgatctcgacgcgggcccccaggatctcccggcgccccacctctggagcagcccctgccgccagcgtcaggtccaccccggaatcccagggactctcggcgccgaacggacccgggccgggtgcaacggggtccccggactggagaagacgcgggtggcaccgtgcgagctccaggagccccgggtccactgcgaggcctcggggggcgcagacctgcagagactgcggccaacgggaagaaataaagggattatagtccacccaattcacagacttctgagactcagacacgaggagagatagagaaccgccaatctctaaatcaacaagcaaaggaggtgccaagcctgtttgtcttcattgtgacactggagtctagatgctgggaagtccaagatcagggtgccggcatggtcagttcctggcgaagcctctcttctaggtttcagactgccctcttctttgttgtgtcctcgaatggcagaaaaaggggtggctgttggaggaagggaggagagtaaatgaagagaaagaactggaataaccccttgcagaaaaaaaaaaaaaggcaagcttagctgtacaccctgagtcttgcaaaagctgcagccccacccaggagcagggtggtggctggggcgatggtggacgccctgaagatgtcccatggctactgaaggggctgcccagttagggaacagagtggcgggcatggtgtgtagcctatgggtgctgctcctggtgtcttcagttctggctctggaagaggtattgctggacaccaccggagagacatctgagattggctggctcacctacccaccaggggggtgggacgaggtgagtgttctggacgaccagcgacgcctgactcggacctttgaggcatgtcatgtggcaggggcccctccaggcaccgggcaggacaattggttgcagacacactttgtggagcggcgcggggcccagagggcgcacattcgactccacttctctgtgcgggcatgctccagcctgggtgtgagcggcggcacctgccgggagaccttcaccctttactaccgtcaggctgaggagcccgacagccctgacagcgtttcctcctggcacctcaaacgctggaccaaggtggacacaattgcagcagacgagagctttccctcctcctcctcctcctcctcctcctcttcttcctctgcagcgtgggctgtgggaccccacggggctgggcagcgggctggactgcaactgaacgtcaaagagcggagctttgggcctctcacccaacgcggcttctacgtggccttccaggacacgggggcctgcctggccctggtcgctgtcaggctcttctcctacacctgccctgccgtgctccgatcctttgcttcctttccagagacgcaggccagtggggctgggggggcctccctggtggcagctgtgggcacctgtgtggctcatgcagagccagaggaggatggagtagggggccaggcaggaggcagcccccccaggctgcactgcaacggggagggcaagtggatggtagctgtcgggggctgccgctgccagcctggataccaaccagcacgaggagacaaggcctgccaagcctgcccacgggggctctataaggcttctgctgggaatgctccctgctcaccatgccctgcccgcagtcacgctcccaacccagcagcccccgtttgcccctgcctggagggcttctaccgggccagttccgacccaccagaggccccctgcactggtcctccatcggctccccaggagctttggtttgaggtgcaaggctcagcactcatgctacactggcgcctgcctcgggagctggggggtcgaggggacctgctcttcaatgtcgtgtgcaaggagtgtgaaggccgccaggaacctgccagcggtggtgggggcacttgtcaccgctgcagggatgaggtccacttcgaccctcgccagagaggcctgactgagagccgagtgttagtggggggactccgggcacacgtaccctacatcttagaggtgcaggctgttaatggggtgtctgagctcagccctgaccctcctcaggctgcagccatcaatgtcagcaccagccatgaagtgccctctgctgtccctgtggtgcaccaggtgagccgggcatccaacagcatcacggtgtcctggccgcagcccgaccagaccaatgggaacatcctggactatcagctccgctactatgaccaggcagaagacgaatcccactccttcaccctgaccagcgagaccaacactgccaccgtgacacagctgagccctggccacatctatggtttccaggtgcgggcccggactgctgccggccacggcccctacgggggcaaagtctatttccagacacttcctcaaggggagctgtcttcccagcttccagaaagactctccttggtgatcggctccatcctgggggctttggccttcctcctgctggcagccatcaccgtgctggcggtcgtcttccagcggaagcggcgtgggactggctacacagagcagctgcagcaatacagcagcccaggactcggggtgaagtattacatcgacccctccacctacgaggacccctgtcaggccatccgagaacttgcccgggaagtcgatcctgcttatatcaagattgaggaggtcattgggacaggctcttttggagaagtgcgccagggccgcctgcagccacggggacggagggagcagactgtggccatccaggccctgtgggccgggggcgccgaaagcctgcagatgaccttcctgggccgggccgcagtgctgggtcagttccagcaccccaacatcctgcggctggagggcgtggtcaccaagagccgacccctcatggtgctgacggagttcatggagcttggccccctggacagcttcctcaggcagcgggagggccagttcagcagcctgcagctggtggccatgcagcggggagtggctgctgccatgcagtacctgtccagctttgccttcgtccatcgctcgctgtctgcccacagcgtgctggtgaatagccacttggtgtgcaaggtggcccgtcttggccacagtcctcagggcccaagttgtttgcttcgctgggcagccccagaggtcattgcacatggaaagcatacaacatccagtgatgtctggagctttgggatactcatgtgggaagtgatgagttatggagaacggccttactgggacatgagtgagcaggaggtactaaatgcaatagagcaggagttccggctgcccccgcctccaggctgtcctcctggattacatctacttatgttggacacttggcagaaggaccgtgcccggcggcctcattttgaccagctggtggctgcatttgacaagatgatccgcaagccagataccctgcaggctggcggggacccaggggaaaggccttcccaggcccttctgacccctgtggccctggactttccttgtctggactcaccccaggcctggctttcagccattggactggagtgctaccaggacaacttctccaagtttggcctctgtaccttcagtgatgtggctcagctcagcctagaagacctgcctgccctgggcatcaccctggctggccaccagaagaagctgctgcaccacatccagctccttcagcaacacctgaggcagcagggctcagtggaggtctgagaatgacgatacccgtgactcagccctggacactggtccgagaagggacatgtgggacgtgagccgggctccaacagcctctgtgagagatgccccacaccaaacccaaccctcccgatggctgcattccctggtcctccgcctctccaccagccccctcctcattaaagggaaagaagggaatttgcag

SEQ ID NO: 130111 - DNA, 528 bp, Homo sapiens
  Payload ID: 5456
  Gene Symbol: EPHB6
  Gene Name: EPH receptor B6
  ENST ID: ENST00000476059
  CDS Start-End: 1-339
ggagaacggccttactgggacatgagtgagcaggaggtactaaatgcaatagagcaggagttccggctgcccccgcctccaggctgtcctcctggattacatctacttatgttggacacttggcagaaggaccgtgcccggcggcctcattttgaccagctggtggctgcatttgacaagatgatccgcaagccagataccctgcaggctggcggggacccaggggaaagagacctgcctgccctgggcatcaccctggctggccaccagaagaagctgctgcaccacatccagctccttcagcaacacctgaggcagcagggctcagtggaggtctgagaatgacgatacccgtgactcagccctggacactggtccgagaagggacatgtgggacgtgagccgggctccaacagcctctgtgagagatgccccacaccaaacccaaccctcccgatggctgcattccctggtcctccgcctctccaccagccccctcctcattaaagggaaagaagggaatttgca

SEQ ID NO: 130112 - DNA, 3861 bp, Homo sapiens
  Payload ID: 5456
  Gene Symbol: EPHB6
  Gene Name: EPH receptor B6
  ENST ID: ENST00000614832
  CDS Start-End: 675-827
cggcgatctcgacgcgggcccccaggatctcccggcgccccacctctggagcagcccctgccgccagcgtcaggtccaccccggaatcccagggactctcggcgccgaacggacccgggccgggtgcaacggggtccccggactggagaagacgcgggtggcaccgtgcgagctccaggagccccgggtccactgcgaggcctcggggggcgcagacctgcagagactgcggccaacgggaagaaataaagggattatagtccacccaattcacagacttctgagactcagacacgaggagagatagagaaccgccaatctctaaatcaacaagcaaaggaggtgccaagcctgtttgtcttcattgtgacactggagtctagatgctgggaagtccaagatcagggtgccggcatggtcagttcctggcgaagcctctcttctaggtttcagactgccctcttctttgttgtgtcctcgaatggcagaaaaaggggtggctgttggaggaagggaggagagtaaatgaagagaaagaactggaataaccccttgcagaaaaaaaaaaaaagggaagcaagcttagctgtacaccctgagtcttgcaaaagctgcagccccacccaggagcagggtggtggctggggcgatggtggacgccctgaagatgtcccatggctactgaaggggctgcccagttagggaacagagtggcgggcatggtgtgtagcctatgggtgctgctcctggtgtcttcagttctggctctggaagtgggacgaggtgagtgttctggacgaccagcgacgcctgactcggacctttgaggcatgtcatgtggcaggggcccctccaggcaccgggcaggacaattggttgcagacacactttgtggagcggcgcggggcccagagggcgcacattcgactccacttctctgtgcgggcatgctccagcctgggtgtgagcggcggcacctgccgggagaccttcaccctttactaccgtcaggctgaggagcccgacagccctgacagcgtttcctcctggcacctcaaacgctggaccaaggtggacacaattgcagcagacgagagctttccctcctcctcctcctcctcctcctcctcttcttcctctgcagcgtgggctgtgggaccccacggggctgggcagcgggctggactgcaactgaacgtcaaagagcggagctttgggcctctcacccaacgcggcttctacgtggccttccaggacacgggggcctgcctggccctggtcgctgtcaggctcttctcctacacctgccctgccgtgctccgatcctttgcttcctttccagagacgcaggccagtggggctgggggggcctccctggtggcagctgtgggcacctgtgtggctcatgcagagccagaggaggatggagtagggggccaggcaggaggcagcccccccaggctgcactgcaacggggagggcaagtggatggtagctgtcgggggctgccgctgccagcctggataccaaccagcacgaggagacaaggcctgccaagcctgcccacgggggctctataaggcttctgctgggaatgctccctgctcaccatgccctgcccgcagtcacgctcccaacccagcagcccccgtttgcccctgcctggagggcttctaccgggccagttccgacccaccagaggccccctgcactggtcctccatcggctccccaggagctttggtttgaggtgcaaggctcagcactcatgctacactggcgcctgcctcgggagctggggggtcgaggggacctgctcttcaatgtcgtgtgcaaggagtgtgaaggccgccaggaacctgccagcggtggtgggggcacttgtcaccgctgcagggatgaggtccacttcgaccctcgccagagaggcctgactgagagccgagtgttagtggggggactccgggcacacgtaccctacatcttagaggtgcaggctgttaatggggtgtctgagctcagccctgaccctcctcaggctgcagccatcaatgtcagcaccagccatgaagtgccctctgctgtccctgtggtgcaccaggtgagccgggcatccaacagcatcacggtgtcctggccgcagcccgaccagaccaatgggaacatcctggactatcagctccgctactatgaccaggcagaagacgaatcccactccttcaccctgaccagcgagaccaacactgccaccgtgacacagctgagccctggccacatctatggtttccaggtgcgggcccggactgctgccggccacggcccctacgggggcaaagtctatttccagacacttcctcaaggggagctgtcttcccagcttccagaaagactctccttggtgatcggctccatcctgggggctttggccttcctcctgctggcagccatcaccgtgctggcggtcgtcttccagcggaagcggcgtgggactggctacacagagcagctgcagcaatacagcagcccaggactcggggtgaagtattacatcgacccctccacctacgaggacccctgtcaggccatccgagaacttgcccgggaagtcgatcctgcttatatcaagattgaggaggtcattgggacaggctcttttggagaagtgcgccagggccgcctgcagccacggggacggagggagcagactgtggccatccaggccctgtgggccgggggcgccgaaagcctgcagatgaccttcctgggccgggccgcagtgctgggtcagttccagcaccccaacatcctgcggctggagggcgtggtcaccaagagccgacccctcatggtgctgacggagttcatggagcttggccccctggacagcttcctcaggcagcgggagggccagttcagcagcctgcagctggtggccatgcagcggggagtggctgctgccatgcagtacctgtccagctttgccttcgtccatcgctcgctgtctgcccacagcgtgctggtgaatagccacttggtgtgcaaggtggcccgtcttggccacagtcctcagggcccaagttgtttgcttcgctgggcagccccagaggtcattgcacatggaaagcatacaacatccagtgatgtctggagctttgggatactcatgtgggaagtgatgagttatggagaacggccttactgggacatgagtgagcaggaggtactaaatgcaatagagcaggagttccggctgcccccgcctccaggctgtcctcctggattacatctacttatgttggacacttggcagaaggaccgtgcccggcggcctcattttgaccagctggtggctgcatttgacaagatgatccgcaagccagataccctgcaggctggcggggacccaggggaaaggccttcccaggcccttctgacccctgtggccctggactttccttgtctggactcaccccaggcctggctttcagccattggactggagtgctaccaggacaacttctccaagtttggcctctgtaccttcagtgatgtggctcagctcagcctagaagacctgcctgccctgggcatcaccctggctggccaccagaagaagctgctgcaccacatccagctccttcagcaacacctgaggcagcagggctcagtggaggtctgagaatgacgatacccgtgactcagccctggacactggtccgagaagggacatgtgggacgtgagccgggctccaacagcctctgtgagagatgccccacaccaaacccaaccctcccgatggctgcattccctggtcctccgcctctccaccagccccctcctcattaaagggaaagaagggaa

SEQ ID NO: 130113 - DNA, 4006 bp, Homo sapiens
  Payload ID: 5456
  Gene Symbol: EPHB6
  Gene Name: EPH receptor B6
  ENST ID: ENST00000632037
  CDS Start-End: 756-3824
cggagggggcgggccgggctgcgttcgctccagccgcggctctacagcagcgggcggcgggacccgggacccagcttggcgacggcgatctcgacgcgggcccccaggatctcccggcgccccacctctggagcagcccctgccgccagcgtcaggtccaccccggaatcccagggactctcggcgccgaacggacccgggccgggtgcaacggggtccccggactggagaagacgcgggtggcaccgtgcgagctccaggagccccgggtccactgcgaggcctcggggggcgcagacctgcagagactgcggccaacgggaagaaataaagggattatagtccacccaattcacagacttctgagactcagacacgaggagagatagagaaccgccaatctctagatcaacaagcaaaggaggtgccaagcctgtttgtcttcattgtgacactggagtctagatgctgggaagtccaagatcagggtgccggcatggtcagttcctggcgaagcctctcttctaggtttcagactgccctcttctttgttgtgtcctcgaatggcagaaaaaggggtggctgttggaggaagggaggagagtaaatgaagagaaagaactggaataaccccttgcagaaaaaaaaaaaagggaagcaagcttagctgtacaccctgagtcttgcaaaagctgcagccccacccaggagcagggtggtggctggggcgatggtggacgccctgaagatgtcccatggctactgaaggggctgcccagttagggaacagagtggcgggcatggtgtgtagcctatgggtgctgctcctggtgtcttcagttctggctctggaagaggtattgctggacaccaccggagagacatctgagattggctggctcacctacccaccaggggggtgggacgaggtgagtgttctggacgaccagcgacgcctgactcggacctttgaggcatgtcatgtggcaggggcccctccaggcaccgggcaggacaattggttgcagacacactttgtggagcggcgcggggcccagagggcgcacattcgactccacttctctgtgcgggcatgctccagcctgggtgtgagcggcggcacctgccgggagaccttcaccctttactaccgtcaggctgaggagcccgacagccctgacagcgtttcctcctggcacctcaaacgctggaccaaggtggacacaattgcagcagacgagagctttccctcctcctcctcctcctcctcctcctcttcttcctctgcagcgtgggctgtgggaccccacggggctgggcagcgggctggactgcaactgaacgtcaaagagcggagctttgggcctctcacccaacgcggcttctacgtggccttccaggacacgggggcctgcctggccctggtcgctgtcaggctcttctcctacacctgccctgccgtgctccgatcctttgcttcctttccagagacgcaggccagtggggctgggggggcctccctggtggcagctgtgggcacctgtgtggctcatgcagagccagaggaggatggagtagggggccaggcaggaggcagcccccccaggctgcactgcaacggggagggcaagtggatggtagctgtcgggggctgccgctgccagcctggataccaaccagcacgaggagacaaggcctgccaagcctgcccacgggggctctataagtcttctgctgggaatgctccctgctcaccatgccctgcccgcagtcacgctcccaacccagcagcccccgtttgcccctgcctggagggcttctaccgggccagttccgacccaccagaggccccctgcactggtcctccatcggctccccaggagctttggtttgaggtgcaaggctcagcactcatgctacactggcgcctgcctcgggagctggggggtcgaggggacctgctcttcaatgtcgtgtgcaaggagtgtgaaggccgccaggaacctgccagcggtggtgggggcacttgtcaccgctgcagggatgaggtccacttcgaccctcgccagagaggcctgactgagagccgagtgttagtggggggactccgggcacacgtaccctacatcttagaggtgcaggctgttaatggggtgtctgagctcagccctgaccctcctcaggctgcagccatcaatgtcagcaccagccatgaagtgccctctgctgtccctgtggtgcaccaggtgagccgggcatccaacagcatcacggtgtcctggccgcagcccgaccagaccaatgggaacatcctggactatcagctccgctactatgaccaggcagaagacgaatcccactccttcaccctgaccagcgagaccaacactgccaccgtgacacagctgagccctggccacatctatggtttccaggtgcgggcccggactgctgccggccacggcccctacgggggcaaagtctatttccagacacttcctcaaggggagctgtcttcccagcttccggaaagactctccttggtgatcggctccatcctgggggctttggccttcctcctgctggcagccatcaccgtgctggcggtcgtcttccagcggaagcggcgtgggactggctacacggagcagctgcagcaatacagcagcccaggactcggggtgaagtattacatcgacccctccacctacgaggacccctgtcaggccatccgagaacttgcccgggaagtcgatcctgcttatatcaagattgaggaggtcattgggacaggctcttttggagaagtgcgccagggccgcctgcagccacggggacggagggagcagactgtggccatccaggccctgtgggccgggggcgccgaaagcctgcagatgaccttcctgggccgggctgcagtgctgggtcagttccagcaccccaacatcctgcggctggagggcgtggtcaccaagagccgacccctcatggtgctgacggagttcatggagcttggccccctggacagcttcctcaggcagcgggagggccagttcagcagcctgcagctggtggccatgcagcggggagtggctgctgccatgcagtacctgtccagctttgccttcgtccatcgctcgctgtctgcccacagcgtgctggtgaatagccacttggtgtgcaaggtggcccgtcttggccacagtcctcagggcccaagttgtttgcttcgctgggcagccccagaggtcattgcacatggaaagcatacaacatccagtgatgtctggagctttgggatactcatgtgggaagtgatgagttatggagaacggccttactgggacatgagtgagcaggaggtactaaatgcaatagagcaggagttccggctgcccccgcctccaggctgtcctcctggattacatctacttatgttggacacttggcagaaggaccgtgcccggcggcctcattttgaccagctggtggctgcatttgacaagatgatccgcaagccagataccctgcaggctggcggggacccaggggaaaggccttcccaggcccttctgacccctgtggccctggactttccttgtctggactcaccccaggcctggctttcagccattggactggagtgctaccaggacaacttctccaagtttggcctctgtaccttcagtgatgtggctcagctcagcctagaagacctgcctgccctgggcatcaccctggctggccaccagaagaagctgctgcaccacatccagctccttcagcaacacctgaggcagcagggctcagtggaggtctgagaatgacgatacccgtgactcagccctggacactggtccgagaagggacatgtgggacgtgagccgggctccaacagcctctgtgagagatgccccacaccaaacccaaccctccgatggctgcattccctggtcctccgcctctccaccagccccctcctcattaaagggaaagaagggaa

SEQ ID NO: 130114 - DNA, 3859 bp, Homo sapiens
  Payload ID: 5456
  Gene Symbol: EPHB6
  Gene Name: EPH receptor B6
  ENST ID: ENST00000634148
  CDS Start-End: 674-826
cggcgatctcgacgcgggcccccaggatctcccggcgccccacctctggagcagcccctgccgccagcgtcaggtccaccccggaatcccagggactctcggcgccgaacggacccgggccgggtgcaacggggtccccggactggagaagacgcgggtggcaccgtgcgagctccaggagccccgggtccactgcgaggcctcggggggcgcagacctgcagagactgcggccaacgggaagaaataaagggattatagtccacccaattcacagacttctgagactcagacacgaggagagatagagaaccgccaatctctagatcaacaagcaaaggaggtgccaagcctgtttgtcttcattgtgacactggagtctagatgctgggaagtccaagatcagggtgccggcatggtcagttcctggcgaagcctctcttctaggtttcagactgccctcttctttgttgtgtcctcgaatggcagaaaaaggggtggctgttggaggaagggaggagagtaaatgaagagaaagaactggaataaccccttgcagaaaaaaaaaaaagggaagcaagcttagctgtacaccctgagtcttgcaaaagctgcagccccacccaggagcagggtggtggctggggcgatggtggacgccctgaagatgtcccatggctactgaaggggctgcccagttagggaacagagtggcgggcatggtgtgtagcctatgggtgctgctcctggtgtcttcagttctggctctggaagtgggacgaggtgagtgttctggacgaccagcgacgcctgactcggacctttgaggcatgtcatgtggcaggggcccctccaggcaccgggcaggacaattggttgcagacacactttgtggagcggcgcggggcccagagggcgcacattcgactccacttctctgtgcgggcatgctccagcctgggtgtgagcggcggcacctgccgggagaccttcaccctttactaccgtcaggctgaggagcccgacagccctgacagcgtttcctcctggcacctcaaacgctggaccaaggtggacacaattgcagcagacgagagctttccctcctcctcctcctcctcctcctcctcttcttcctctgcagcgtgggctgtgggaccccacggggctgggcagcgggctggactgcaactgaacgtcaaagagcggagctttgggcctctcacccaacgcggcttctacgtggccttccaggacacgggggcctgcctggccctggtcgctgtcaggctcttctcctacacctgccctgccgtgctccgatcctttgcttcctttccagagacgcaggccagtggggctgggggggcctccctggtggcagctgtgggcacctgtgtggctcatgcagagccagaggaggatggagtagggggccaggcaggaggcagcccccccaggctgcactgcaacggggagggcaagtggatggtagctgtcgggggctgccgctgccagcctggataccaaccagcacgaggagacaaggcctgccaagcctgcccacgggggctctataagtcttctgctgggaatgctccctgctcaccatgccctgcccgcagtcacgctcccaacccagcagcccccgtttgcccctgcctggagggcttctaccgggccagttccgacccaccagaggccccctgcactggtcctccatcggctccccaggagctttggtttgaggtgcaaggctcagcactcatgctacactggcgcctgcctcgggagctggggggtcgaggggacctgctcttcaatgtcgtgtgcaaggagtgtgaaggccgccaggaacctgccagcggtggtgggggcacttgtcaccgctgcagggatgaggtccacttcgaccctcgccagagaggcctgactgagagccgagtgttagtggggggactccgggcacacgtaccctacatcttagaggtgcaggctgttaatggggtgtctgagctcagccctgaccctcctcaggctgcagccatcaatgtcagcaccagccatgaagtgccctctgctgtccctgtggtgcaccaggtgagccgggcatccaacagcatcacggtgtcctggccgcagcccgaccagaccaatgggaacatcctggactatcagctccgctactatgaccaggcagaagacgaatcccactccttcaccctgaccagcgagaccaacactgccaccgtgacacagctgagccctggccacatctatggtttccaggtgcgggcccggactgctgccggccacggcccctacgggggcaaagtctatttccagacacttcctcaaggggagctgtcttcccagcttccggaaagactctccttggtgatcggctccatcctgggggctttggccttcctcctgctggcagccatcaccgtgctggcggtcgtcttccagcggaagcggcgtgggactggctacacggagcagctgcagcaatacagcagcccaggactcggggtgaagtattacatcgacccctccacctacgaggacccctgtcaggccatccgagaacttgcccgggaagtcgatcctgcttatatcaagattgaggaggtcattgggacaggctcttttggagaagtgcgccagggccgcctgcagccacggggacggagggagcagactgtggccatccaggccctgtgggccgggggcgccgaaagcctgcagatgaccttcctgggccgggctgcagtgctgggtcagttccagcaccccaacatcctgcggctggagggcgtggtcaccaagagccgacccctcatggtgctgacggagttcatggagcttggccccctggacagcttcctcaggcagcgggagggccagttcagcagcctgcagctggtggccatgcagcggggagtggctgctgccatgcagtacctgtccagctttgccttcgtccatcgctcgctgtctgcccacagcgtgctggtgaatagccacttggtgtgcaaggtggcccgtcttggccacagtcctcagggcccaagttgtttgcttcgctgggcagccccagaggtcattgcacatggaaagcatacaacatccagtgatgtctggagctttgggatactcatgtgggaagtgatgagttatggagaacggccttactgggacatgagtgagcaggaggtactaaatgcaatagagcaggagttccggctgcccccgcctccaggctgtcctcctggattacatctacttatgttggacacttggcagaaggaccgtgcccggcggcctcattttgaccagctggtggctgcatttgacaagatgatccgcaagccagataccctgcaggctggcggggacccaggggaaaggccttcccaggcccttctgacccctgtggccctggactttccttgtctggactcaccccaggcctggctttcagccattggactggagtgctaccaggacaacttctccaagtttggcctctgtaccttcagtgatgtggctcagctcagcctagaagacctgcctgccctgggcatcaccctggctggccaccagaagaagctgctgcaccacatccagctccttcagcaacacctgaggcagcagggctcagtggaggtctgagaatgacgatacccgtgactcagccctggacactggtccgagaagggacatgtgggacgtgagccgggctccaacagcctctgtgagagatgccccacaccaaacccaaccctccgatggctgcattccctggtcctccgcctctccaccagccccctcctcattaaagggaaagaagggaa

SEQ ID NO: 130115 - DNA, 527 bp, Homo sapiens
  Payload ID: 5456
  Gene Symbol: EPHB6
  Gene Name: EPH receptor B6
  ENST ID: ENST00000633684
  CDS Start-End: 1-339
ggagaacggccttactgggacatgagtgagcaggaggtactaaatgcaatagagcaggagttccggctgcccccgcctccaggctgtcctcctggattacatctacttatgttggacacttggcagaaggaccgtgcccggcggcctcattttgaccagctggtggctgcatttgacaagatgatccgcaagccagataccctgcaggctggcggggacccaggggaaagagacctgcctgccctgggcatcaccctggctggccaccagaagaagctgctgcaccacatccagctccttcagcaacacctgaggcagcagggctcagtggaggtctgagaatgacgatacccgtgactcagccctggacactggtccgagaagggacatgtgggacgtgagccgggctccaacagcctctgtgagagatgccccacaccaaacccaaccctccgatggctgcattccctggtcctccgcctctccaccagccccctcctcattaaagggaaagaagggaatttgca

SEQ ID NO: 130116 - DNA, 654 bp, Homo sapiens
  Payload ID: 5456
  Gene Symbol: EPHB6
  Gene Name: EPH receptor B6
  ENST ID: ENST00000632242
  CDS Start-End: 1-357
tttgggatactcatgtgggaagtgatgagttatggagaacggccttactgggacatgagtgagcaggaggtactaaatgcaatagagcaggagttccggctgcccccgcctccaggctgtcctcctggattacatctacttatgttggacacttggcagaaggaccgtgcccggcggcctcattttgaccagctggtggctgcatttgacaagatgatccgcaagccagataccctgcaggctggcggggacccaggggaaaggcctggctttcagccattggactggagtgctaccaggacaacttctccaagtttggcctctgtaccttcagtgatgtggctcagctcagcctagaagacctgcctgccctgggcatcaccctggctggccaccagaagaagctgctgcaccacatccagctccttcagcaacacctgaggcagcagggctcagtggaggtctgagaatgacgatacccgtgactcagccctggacactggtccgagaagggacatgtgggacgtgagccgggctccaacagcctctgtgagagatgccccacaccaaacccaaccctccgatggctgcattccctggtcctccgcctctccaccagccccctcctcattaaagggaaagaagggaatttgc

SEQ ID NO: 130117 - DNA, 3222 bp, Homo sapiens
  Payload ID: 5456
  Gene Symbol: EPHB6
  Gene Name: EPH receptor B6
  ENST ID: ENST00000631900
  CDS Start-End: 278-829
caagatcagggtgccggcatggtcagttcctggcgaagcctctcttctaggtttcagactgccctcttctttgttgtgtcctcgaatggcagaaaaaggggtggctgttggaggaagggaggagagtaaatgaagagaaagaactggaataaccccttgcagaaaaaaaaaaaagggaagcaagcttagctgtacaccctgagtcttgcaaaagctgcagccccacccaggagcagggtggtggctggggcgatggtggacgccctgaagatgtcccatggctactgaaggggctgcccagttagggaacagagtggcgggcatggtgtgtagcctatgggtgctgctcctggtgtcttcagttctggctctggaagaggtattgctggacaccaccggagagacatctgagattggctggctcacctacccaccaggggggtgggacgaggtgagtgttctggacgaccagcgacgcctgactcggacctttgaggcatgtcatgtggcaggggcccctccaggcaccgggcaggacaattggttgcagacacactttgtggagcggcgcggggcccagagggcgcacattcgactccacttctctgtgcgggcatgctccagcctgggtgtgagcggcggcacctgccgggagaccttcaccctttactaccgtcaggctgaggagcccgacagccctgacagcgtttcctcctggcacctcaaacgctggaccaagagacgcaggccagtggggctgggggggcctccctggtggcagctgtgggcacctgtgtggctcatgcagagccagaggaggatggagtagggggccaggcaggaggcagcccccccaggctgcactgcaacggggagggcaagtggatggtagctgtcgggggctgccgctgccagcctggataccaaccagcacgaggagacaaggcctgccaagcctgcccacgggggctctataagtcttctgctgggaatgctccctgctcaccatgccctgcccgcagtcacgctcccaacccagcagcccccgtttgcccctgcctggagggcttctaccgggccagttccgacccaccagaggccccctgcactggtcctccatcggctccccaggagctttggtttgaggtgcaaggctcagcactcatgctacactggcgcctgcctcgggagctggggggtcgaggggacctgctcttcaatgtcgtgtgcaaggagtgtgaaggccgccaggaacctgccagcggtggtgggggcacttgtcaccgctgcagggatgaggtccacttcgaccctcgccagagaggcctgactgagagccgagtgttagtggggggactccgggcacacgtaccctacatcttagaggtgcaggctgttaatggggtgtctgagctcagccctgaccctcctcaggctgcagccatcaatgtcagcaccagccatgaagtgccctctgctgtccctgtggtgcaccaggtgagccgggcatccaacagcatcacggtgtcctggccgcagcccgaccagaccaatgggaacatcctggactatcagctccgctactatgaccagcgagaccaacactgccaccgtgacacagctgagccctggccacatctatggtttccaggtgcgggcccggactgctgccggccacggcccctacgggggcaaagtctatttccagacacttcctcaaggggagctgtcttcccagcttccggaaagactctccttggtgatcggctccatcctgggggctttggccttcctcctgctggcagccatcaccgtgctggcggtcgtcttccagcggaagcggcgtgggactggctacacggagcagctgcagcaatacagcagcccaggactcggggtgaagtattacatcgacccctccacctacgaggacccctgtcaggccatccgagaacttgcccgggaagtcgatcctgcttatatcaagattgaggaggtcattgggacaggctcttttggagaagtgcgccagggccgcctgcagccacggggacggagggagcagactgtggccatccaggccctgtgggccgggggcgccgaaagcctgcagatgaccttcctgggccgggctgcagtgctgggtcagttccagcaccccaacatcctgcggctggagggcgtggtcaccaagagccgacccctcatggtgctgacggagttcatggagcttggccccctggacagcttcctcaggcagcgggagggccagttcagcagcctgcagctggtggccatgcagcggggagtggctgctgccatgcagtacctgtccagctttgccttcgtccatcgctcgctgtctgcccacagcgtgctggtgaatagccacttggtgtgcaaggtggcccgtcttggccacagtcctcagggcccaagttgtttgcttcgctgggcagccccagaggtcattgcacatggaaagcatacaacatccagtgatgtctggagctttgggatactcatgtgggaagtgatgagttatggagaacggccttactgggacatgagtgagcaggaggtactaaatgcaatagagcaggagttccggctgcccccgcctccaggctgtcctcctggattacatctacttatgttggacacttggcagaaggaccgtgcccggcggcctcattttgaccagctggtggctgcatttgacaagatgatccgcaagccagataccctgcaggctggcggggacccaggggaaaggccttcccaggcccttctgacccctgtggccctggactttccttgtctggactcaccccaggcctggctttcagccattggactggagtgctaccaggacaacttctccaagtttggcctctgtaccttcagtgatgtggctcagctcagcctagaagacctgcctgccctgggcatcaccctggctggccaccagaagaagctgctgcaccacatccagctccttcagcaacacctgaggcagcagggctcagtggaggtctgagaatgacgatacccgtgactcagccctggacactggtccgagaagggacatgtgggacgtgagccgggctccaacagcctctgtgagagatgccccacaccaaacccaaccctccgatggctgcattccctggtcctccgcctctccaccagccccctcctcattaaagggaaagaagggaa

SEQ ID NO: 130118 - DNA, 1444 bp, Homo sapiens
  Payload ID: 5457
  Gene Symbol: EFNA1
  Gene Name: ephrin-A1
  Uniprot ID: P20827
  ENST ID: ENST00000368406
  CDS Start-End: 103-654
agatctgtgagcccagcgctgactgcgccgcggagaaagccagtgggaacccagacccataggagacccgcgtccccgctcggcctggccaggccccgcgctatggagttcctctgggcccctctcttgggtctgtgctgcagtctggccgctgctgatcgccacaccgtcttctggaacagttcaaatcccaagttccggaatgaggactacaccatacatgtgcagctgaatgactacgtggacatcatctgtccgcactatgaagatcactctgtggcagacgctgccatggagcagtacatactgtacctggtggagcatgaggagtaccagctgtgccagccccagtccaaggaccaagtccgctggcagtgcaaccggcccagtgccaagcatggcccggagaagctgtctgagaagttccagcgcttcacacctttcaccctgggcaaggagttcaaagaaggacacagctactactacatctctcacagtcctcaggcccatgacaatccacaggagaagagacttgcagcagatgacccagaggtgcgggttctacatagcatcggtcacagtgctgccccacgcctcttcccacttgcctggactgtgctgctccttccacttctgctgctgcaaaccccgtgaaggtgtatgccacacctggccttaaagagggacaggctgaagagagggacaggcactccaaacctgtcttggggccactttcagagcccccagccctgggaaccactcccaccacaggcataagctatcacctagcagcctcaaaacgggtcagtattaaggttttcaaccggaaggaggccaaccagcccgacagtgccatccccaccttcacctcggagggatggagaaagaagtggagacagtcctttcccaccattcctgcctttaagccaaagaaacaagctgtgcaggcatggtcccttaaggcacagtgggagctgagctggaaggggccacgtggatgggcaaagcttgtcaaagatgccccctccaggagagagccaggatgcccagatgaactgactgaaggaaaagcaagaaacagtttcttgcttggaagccaggtacaggagaggcagcatgcttgggctgacccagcatctcccagcaagacctcatctgtggagctgccacagagaagtttgtagccaggtactgcattctctcccatcctggggcagcactccccagagctgtgccagcaggggggctgtgccaacctgttcttagagtgtagctgtaagggcagtgcccatgtgtacattctgcctagagtgtagcctaaagggcagggcccacgtgtatagtatctgtatataagttgctgtgtgtctgtcctgatttctacaactggagtttttttatacaatgttctttgtctcaaaataaagcaatgtgttttttcgga

SEQ ID NO: 130119 - DNA, 1926 bp, Homo sapiens
  Payload ID: 5457
  Gene Symbol: EFNA1
  Gene Name: ephrin-A1
  Uniprot ID: P20827
  ENST ID: ENST00000368407
  CDS Start-End: 519-1136
atgcgaggctcagaaaggtgcggggcatgtcaacaacctcgcaccctgcaaggtccgcgcgcggagcagcaaagccgtgtcccgcacccccgcgttcgcagactcgcacttgcgagttcttcccttctcccgcacgcgactgcgcccagggacgcaagcccaccaccgggacaggctcacaaagctccacgcagacccacaagtgagcgaacacacatctctgagcagatctgcgggggcagaggagcgcgcttcgctctttcctgcacccccagcctcctcgcctccccaccccgcccctcctccacctccccagcccccaagcccccaggcagccgcgcgccgggcggggcgagggcggggcggggtgtcgggcggcgccggcccaaaaggcggagtcgctaggcgaaggggccagatctgtgagcccagcgctgactgcgccgcggagaaagccagtgggaacccagacccataggagacccgcgtccccgctcggcctggccaggccccgcgctatggagttcctctgggcccctctcttgggtctgtgctgcagtctggccgctgctgatcgccacaccgtcttctggaacagttcaaatcccaagttccggaatgaggactacaccatacatgtgcagctgaatgactacgtggacatcatctgtccgcactatgaagatcactctgtggcagacgctgccatggagcagtacatactgtacctggtggagcatgaggagtaccagctgtgccagccccagtccaaggaccaagtccgctggcagtgcaaccggcccagtgccaagcatggcccggagaagctgtctgagaagttccagcgcttcacacctttcaccctgggcaaggagttcaaagaaggacacagctactactacatctccaaacccatccaccagcatgaagaccgctgcttgaggttgaaggtgactgtcagtggcaaaatcactcacagtcctcaggcccatgacaatccacaggagaagagacttgcagcagatgacccagaggtgcgggttctacatagcatcggtcacagtgctgccccacgcctcttcccacttgcctggactgtgctgctccttccacttctgctgctgcaaaccccgtgaaggtgtatgccacacctggccttaaagagggacaggctgaagagagggacaggcactccaaacctgtcttggggccactttcagagcccccagccctgggaaccactcccaccacaggcataagctatcacctagcagcctcaaaacgggtcagtattaaggttttcaaccggaaggaggccaaccagcccgacagtgccatccccaccttcacctcggagggatggagaaagaagtggagacagtcctttcccaccattcctgcctttaagccaaagaaacaagctgtgcaggcatggtcccttaaggcacagtgggagctgagctggaaggggccacgtggatgggcaaagcttgtcaaagatgccccctccaggagagagccaggatgcccagatgaactgactgaaggaaaagcaagaaacagtttcttgcttggaagccaggtacaggagaggcagcatgcttgggctgacccagcatctcccagcaagacctcatctgtggagctgccacagagaagtttgtagccaggtactgcattctctcccatcctggggcagcactccccagagctgtgccagcaggggggctgtgccaacctgttcttagagtgtagctgtaagggcagtgcccatgtgtacattctgcctagagtgtagcctaaagggcagggcccacgtgtatagtatctgtatataagttgctgtgtgtctgtcctgatttctacaactggagtttttttatacaatgttctttgtctcaaaataaagcaatgtgttttttcgga

SEQ ID NO: 130120 - DNA, 949 bp, Homo sapiens
  Payload ID: 5458
  Gene Symbol: EFNA2
  Gene Name: ephrin-A2
  Uniprot ID: O43921
  ENST ID: ENST00000215368
  CDS Start-End: 16-657
ggccggaccggggccatggcgcccgcgcagcgcccgctgctcccgctgctgctcctgctgttaccgctgccgccgccgcccttcgcgcgcgccgaggacgccgcccgcgccaactcggaccgctacgccgtctactggaaccgcagcaaccccaggttccacgcaggcgcgggggacgacggcgggggctacacggtggaggtgagcatcaatgactacctggacatctactgcccgcactatggggcgccgctgccgccggccgagcgcatggagcactacgtgctgtacatggtcaacggcgagggccacgcctcctgcgaccaccgccagcgcggcttcaagcgctgggagtgcaaccggcccgcggcgcccggggggccgctcaagttctcggagaagttccagctcttcacgcccttctccctgggcttcgagttccggcccggccacgagtattactacatctctgccacgcctcccaatgctgtggaccggccctgcctgcgactgaaggtgtacgtgcggccgaccaacgagaccctgtacgaggctcctgagcccatcttcaccagcaataactcgtgtagcagcccgggcggctgccgcctcttcctcagcaccatccccgtgctctggaccctcctgggttcctagtcccagccccgcaggacgccgaccctgcctggacggccccgcctggaccgcctgacctcggccctccggacccggctgcggcccccgcctccgagaccaaatagagacgctgcttctccctcgcctggtgccgcccccgccgggcaggggccatccacccgccccaggaccagccctcagggaggggaaacggccgagagcccccccccggaggcccgaggggccggggtgtggatgcggaccgtggccaggccatctcctctggggcgtcggagaacccgggaacctcttg

SEQ ID NO: 130121 - DNA, 1782 bp, Homo sapiens
  Payload ID: 5459
  Gene Symbol: EFNA3
  Gene Name: ephrin-A3
  Uniprot ID: P52797
  ENST ID: ENST00000368408
  CDS Start-End: 71-787
ggagctgggaagcggagaagccgggagcgcggggctcagtcggggggcggcggcggcggcggctccggggatggcggcggctccgctgctgctgctgctgctgctcgtgcccgtgccgctgctgccgctgctggcccaagggcccggaggggcgctgggaaaccggcatgcggtgtactggaacagctccaaccagcacctgcggcgagagggctacaccgtgcaggtgaacgtgaacgactatctggatatttactgcccgcactacaacagctcgggggtgggccccggggcgggaccggggcccggaggcggggcagagcagtacgtgctgtacatggtgagccgcaacggctaccgcacctgcaacgccagccagggcttcaagcgctgggagtgcaaccggccgcacgccccgcacagccccatcaagttctcggagaagttccagcgctacagcgccttctctctgggctacgagttccacgccggccacgagtactactacatctccacgcccactcacaacctgcactggaagtgtctgaggatgaaggtgttcgtctgctgcgcctccacatcgcactccggggagaagccggtccccactctcccccagttcaccatgggccccaatgtgaagatcaacgtgctggaagactttgagggagagaaccctcaggtgcccaagcttgagaagagcatcagcgggaccagccccaaacgggaacacctgcccctggccgtgggcatcgccttcttcctcatgacgttcttggcctcctagctctgccccctcccctggggggggagagatggggcggggcttggaaggagcagggagcctttggcctctccaagggaagcctagtgggcctagacccctcctcccatggctagaagtggggcctgcaccatacatctgtgtccgccccctctaccccttccccccacgtagggcactgtagtggaccaagcacggggacagccatgggtcccgggcggccttgtggctctggtaatgtttggtaccaaacttgggggccaaaaagggcagtgctcaggactccctggcccctggtacctttccctgactcctggtgccctctccctttgtccccccagagagacatatgcccccagagagagcaaatcgaagcgtgggaggcacccccattgctctcctccaggggcagaacatggggaggggactagatgggcaaggggcagcactgcctgctgcttccttcccctgtttacagcaataagcacgtcctcctcccccactcccacttccaggattgtggtttggattgaaaccaagtttacaagtagacacccctgggggggcgggcagtggacaaggatggcaaggggtgggcattggggtgccaggcaggcatgtacagactctatatctctatatataatgtacagacagacagagtcccttccctctttaaccccctgacctttcttgacttccccttcagcttcagaccccttccccaccaggctaggccccccacacctgggggaccccctggcccctcttttgtcttctgtgaagacaggacctatgcaacgcacagacacttttggagaccgtaaaacaacaacgccccctcccttccagccctgagccgggaaccatctcccaggaccttgccctgctcaccctatgtggtcccacctatcctcctgggcctttttcaagtgctttggctgtgactttcatactctgctcttagtctaaaaaaaataaactggagataaaaataa

SEQ ID NO: 130122 - DNA, 1096 bp, Homo sapiens
  Payload ID: 5460
  Gene Symbol: EFNA4
  Gene Name: ephrin-A4
  Uniprot ID: P52798
  ENST ID: ENST00000359751
  CDS Start-End: 88-669
cttccctcttcactttgtacctttctctcctcgactgtgaagcgggccgggacctgccaggccagaccaaaccggacctcgggggcgatgcggctgctgcccctgctgcggactgtcctctgggccgcgttcctcggctcccctctgcgcgggggctccagcctccgccacgtagtctactggaactccagtaaccccaggttgcttcgaggagacgccgtggtggagctgggcctcaacgattacctagacattgtctgcccccactacgaaggcccagggccccctgagggccccgagacgtttgctttgtacatggtggactggccaggctatgagtcctgccaggcagagggcccccgggcctacaagcgctgggtgtgctccctgccctttggccatgttcaattctcagagaagattcagcgcttcacacccttctccctcggctttgagttcttacctggagagacttactactacatctcggtgcccactccagagagttctggccagtgcttgaggctccaggtgtctgtctgctgcaaggagaggaaccttccctctcatcccaaggagccagagtcctcccaagatcccctggaggaggagggatccctgctgcctgcactgggggtgccaattcagaccgacaagatggagcattgatgggggagatcagagggtctgaggtgactcttgcaggagcctgtcccctcatcacaggctaaagaagagcagtagacagccctggacactctgaagcagaggcaagacaaacacaggcgctttgcaggctgctctgagggtctcagcccatcccccaggaggactgggatttggtatgatcaaatcctcaagccagctgggggcccaggctgaagacctggggacaggtcgattgctggaccagggcaaagaagaagccctgccatctgtgccctgtgggccttttccctggggcagcaccttgccctccccaggggatcactcacttgtcttctatgaagacggactcttcatgaggttgaatttcatgccagtttgtatttttataagtatctagaccaaaccttcaataaaccactcatctttt

SEQ ID NO: 130123 - DNA, 1263 bp, Homo sapiens
  Payload ID: 5460
  Gene Symbol: EFNA4
  Gene Name: ephrin-A4
  Uniprot ID: P52798
  ENST ID: ENST00000368409
  CDS Start-End: 94-699
ccgcaacttccctcttcactttgtacctttctctcctcgactgtgaagcgggccgggacctgccaggccagaccaaaccggacctcgggggcgatgcggctgctgcccctgctgcggactgtcctctgggccgcgttcctcggctcccctctgcgcgggggctccagcctccgccacgtagtctactggaactccagtaaccccaggttgcttcgaggagacgccgtggtggagctgggcctcaacgattacctagacattgtctgcccccactacgaaggcccagggccccctgagggccccgagacgtttgctttgtacatggtggactggccaggctatgagtcctgccaggcagagggcccccgggcctacaagcgctgggtgtgctccctgccctttggccatgttcaattctcagagaagattcagcgcttcacacccttctccctcggctttgagttcttacctggagagacttactactacatctcggtgcccactccagagagttctggccagtgcttgaggctccaggtgtctgtctgctgcaaggagaggaagtctgagtcagcccatcctgttgggagccctggagagagtggcacatcagggtggcgagggggggacactcccagccccctctgtctcttgctattactgctgcttctgattcttcgtcttctgcgaattctgtgagccaagcagaccttccctctcatcccaaggagccagagtcctcccaagatcccctggaggaggagggatccctgctgcctgcactgggggtgccaattcagaccgacaagatggagcattgatgggggagatcagagggtctgaggtgactcttgcaggagcctgtcccctcatcacaggctaaagaagagcagtagacagccctggacactctgaagcagaggcaagacaaacacaggcgctttgcaggctgctctgagggtctcagcccatcccccaggaggactgggatttggtatgatcaaatcctcaagccagctgggggcccaggctgaagacctggggacaggtcgattgctggaccagggcaaagaagaagccctgccatctgtgccctgtgggccttttccctggggcagcaccttgccctccccaggggatcactcacttgtcttctatgaagacggactcttcatgaggttgaatttcatgccagtttgtatttttataagtatctagaccaaaccttcaataaaccactcatctttttgttgccctccccaa

SEQ ID NO: 130124 - DNA, 1052 bp, Homo sapiens
  Payload ID: 5460
  Gene Symbol: EFNA4
  Gene Name: ephrin-A4
  Uniprot ID: P52798
  ENST ID: ENST00000427683
  CDS Start-End: 64-687
ctctcctcgactgtgaagcgggccgggacctgccaggccagaccaaaccggacctcgggggcgatgcggctgctgcccctgctgcggactgtcctctgggccgcgttcctcggctcccctctgcgcgggggctccagcctccgccacgtagtctactggaactccagtaaccccaggttgcttcgaggagacgccgtggtggagctgggcctcaacgattacctagacattgtctgcccccactacgaaggcccagggccccctgagggccccgagacgtttgctttgtacatggtggactggccaggctatgagtcctgccaggcagagggcccccgggcctacaagcgctgggtgtgctccctgccctttggccatgttcaattctcagagaagattcagcgcttcacacccttctccctcggctttgagttcttacctggagagacttactactacatctcggtgcccactccagagagttctggccagtgcttgaggctccaggtgtctgtctgctgcaaggagaggagagccagagtcctcccaagatcccctggaggaggagggatccctgctgcctgcactgggggtgccaattcagaccgacaagatggagcattgatgggggagatcagagggtctgaggtgactcttgcaggagcctgtcccctcatcacaggctaaagaagagcagtagacagccctggacactctgaagcagaggcaagacaaacacaggcgctttgcaggctgctctgagggtctcagcccatcccccaggaggactgggatttggtatgatcaaatcctcaagccagctgggggcccaggctgaagacctggggacaggtcgattgctggaccagggcaaagaagaagccctgccatctgtgccctgtgggccttttccctggggcagcaccttgccctccccaggggatcactcacttgtcttctatgaagacggactcttcatgaggttgaatttcatgccagtttgtatttttataagtatctagaccaaaccttcaataaaccactcatctttt

SEQ ID NO: 130125 - DNA, 5335 bp, Homo sapiens
  Payload ID: 5461
  Gene Symbol: EFNA5
  Gene Name: ephrin-A5
  Uniprot ID: P52803
  ENST ID: ENST00000333274
  CDS Start-End: 283-969
gcttctctccatcttgtgattcctttttcctcctgaaccctccagtgggggtgcgagtttgtctttatcaccccccatcccaccgccttcttttcttctcgctctcctacccctccccagcttggtgggcgcctctttcctttctcgcccactttcatttttatttattcatatttatttggcgcccgctctctctctgtccctttgcctgcctccctccctccggatccccgctctctccccggagtggcgcgtcgggggctccgccgctggccaggcgtgatgttgcacgtggagatgttgacgctggtgtttctggtgctctggatgtgtgtgttcagccaggacccgggctccaaggccgtcgccgaccgctacgctgtctactggaacagcagcaaccccagattccagaggggtgactaccatattgatgtctgtatcaatgactacctggatgttttctgccctcactatgaggactccgtcccagaagataagactgagcgctatgtcctctacatggtgaactttgatggctacagtgcctgcgaccacacttccaaagggttcaagagatgggaatgtaaccggcctcactctccaaatggaccgctgaagttctctgaaaaattccagctcttcactcccttttctctaggatttgaattcaggccaggccgagaatatttctacatctcctctgcaatcccagataatggaagaaggtcctgtctaaagctcaaagtctttgtgagaccaacaaatagctgtatgaaaactataggtgttcatgatcgtgttttcgatgttaacgacaaagtagaaaattcattagaaccagcagatgacaccgtacatgagtcagccgagccatcccgcggcgagaacgcggcacaaacaccaaggatacccagccgccttttggcaatcctactgttcctcctggcgatgcttttgacattatagcacagtctcctcccatcacttgtcacagaaaacatcagggtcttggaacaccagagatccacctaactgctcatcctaagaagggacttgttattgggttttggcagatgtcagatttttgttttctttctttcagcctgaattctaagcaacaacttcaggttgggggcctaaacttgttcctgcctccctcaccccaccccgccccacccccagccctggcccttggcttctctcacccctcccaaattaaatggactccagatgaaaatgccaaattgtcatagtgacaccagtggttcgtcagctcctgtgcattctcctctaagaactcacctccgttagcgcactgtgtcagcgggctatggacaaggaagaatagtggcagatgcagccagcgctggctagggctgggagggttttgctctcctatgcaatatttatgccttctcattcagaactgtaagatgatcgcgcagggcatcatgtcaccatgtcaggtccggaggggaggtattaagaatagatacgatattacaccatttcctataggagtatgtaaatgaacaggcttctaaaaggttgagacactggtttttttttttaatatgactgtcttaaagcattcttgacagcaaaacttgtgctctctaaaagaagccttttttttttttctaggaggcaggttgggtgtggaatgctaatacagagcaggtgtgaaaacagagaaaactacaggtttgctgggggtgtgtatgtgtgagtgcctctaatttttttggtgactgggcagtgcacaccagatattttttctttgaatacagatcaccatggtgctacaactttttttttttttttttttttttttttttttttttttaagaaactcaaagaggcatttttatgaataaagtgaccttccccaaggctgacaagccagggttgatgagtgcatagtggaatagctttggatactcctctgggggatgacatgtaccaaggagaggaccgcagtggccagaggagacatgatttggctttgctggagcgccagtgtgctgtggcctttccccgcctcccaccctagtacccacgttttgctccacactccttgaccgcaggggctcggacacaaacccctgtcaccaggagagtcagtcagcactacttgggagggctaaagggaaatttggaaataaaattccaaagtttggagtaaaaaaattcaagtgttgattttatattctttccctttctgacacagcctaaagcgtagggggaacatgtgtttatctgtgggagataaacaagatggagtcccaaagactttaacaaaatatttttttaaaaatccactagaatagaaaatacattatttagatatactttatgctgagagtgagtatatatgcttgtcctatttaaacttgtgagaaaaagtggtatcccttgatacatttagaaatatgggggctatcttgtttcattgtgggggtggggcagaaggagaataaatgcaggatgaccctgttgaaggaatcttagcatggccaacaggggacgtttccagtcgattaccaggaaatgcaagccttggggtttctactggtggtggggctgtcatgaactttaaaatccaaagcctagacaaggaaaagtgttagaccaattgaaaagcaatccagccctttttttttttttttttttggctttgcacgacatgtcaacagaaaccatgcctttcaatataagaaataaatgtgatgatcatgtaaaatgtgaaaaattgaaagcattccagcaaaataagaattttttatatatttgttttttaagatgtatatgttaaaaaaagagaaggtcgcattatggacagacttcgtgaatgggaatttgcttagaattgtgagtagttctgaattagaaaagtatgtgaaggaaaggcagctgtaaacgtattgtgccctggagagttgtacacatgttgaaatgtaatctgggcttacctgatccatttggagtggatgtcactgccgagtctgttctcacatggaaccatgtgtgtggggttgccagcctcacagatacaatcaatcctattcccctctgacataaggaactcctctggagtggcagagtcttatcacagaaggcagccaccatttcaccaaaacaaaagttcacggcattcaattcctttttcctttagctatttatatatgcagtactctcagtcatatgcagaaatacttttttttttttaattaatagttacaggcttgttggtccagtgggatttgggtagggggagaaagataccttctaaaatggatcaatagaaccaaaataatacagcatgttctataaccacaaggaaatcaaatgatcctgtcatgattccagttagtcataactatgttagcagtgctaaatgcattttagaaatggtgacttctgtggttttcctagcatttgtctctaacaaatggtgaaataattactcatggccctctctgccattgtctttcattttttcacagtgaaattagacccctttacttcaccattctgccactgcaaattaagtataaagaaaatagcaagagtgtccacaccagtagacagtaagcttctctacctgtaagtgatgaaatcatagctaatgcacttgccatggagttttcaagatgattggtgtcagacagttttcactttgtttaaaaagtgttggtggccttttgtggtggtgttacaatcctctgggggcttaggaggatgttgatgcaacttttagaagcttttaatttcaaaaacaactcaaaaatctgaaggacagtcatagctgccactcagccccagttagtcaaaccccagtgacctttgcccctggttgccaagggctttgcaacatcaagcagggaaataaggatctgtctgtttagtggataccgtgtatcctttaatagaccaggtaacagttcgtgttagtttagactattgttttgtactgtactttcttgggtggcagaggaaagaaaagtaaaacattaaaaaaaaaaaaaaaactgcgttctttaaattctgtattattagcaacctctgttgtacatagtgtttgataataaagtattaatttgattcttatgtcttttgtaagtgagaacaatagactttcaggatacaaaacatgcattgaggctttgaaacatccaatgtgtaccatggctgaaaaaaagagtcacaagtggctgagacactgctccatacaggactcatgtgtggtcattgcccacccaatcttatgactccatcatcttgggacctggaacaacatgacttttttgatcgatattttgtcctcggtgttttcaaggtctgatgttggagccctgtggcccaccctcccttctccaccagcatgttggtttgaaaaggatagggaatttagaaacagttctgtactttggtttggtttggttttctgtttgtgattgttttcatggactgttttattttttcccaggaagagtctttatcaatatcatgtgcagctcactcatggaaatggttgcaaaccaatcagtgtaggaagcttaaatggggctgtttccctctctgtgtcgttgtgaaaggaagagtcacacagtacctgtggattttcagggactctgtttttctccggtgccttagcaacggcagcagccatttgtattattttcaaataattagaaaaacagttttcaactcctcctttccattcattgctctcagagttgtggtcactgacttttcttttgaaaaccgcctccaccaacacccccgtttgcctacaccaccccccttttacttagtatgtttattttttgtgtgtctcttgccttcctcccacgttttatttcccctcagagctgtgaatgggcaggtctgtctctggtttggcatcactgagtttttcccatgcattggccccagggctgctaggatgtgagacaaatctccctacaatgggcttgctcccattgtctgtacagtttaatagatgctggcatgtcggaggttacccatgagtcaaaatccgctctccatgcttactcttgacaccccattgaagccactcattgtgtgtgcgtctgggtgtgaagtccagctccgtgtggtcctgtgcttgtactgccctgctttgcagttcctttgcacttactcatcgagtgctgttttgaaatgctgacattatataaacgtaaaagaaaatgtaaaaaaaaaaaacccacacacaaacaaacccatacgatctgtatttgtatatacacgtgtccgtacaagtataactaaataaaaattaaagattttcatcattttaattgga

SEQ ID NO: 130126 - DNA, 637 bp, Homo sapiens
  Payload ID: 5461
  Gene Symbol: EFNA5
  Gene Name: ephrin-A5
  ENST ID: ENST00000509503
  CDS Start-End: 15-620
gctggccaggcgtgatgttgcacgtggagatgttgacgctggtgtttctggtgctctggatgtgtgtgttcagccaggacccgggctccaaggccgtcgccgaccgctacgctgtctactggaacagcagcaaccccagattccagaggggtgactaccatattgatgtctgtatcaatgactacctggatgttttctgccctcactatgaggactccgtcccagaagataagactgagcgctatgtcctctacatggtgaactttgatggctacagtgcctgcgaccacacttccaaagggttcaagagatgggaatgtaaccggcctcactctccaaatggaccgctgaagttctctgaaaaattccagctcttcactcccttttctctaggatttgaattcaggccaggccgagaatatttctacatctcctctgcaatcccagataatggaagaaggtcctgtctaaagctcaaagtctttgtgagaccaacaaatgacaccgtacatgagtcagccgagccatcccgcggcgagaacgcggcacaaacaccaaggatacccagccgccttttggcaatcctactgttcctcctggcgatgcttttgacattatagcacagtctcctcccatc

SEQ ID NO: 130127 - DNA, 4933 bp, Homo sapiens
  Payload ID: 5461
  Gene Symbol: EFNA5
  Gene Name: ephrin-A5
  ENST ID: ENST00000611503
  CDS Start-End: 1-567
aacagattccagaggggtgactaccatattgatgtctgtatcaatgactacctggatgttttctgccctcactatgaggactccgtcccagaagataagactgagcgctatgtcctctacatggtgaactttgatggctacagtgcctgcgaccacacttccaaagggttcaagagatgggaatgtaaccggcctcactctccaaatggaccgctgaagttctctgaaaaattccagctcttcactcccttttctctaggatttgaattcaggccaggccgagaatatttctacatctcctctgcaatcccagataatggaagaaggtcctgtctaaagctcaaagtctttgtgagaccaacaaatagctgtatgaaaactataggtgttcatgatcgtgttttcgatgttaacgacaaagtagaaaattcattagaaccagcagatgacaccgtacatgagtcagccgagccatcccgcggcgagaacgcggcacaaacaccaaggatacccagccgccttttggcaatcctactgttcctcctggcgatgcttttgacattatagcacagtctcctcccatcacttgtcacagaaaacatcagggtcttggaacaccagagatccacctaactgctcatcctaagaagggacttgttattgggttttggcagatgtcagatttttgttttctttctttcagcctgaattctaagcaacaacttcaggttgggggcctaaacttgttcctgcctccctcaccccaccccgccccacccccagccctggcccttggcttctctcacccctcccaaattaaatggactccagatgaaaatgccaaattgtcatagtgacaccagtggttcgtcagctcctgtgcattctcctctaagaactcacctccgttagcgcactgtgtcagcgggctatggacaaggaagaatagtggcagatgcagccagcgctggctagggctgggagggttttgctctcctatgcaatatttatgccttctcattcagaactgtaagatgatcgcgcagggcatcatgtcaccatgtcaggtccggaggggaggtattaagaatagatacgatattacaccatttcctataggagtatgtaaatgaacaggcttctaaaaggttgagacactggtttttttttttaatatgactgtcttaaagcattcttgacagcaaaacttgtgctctctaaaagaagccttttttttttttctaggaggcaggttgggtgtggaatgctaatacagagcaggtgtgaaaacagagaaaactacaggtttgctgggggtgtgtatgtgtgagtgcctctaatttttttggtgactgggcagtgcacaccagatattttttctttgaatacagatcaccatggtgctacaactttttttttttttttttttttttttttttttttttttaagaaactcaaagaggcatttttatgaataaagtgaccttccccaaggctgacaagccagggttgatgagtgcatagtggaatagctttggatactcctctgggggatgacatgtaccaaggagaggaccgcagtggccagaggagacatgatttggctttgctggagcgccagtgtgctgtggcctttccccgcctcccaccctagtacccacgttttgctccacactccttgaccgcaggggctcggacacaaacccctgtcaccaggagagtcagtcagcactacttgggagggctaaagggaaatttggaaataaaattccaaagtttggagtaaaaaaattcaagtgttgattttatattctttccctttctgacacagcctaaagcgtagggggaacatgtgtttatctgtgggagataaacaagatggagtcccaaagactttaacaaaatatttttttaaaaatccactagaatagaaaatacattatttagatatactttatgctgagagtgagtatatatgcttgtcctatttaaacttgtgagaaaaagtggtatcccttgatacatttagaaatatgggggctatcttgtttcattgtgggggtggggcagaaggagaataaatgcaggatgaccctgttgaaggaatcttagcatggccaacaggggacgtttccagtcgattaccaggaaatgcaagccttggggtttctactggtggtggggctgtcatgaactttaaaatccaaagcctagacaaggaaaagtgttagaccaattgaaaagcaatccagccctttttttttttttttttttggctttgcacgacatgtcaacagaaaccatgcctttcaatataagaaataaatgtgatgatcatgtaaaatgtgaaaaattgaaagcattccagcaaaataagaattttttatatatttgttttttaagatgtatatgttaaaaaaagagaaggtcgcattatggacagacttcgtgaatgggaatttgcttagaattgtgagtagttctgaattagaaaagtatgtgaaggaaaggcagctgtaaacgtattgtgccctggagagttgtacacatgttgaaatgtaatctgggcttacctgatccatttggagtggatgtcactgccgagtctgttctcacatggaaccatgtgtgtggggttgccagcctcacagatacaatcaatcctattcccctctgacataaggaactcctctggagtggcagagtcttatcacagaaggcagccaccatttcaccaaaacaaaagttcacggcattcaattcctttttcctttagctatttatatatgcagtactctcagtcatatgcagaaatacttttttttttttaattaatagttacaggcttgttggtccagtgggatttgggtagggggagaaagataccttctaaaatggatcaatagaaccaaaataatacagcatgttctataaccacaaggaaatcaaatgatcctgtcatgattccagttagtcataactatgttagcagtgctaaatgcattttagaaatggtgacttctgtggttttcctagcatttgtctctaacaaatggtgaaataattactcatggccctctctgccattgtctttcattttttcacagtgaaattagacccctttacttcaccattctgccactgcaaattaagtataaagaaaatagcaagagtgtccacaccagtagacagtaagcttctctacctgtaagtgatgaaatcatagctaatgcacttgccatggagttttcaagatgattggtgtcagacagttttcactttgtttaaaaagtgttggtggccttttgtggtggtgttacaatcctctgggggcttaggaggatgttgatgcaacttttagaagcttttaatttcaaaaacaactcaaaaatctgaaggacagtcatagctgccactcagccccagttagtcaaaccccagtgacctttgcccctggttgccaagggctttgcaacatcaagcagggaaataaggatctgtctgtttagtggataccgtgtatcctttaatagaccaggtaacagttcgtgttagtttagactattgttttgtactgtactttcttgggtggcagaggaaagaaaagtaaaacattaaaaaaaaaaaaaaaactgcgttctttaaattctgtattattagcaacctctgttgtacatagtgtttgataataaagtattaatttgattcttatgtcttttgtaagtgagaacaatagactttcaggatacaaaacatgcattgaggctttgaaacatccaatgtgtaccatggctgaaaaaaagagtcacaagtggctgagacactgctccatacaggactcatgtgtggtcattgcccacccaatcttatgactccatcatcttgggacctggaacaacatgacttttttgatcgatattttgtcctcggtgttttcaaggtctgatgttggagccctgtggcccaccctcccttctccaccagcatgttggtttgaaaaggatagggaatttagaaacagttctgtactttggtttggtttggttttctgtttgtgattgttttcatggactgttttattttttcccaggaagagtctttatcaatatcatgtgcagctcactcatggaaatggttgcaaaccaatcagtgtaggaagcttaaatggggctgtttccctctctgtgtcgttgtgaaaggaagagtcacacagtacctgtggattttcagggactctgtttttctccggtgccttagcaacggcagcagccatttgtattattttcaaataattagaaaaacagttttcaactcctcctttccattcattgctctcagagttgtggtcactgacttttcttttgaaaaccgcctccaccaacacccccgtttgcctacaccaccccccttttacttagtatgtttattttttgtgtgtctcttgccttcctcccacgttttatttcccctcagagctgtgaatgggcaggtctgtctctggtttggcatcactgagtttttcccatgcattggccccagggctgctaggatgtgagacaaatctccctacaatgggcttgctcccattgtctgtacagtttaatagatgctggcatgtcggaggttacccatgagtcaaaatccgctctccatgcttactcttgacaccccattgaagccactcattgtgtgtgcgtctgggtgtgaagtccagctccgtgtggtcctgtgcttgtactgccctgctttgcagttcctttgcacttactcatcgagtgctgttttgaaatgctgacattatataaacgtaaaagaaaatgtaaaaaaaaaaaacccacacacaaacaaacccatacgatctgtatttgtatatacacgtgtccgtacaagtataactaaataaaaattaaagattttcatcattttaattgga

SEQ ID NO: 130128 - DNA, 3314 bp, Homo sapiens
  Payload ID: 5462
  Gene Symbol: EFNB1
  Gene Name: ephrin-B1
  Uniprot ID: P98172
  ENST ID: ENST00000204961
  CDS Start-End: 781-1821
gcacagcggcagcggagggagtctatgcgagctggacagcagtgggaggtttgtgaggctcgcactggccgcagaccctcgggctcgatcgcccgggagccaggactcggcgacgcgaggctgccgggctacccggccgaggcttcgggggcgcaaactaatgggactggctcgctcggcagcatctccccgctcttctaagtacactgagcagggcccgcgctgaagtagaagctgtccgggggcgcgtagcccggagtcccagtgtggcccggaggaacggagcccgtgccagggcggcccagtcgggagcccggggaccgagcttgtgctgtggggaaacccccacttcttccaagggacagcgatcccgggacggtcgaggcgtcggggcggtcaccgagacctctgcgggaagaccccgtcggggagagggcgcgcagccccgaagcgtctcgggaagtcgagcggaatcgggcgggatcacccgggggcgcagagcccccgtcgcgcctcgtgcggcagcggagagcccaggagaacgagccctcgggggccgaagcccatgcccgggttgggggcggctgcccagtgagtcctcctggccggccgggcggagaagagcgacaccgaagccggcgggaggggagcacttcaaggccggcggctgcggaggatgggcgcctgagcggctccgagcgcagcgcggcagaggaaggcgaggcgagctttggtgaggaggcgccaagggatcccgaagtgcagtctgcccccgggaagatggctcggcctgggcagcgttggctcggcaagtggcttgtggcgatggtcgtgtgggcgctgtgccggctcgccacaccgctggccaagaacctggagcccgtatcctggagctccctcaaccccaagttcctgagtgggaagggcttggtgatctatccgaaaattggagacaagctggacatcatctgcccccgagcagaagcagggcggccctatgagtactacaagctgtacctggtgcggcctgagcaggcagctgcctgtagcacagttctcgaccccaacgtgttggtcacctgcaataggccagagcaggaaatacgctttaccatcaagttccaggagttcagccccaactacatgggcctggagttcaagaagcaccatgattactacattacctcaacatccaatggaagcctggaggggctggaaaaccgggagggcggtgtgtgccgcacacgcaccatgaagatcatcatgaaggttgggcaagatcccaatgctgtgacgcctgagcagctgactaccagcaggcccagcaaggaggcagacaacactgtcaagatggccacacaggcccctggtagtcggggctccctgggtgactctgatggcaagcatgagactgtgaaccaggaagagaagagtggcccaggtgcaagtgggggcagcagcggggaccctgatggcttcttcaactccaaggtggcattgttcgcggctgtcggtgccggttgcgtcatcttcctgctcatcatcatcttcctgacggtcctactactgaagctacgcaagcggcaccgcaagcacacacagcagcgggcggctgccctctcgctcagtaccctggccagtcccaaggggggcagtggcacagcgggcaccgagcccagcgacatcatcattcccttacggactacagagaacaactactgcccccactatgagaaggtgagtggggactacgggcaccctgtctacatcgtccaagagatgccgccccagagcccggcgaacatctactacaaggtctgagtgcccggcacggcctcaggcccccgagggacagtcggcctggaccggacctctcctttcgcccccacaccccctccccttgccagctgtgcccacctttgtatttagttttgtagtttcttggcttttataatccccctttttccctgccccctgggcttcggaggggggtgcttgtgcccctaacccccatgctcttgtgccttccccctctggccaggcctctgggctccgtgggggcgccccttcttggaaggcagggctggacactgatggacagcaggcagggagacagtcccctggccctgcccctccctcgccccccttgccaccttcccaggactgcttgtccgctatcatcactgtttttaatgcttttgtgttcattttttagctgtcaactcattttcatctgttttttgaagaaaaatggaaaaatgtaaaaggcagcccctccccaggctttgtgagcctggcccaagccagtacaagagggcctggggcacgatgtggtcagccaggaagcataggatgccatttcttttatagattccttggtatttctggtggggtaaggggcaggccagggctgttcacgcccatgagggaagaggaaagtgccactgggcaaggtgtcccaccctcccctcctgaccctcctacgaggcttatcctggcaatggggtagtcactgccacccttccacacacacacacacacacacacacacaaaaaaaaatcccttccttgtgggattcttgggcatctcctgcctccctcactctcacggtaattaatgtcttaattggctgttgcctggggaacaggagagctgctgcaggcagatgacctcatggggggtggagggaggtgaggtgcccaggtggctatttgccctgcagagctgggagtttcacccccaccccccaccctgttctctccttacctttggcatcctttggcctggtggggaaacagaggcccagggtggagacctaagcgggtataagaccaggtggcctgctccttttctgggccctagcacaggtgggtaacccccacccaacccagctcctgctgctgtcccagtcttgggctggggcctggaaagaggaagaggctgcctggggctgggccagcccgctgtgcactttgaccccagttccttgccagcacggctgctaacagactgccacttgagtgcgccttgcaggcactcccagagcagccatggaaggagctggccctcacaccatccacctccacactgcctcctggccagctgcccaccccagtgccaggtgggagagggagcagaacagccagccccttccaggtggcagtcggaagggtttttgtttttgtttctgttgccatttgtgtaaatactagtctttttggaaaaaaaataatgtaaagatgttttgtataaactctgaattattttcttgttgcttttttcttagaaaaaaatgagaactaaaaaaaaaaaa

SEQ ID NO: 130129 - DNA, 4461 bp, Homo sapiens
  Payload ID: 5463
  Gene Symbol: EFNB2
  Gene Name: ephrin-B2
  Uniprot ID: P52799
  ENST ID: ENST00000245323
  CDS Start-End: 151-1152
gaccgctggagctgcgcagcgcgcctcggagctgcctgcgggcgcacgccgtcttccccgccagtctgccccggaggattgggggtcccagcctgcgtcccgtcagtcccttcttggcccggagtgcgcggagctgggagtggcttcgccatggctgtgagaagggactccgtgtggaagtactgctggggtgttttgatggttttatgcagaactgcgatttccaaatcgatagttttagagcctatctattggaattcctcgaactccaaatttctacctggacaaggactggtactatacccacagataggagacaaattggatattatttgccccaaagtggactctaaaactgttggccagtatgaatattataaagtttatatggttgataaagaccaagcagacagatgcactattaagaaggaaaatacccctctcctcaactgtgccaaaccagaccaagatatcaaattcaccatcaagtttcaagaattcagccctaacctctggggtctagaatttcagaagaacaaagattattacattatatctacatcaaatgggtctttggagggcctggataaccaggagggaggggtgtgccagacaagagccatgaagatcctcatgaaagttggacaagatgcaagttctgctggatcaaccaggaataaagatccaacaagacgtccagaactagaagctggtacaaatggaagaagttcgacaacaagtccctttgtaaaaccaaatccaggttctagcacagacggcaacagcgccggacattcggggaacaacatcctcggttccgaagtggccttatttgcagggattgcttcaggatgcatcatcttcatcgtcatcatcatcacgctggtggtcctcttgctgaagtaccggaggagacacaggaagcactcgccgcagcacacgaccacgctgtcgctcagcacactggccacacccaagcgcagcggcaacaacaacggctcagagcccagtgacattatcatcccgctaaggactgcggacagcgtcttctgccctcactacgagaaggtcagcggggactacgggcacccggtgtacatcgtccaggagatgcccccgcagagcccggcgaacatttactacaaggtctgagagggaccctggtggtacctgtgctttcccagaggacacctaatgtcccgatgcctcccttgagggtttgagagcccgcgtgctggagaattgactgaagcacagcaccgggggagagggacactcctcctcggaagagcccgtcgcgctggacagcttacctagtcttgtagcattcggccttggtgaacacacacgctccctggaagctggaagactgtgcagaagacgcccattcggactgctgtgccgcgtcccacgtctcctcctcgaagccatgtgctgcggtcactcaggcctctgcagaagccaagggaagacagtggtttgtggacgagagggctgtgagcatcctggcaggtgccccaggatgccacgcctggaagggccggcttctgcctggggtgcatttcccccgcagtgcataccggacttgtcacacggacctcgggctagttaaggtgtgcaaagatctctagagtttagtccttactgtctcactcgttctgttacccagggctctgcagcacctcacctgagacctccactccacatctgcatcactcatggaacactcatgtctggagtcccctcctccagccgctggcaacaacagcttcagtccatgggtaatccgttcatagaaattgtgtttgctaacaaggtgccctttagccagatgctaggctgtctgcgaagaaggctaggagttcatagaagggagtggggctggggaaagggctggctgcaattgcagctcactgctgctgcctctgaaacagaaagttggaaaggaaaaaagaaaaaagcaattaggtagcacagcactttggttttgctgagatcgaagaggccagtaggagacacgacagcacacacagtggattccagtgcatggggaggcactcgctgttatcaaatagcgatgtgcaggaagaaaagcccctcttcattccggggaacaaagacgggtattgttgggaaaggaacaggcttggagggaagggagaaagtaggccgctgatgatatattcgggcaggactgttgtggtactggcaataagatacacagctccgagctgtaggagagtcggtctgctttggatgattttttaagcagactcagctgctatacttatcacattttattaaacacagggaaagcatttaggagaatagcagagagccaaatctgacctaaaagttgaaaagccaaaggtcaaacaggctgtaattccatcatcatcgttgttattaaagaatccttatctataaaaggtaggtcagatccccctccccccaggttcctccttcccctcccgattgagccttacgacactttggtttatgcggtgctgtccgggtgccagggctgcagggtcggtactgatggaggctgcagcgcccggtgctctgtgtcaaggtgaagcacatacggcagacctcttagagtccttaagacggaagtaaattatgatgtccagggggagaaggaagataggacgtatttataataggtatatagaacacaagggatataaaatgaaagatttttactaatatatattttaaggttgcacacagtacacaccagaagatgtgaaattcatttgtggcaattaagtggtcccaatgctcagcgcttaaaaaaacaaattggacagctacttctgggaaaaacaacatcattccaaaaagaacaataatgagagcaaatgcaaaaataaccaagtcctccgaaggcatctcacggaaccgtagactaggaagtacgagccccacagagcaggaagccgatgtgactgcatcatatatttaacaatgacaagatgttccggcgtttatttctgcgttgggttttcccttgccttatgggctgaagtgttctctagaatccagcaggtcacactgggggcttcaggtgacgatttagctgtggctccctcctcctgtcctcccccgcaccccctcccttctgggaaacaagaagagtaaacaggaaacctactttttatgtgctatgcaaaatagacatctttaacatagtcctgttactatggtaacactttgctttctgaattggaagggaaaaaaaatgtagcgacagcattttaaggttctcagacctccagtgagtacctgcaaaaatgagttgtcacagaaattatgatcctctatttcctgaacctggaaatgatgttggtccaaagtgcgtgtgtgtatgtgtgagtgggtgcgtggtatacatgtgtacatatatgtataatatatatctacaatatatattatatatatctatatcatatttctgtggagggttgccatggtaaccagccacagtacatatgtaattctttccatcaccccaacctctcctttctgtgcattcatgcaagagtttcttgtaagccatcagaagttacttttaggatgggggagaggggcgagaaggggaaaaatgggaaatagtctgattttaatgaaatcaaatgtatgtatcatcagttggctacgttttggttctatgctaaactgtgaaaaatcagatgaattgataaaagagttccctgcaaccaattgaaaagtgttctgtgcgtctgttttgtgtctggtgcagaatatgacaatctaccaactgtccctttgtttgaagttggtttagctttggaaagttactgtaaatgccttgcttgtatgatcgtccctggtcacccgactttggaatttgcaccatcatgtttcagtgaagatgctgtaaataggttcagattttactgtctatggatttggggtgttacagtagccttattcacctttttaataaaaatacacatgaaaacaagaaagaaatggcttttcttacccagattgtgtacatagagcaatgttggttttttataaagtctaagcaagatgttttgtataaaatctgaattttgcaatgtatttagctacagcttgtttaacggcagtgtcattcccctttgcactgtaatgaggaaaaaatggtataaaaggttgccaaattgctgcatatttgtgccgtaattatgtaccatgaatatttatttaaaatttcgttgtccaatttgtaagtaacacagtattatgcctgagttataaatatttttttctttctttgttttattttaatagcctgtcataggttttaaatctgctttagtttcacattgcagttagccccagaaaatgaaatccgtgaagtcacattccacatctgtttcaaactgaatttgttcttaaaaaaataaaatatttttttcctatggaaaaagtgccttcaaagta

SEQ ID NO: 130130 - DNA, 3222 bp, Homo sapiens
  Payload ID: 5464
  Gene Symbol: EFNB3
  Gene Name: ephrin-B3
  Uniprot ID: Q15768
  ENST ID: ENST00000226091
  CDS Start-End: 398-1420
ggtttcctcccttagcccgctgccctcaatcccagcgaggctggggctccggctcggcgcccccttcctcgctccctggtccggcgccccatgccgcccccgcccggtccccggctcccccagtcccccacttaggcgggctcacagatcccggggtgctggcgcgtgggccgggggcgcgtagggcgcctgcagacggcccctggaagggctctggtggggctgagcgctctgccgcgggggcgcgggcacagcaggaagcaggtccgcgtgggcgctgggggcatcagctaccggggtggtccgggctgaagagccaggcagccaaggcagccaccccggggggtgggcgactttgggggagttggtgccccgccccccaggccttggcggggtcatggggcccccccattctgggccggggggcgtgcgagtcggggccctgctgctgctgggggttttggggctggtgtctgggctcagcctggagcctgtctactggaactcggcgaataagaggttccaggcagagggtggttatgtgctgtaccctcagatcggggaccggctagacctgctctgcccccgggcccggcctcctggccctcactcctctcctaattatgagttctacaagctgtacctggtagggggtgctcagggccggcgctgtgaggcaccccctgccccaaacctccttctcacttgtgatcgcccagacctggatctccgcttcaccatcaagttccaggagtatagccctaatctctggggccacgagttccgctcgcaccacgattactacatcattgccacatcggatgggacccgggagggcctggagagcctgcagggaggtgtgtgcctaaccagaggcatgaaggtgcttctccgagtgggacaaagtccccgaggaggggctgtcccccgaaaacctgtgtctgaaatgcccatggaaagagaccgaggggcagcccacagcctggagcctgggaaggagaacctgccaggtgaccccaccagcaatgcaacctcccggggtgctgaaggccccctgccccctcccagcatgcctgcagtggctggggcagcaggggggctggcgctgctcttgctgggcgtggcaggggctgggggtgccatgtgttggcggagacggcgggccaagccttcggagagtcgccaccctggtcctggctccttcgggaggggagggtctctgggcctggggggtggaggtgggatgggacctcgggaggctgagcctggggagctagggatagctctgcggggtggcggggctgcagatccccccttctgcccccactatgagaaggtgagtggtgactatgggcatcctgtgtatatcgtgcaggatgggcccccccagagccctccaaacatctactacaaggtatgagggctcctctcacgtggctatcctgaatccagcccttcttggggtgctcctccagtttaattcctggtttgagggacacctctaacatctcggccccctgtgcccccccagccccttcactcctcccggctgctgtcctcgtctccacttttaggattccttaggattcccactgccccacttcctgccctcccgtttggccatgggtgcccccctctgtctcagtgtccctggatcctttttccttggggaggggcacaggctcagcctcctctctgaccatgacccaggcatccttgtccccctcacccacccagagctaggggcgggaacagcccaccttttggttggcaccgccttctttctgcctctcactggttttctcttctctatctcttattctttccctctcttccgtctctaggtctgttcttcttccctagcatcctcctccccacatctcctttcaccctcttggcttcttatcctgtgcctctcccatctcctgggtgggggcatcaaagcatttctccccttagctttcagccccccttctgacctctcataccaaccactcccctcagtctgccaaaaatgggggccttatggggaaggctctgacactccaccccagctcaggccatgggcagcagggctccattctctggcctggcccaggcctctacatacttactccagccatttggggtggttgggtcatgacagctaccatgagaagaagtgtcccgttttgtccagtggccaatagcaagatatgaaccggtcgggacatgtatggacttggtctgatgctgaatgggccacttgggaccggaagtgacttgctccagacaagaggtgaccaggcccggacagaaatggcctgggaagtagcagaagcagtgcagcaggaactggaagtgccttcatccaggacaggaagtagcacttctgaaacaggaagtggtctggctggaactccaagtggcttagtctgggggatcaggaggtgggaggtggatggttcttattctgtggagaagaagggcgggaagaacttcctttcaggaggaagctggaacttactgactgtaagaggttagaggtggaccgagaaggacttttcccagtcttcagtggcacttcccaagatctcccttcccttgtgctctgtgctgattttaggacagctaagatgactgccatgtgctgtggcaggcctaatttgtcttgttctttcctttccatatcccagtataatctctgttaatcaacaggactaccccaagaacccatgtgctctcccgagtaacccagatggctgtcttgttcattccatcctacatttctgactcctttcagactcaacacagttcccttcttagtgaccaaaatggtggcctactggctggtctagctgacagtggtacttagcaaaggccactgtttccatagtgaccagctgatacctcttcctgccctctagtgtgcaattgggtgttgcctcagtttcctcccagctcagttttattagatcaaagctgttgttgggcaccaggttggccacctcaatcaccagccaagatggttgctttgtccaccagaggtcaagttcacctctctggtgctgtagttcccagctccttcctgatttttctaatcgctccttctggggaacaggaagttgatattgccatggtggcggggtatgccgtcacctcagtagttttactgtaaaagggaaatttgaacaacaaaaaccaaaaaaaataaaaataaaaaacttcaaaagttgacaagaa

SEQ ID NO: 130131 - DNA, 4880 bp, Homo sapiens
  Payload ID: 5465
  Gene Symbol: EGF
  Gene Name: epidermal growth factor
  Uniprot ID: P01133
  ENST ID: ENST00000265171
  CDS Start-End: 446-4069
gaaactgttgggagaggaatcgtatctccatatttcttctttcagccccaatccaagggttgtagctggaactttccatcagttcttcctttctttttcctctctaagcctttgccttgctctgtcacagtgaagtcagccagagcagggctgttaaactctgtgaaatttgtcataagggtgtcaggtatttcttactggcttccaaagaaacatagataaagaaatctttcctgtggcttcccttggcaggctgcattcagaaggtctctcagttgaagaaagagcttggaggacaacagcacaacaggagagtaaaagatgccccagggctgaggcctccgctcaggcagccgcatctggggtcaatcatactcaccttgcccgggccatgctccagcaaaatcaagctgttttcttttgaaagttcaaactcatcaagattatgctgctcactcttatcattctgttgccagtagtttcaaaatttagttttgttagtctctcagcaccgcagcactggagctgtcctgaaggtactctcgcaggaaatgggaattctacttgtgtgggtcctgcacccttcttaattttctcccatggaaatagtatctttaggattgacacagaaggaaccaattatgagcaattggtggtggatgctggtgtctcagtgatcatggattttcattataatgagaaaagaatctattgggtggatttagaaagacaacttttgcaaagagtttttctgaatgggtcaaggcaagagagagtatgtaatatagagaaaaatgtttctggaatggcaataaattggataaatgaagaagttatttggtcaaatcaacaggaaggaatcattacagtaacagatatgaaaggaaataattcccacattcttttaagtgctttaaaatatcctgcaaatgtagcagttgatccagtagaaaggtttatattttggtcttcagaggtggctggaagcctttatagagcagatctcgatggtgtgggagtgaaggctctgttggagacatcagagaaaataacagctgtgtcattggatgtgcttgataagcggctgttttggattcagtacaacagagaaggaagcaattctcttatttgctcctgtgattatgatggaggttctgtccacattagtaaacatccaacacagcataatttgtttgcaatgtccctttttggtgaccgtatcttctattcaacatggaaaatgaagacaatttggatagccaacaaacacactggaaaggacatggttagaattaacctccattcatcatttgtaccacttggtgaactgaaagtagtgcatccacttgcacaacccaaggcagaagatgacacttgggagcctgagcagaaactttgcaaattgaggaaaggaaactgcagcagcactgtgtgtgggcaagacctccagtcacacttgtgcatgtgtgcagagggatacgccctaagtcgagaccggaagtactgtgaagatgttaatgaatgtgctttttggaatcatggctgtactcttgggtgtaaaaacacccctggatcctattactgcacgtgccctgtaggatttgttctgcttcctgatgggaaacgatgtcatcaacttgtttcctgtccacgcaatgtgtctgaatgcagccatgactgtgttctgacatcagaaggtcccttatgtttctgtcctgaaggctcagtgcttgagagagatgggaaaacatgtagcggttgttcctcacccgataatggtggatgtagccagctctgcgttcctcttagcccagtatcctgggaatgtgattgctttcctgggtatgacctacaactggatgaaaaaagctgtgcagcttcaggaccacaaccatttttgctgtttgccaattctcaagatattcgacacatgcattttgatggaacagactatggaactctgctcagccagcagatgggaatggtttatgccctagatcatgaccctgtggaaaataagatatactttgcccatacagccctgaagtggatagagagagctaatatggatggttcccagcgagaaaggcttattgaggaaggagtagatgtgccagaaggtcttgctgtggactggattggccgtagattctattggacagacagagggaaatctctgattggaaggagtgatttaaatgggaaacgttccaaaataatcactaaggagaacatctctcaaccacgaggaattgctgttcatccaatggccaagagattattctggactgatacagggattaatccacgaattgaaagttcttccctccaaggccttggccgtctggttatagccagctctgatctaatctggcccagtggaataacgattgacttcttaactgacaagttgtactggtgcgatgccaagcagtctgtgattgaaatggccaatctggatggttcaaaacgccgaagacttacccagaatgatgtaggtcacccatttgctgtagcagtgtttgaggattatgtgtggttctcagattgggctatgccatcagtaatgagagtaaacaagaggactggcaaagatagagtacgtctccaaggcagcatgctgaagccctcatcactggttgtggttcatccattggcaaaaccaggagcagatccctgcttatatcaaaacggaggctgtgaacatatttgcaaaaagaggcttggaactgcttggtgttcgtgtcgtgaaggttttatgaaagcctcagatgggaaaacgtgtctggctctggatggtcatcagctgttggcaggtggtgaagttgatctaaagaaccaagtaacaccattggacatcttgtccaagactagagtgtcagaagataacattacagaatctcaacacatgctagtggctgaaatcatggtgtcagatcaagatgactgtgctcctgtgggatgcagcatgtatgctcggtgtatttcagagggagaggatgccacatgtcagtgtttgaaaggatttgctggggatggaaaactatgttctgatatagatgaatgtgagatgggtgtcccagtgtgcccccctgcctcctccaagtgcatcaacaccgaaggtggttatgtctgccggtgctcagaaggctaccaaggagatgggattcactgtcttgatattgatgagtgccaactgggggagcacagctgtggagagaatgccagctgcacaaatacagagggaggctatacctgcatgtgtgctggacgcctgtctgaaccaggactgatttgccctgactctactccaccccctcacctcagggaagatgaccaccactattccgtaagaaatagtgactctgaatgtcccctgtcccacgatgggtactgcctccatgatggtgtgtgcatgtatattgaagcattggacaagtatgcatgcaactgtgttgttggctacatcggggagcgatgtcagtaccgagacctgaagtggtgggaactgcgccacgctggccacgggcagcagcagaaggtcatcgtggtggctgtctgcgtggtggtgcttgtcatgctgctcctcctgagcctgtggggggcccactactacaggactcagaagctgctatcgaaaaacccaaagaatccttatgaggagtcgagcagagatgtgaggagtcgcaggcctgctgacactgaggatgggatgtcctcttgccctcaaccttggtttgtggttataaaagaacaccaagacctcaagaatgggggtcaaccagtggctggtgaggatggccaggcagcagatgggtcaatgcaaccaacttcatggaggcaggagccccagttatgtggaatgggcacagagcaaggctgctggattccagtatccagtgataagggctcctgtccccaggtaatggagcgaagctttcatatgccctcctatgggacacagacccttgaagggggtgtcgagaagccccattctctcctatcagctaacccattatggcaacaaagggccctggacccaccacaccaaatggagctgactcagtgaaaactggaattaaaaggaaagtcaagaagaatgaactatgtcgatgcacagtatcttttctttcaaaagtagagcaaaactataggttttggttccacaatctctacgactaatcacctactcaatgcctggagacagatacgtagttgtgcttttgtttgctcttttaagcagtctcactgcagtcttatttccaagtaagagtactgggagaatcactaggtaacttattagaaacccaaattgggacaacagtgctttgtaaattgtgttgtcttcagcagtcaatacaaatagatttttgtttttgttgttcctgcagccccagaagaaattaggggttaaagcagacagtcacactggtttggtcagttacaaagtaatttctttgatctggacagaacatttatatcagtttcatgaaatgattggaatattacaataccgttaagatacagtgtaggcatttaactcctcattggcgtggtccatgctgatgattttgcaaaatgagttgtgatgaatcaatgaaaaatgtaatttagaaactgatttcttcagaattagatggcttattttttaaaatatttgaatgaaaacattttatttttaaaatattacacaggaggcttcggagtttcttagtcattactgtccttttcccctacagaattttccctcttggtgtgattgcacagaatttgtatgtattttcagttacaagattgtaagtaaattgcctgatttgttttcattatagacaacgatgaatttcttctaattatttaaataaaatcaccaaaaacataaa

SEQ ID NO: 130132 - DNA, 3642 bp, Homo sapiens
  Payload ID: 5465
  Gene Symbol: EGF
  Gene Name: epidermal growth factor
  Uniprot ID: P01133
  ENST ID: ENST00000503392
  CDS Start-End: 96-3596
cagccgcatctggggtcaatcatactcaccttgcccgggccatgctccagcaaaatcaagctgttttcttttgaaagttcaaactcatcaagattatgctgctcactcttatcattctgttgccagtagtttcaaaatttagttttgttagtctctcagcaccgcagcactggagctgtcctgaaggtactctcgcaggaaatgggaattctacttgtgtgggtcctgcacccttcttaattttctcccatggaaatagtatctttaggattgacacagaaggaaccaattatgagcaattggtggtggatgctggtgtctcagtgatcatggattttcattataatgagaaaagaatctattgggtggatttagaaagacaacttttgcaaagagtttttctgaatgggtcaaggcaagagagagtatgtaatatagagaaaaatgtttctggaatggcaataaattggataaatgaagaagttatttggtcaaatcaacaggaaggaatcattacagtaacagatatgaaaggaaataattcccacattcttttaagtgctttaaaatatcctgcaaatgtagcagttgatccagtagaaaggtttatattttggtcttcagaggtggctggaagcctttatagagcagatctcgatggtgtgggagtgaaggctctgttggagacatcagagaaaataacagctgtgtcattggatgtgcttgataagcggctgttttggattcagtacaacagagaaggaagcaattctcttatttgctcctgtgattatgatggaggttctgtccacattagtaaacatccaacacagcataatttgtttgcaatgtccctttttggtgaccgtatcttctattcaacatggaaaatgaagacaatttggatagccaacaaacacactggaaaggacatggttagaattaacctccattcatcatttgtaccacttggtgaactgaaagtagtgcatccacttgcacaacccaaggcagaagatgacacttgggagcctgagcagaaactttgcaaattgaggaaaggaaactgcagcagcactgtgtgtgggcaagacctccagtcacacttgtgcatgtgtgcagagggatacgccctaagtcgagaccggaagtactgtgaagatgttaatgaatgtgctttttggaatcatggctgtactcttgggtgtaaaaacacccctggatcctattactgcacgtgccctgtaggatttgttctgcttcctgatgggaaacgatgtcatcaacttgtttcctgtccacgcaatgtgtctgaatgcagccatgactgtgttctgacatcagaaggtcccttatgtttctgtcctgaaggctcagtgcttgagagagatgggaaaacatgtagcggttgttcctcacccgataatggtggatgtagccagctctgcgttcctcttagcccagtatcctgggaatgtgattgctttcctgggtatgacctacaactggatgaaaaaagctgtgcagcttcaggaccacaaccatttttgctgtttgccaattctcaagatattcgacacatgcattttgatggaacagactatggaactctgctcagccagcagatgggaatggtttatgccctagatcatgaccctgtggaaaataagatatactttgcccatacagccctgaagtggatagagagagctaatatggatggttcccagcgagaaaggcttattgaggaaggagtagatgtgccagaaggtcttgctgtggactggattggccgtagattctattggacagacagagggaaatctctgattggaaggagtgatttaaatgggaaacgttccaaaataatcactaaggagaacatctctcaaccacgaggaattgctgttcatccaatggccaagagattattctggactgatacagggattaatccacgaattgaaagttcttccctccaaggccttggccgtctggttatagccagctctgatctaatctggcccagtggaataacgattgacttcttaactgacaagttgtactggtgcgatgccaagcagtctgtgattgaaatggccaatctggatggttcaaaacgccgaagacttacccagaatgatgtaggtcacccatttgctgtagcagtgtttgaggattatgtgtggttctcagattgggctatgccatcagtaatgagagtaaacaagaggactggcaaagatagagtacgtctccaaggcagcatgctgaagccctcatcactggttgtggttcatccattggcaaaaccaggagcagatccctgcttatatcaaaacggaggctgtgaacatatttgcaaaaagaggcttggaactgcttggtgttcgtgtcgtgaaggttttatgaaagcctcagatgggaaaacgtgtctggctctggatggtcatcagctgttggcaggtggtgaagttgatctaaagaaccaagtaacaccattggacatcttgtccaagactagagtgtcagaagataacattacagaatctcaacacatgctagtggctgaaatcatggtgtcagatcaagatgactgtgctcctgtgggatgcagcatgtatgctcggtgtatttcagagggagaggatgccacatgtcagtgtttgaaaggatttgctggggatggaaaactatgttctgatatagatgaatgtgagatgggtgtcccagtgtgcccccctgcctcctccaagtgcatcaacaccgaaggtggttatgtctgccggtgctcagaaggctaccaaggagatgggattcactgtcttgactctactccaccccctcacctcagggaagatgaccaccactattccgtaagaaatagtgactctgaatgtcccctgtcccacgatgggtactgcctccatgatggtgtgtgcatgtatattgaagcattggacaagtatgcatgcaactgtgttgttggctacatcggggagcgatgtcagtaccgagacctgaagtggtgggaactgcgccacgctggccacgggcagcagcagaaggtcatcgtggtggctgtctgcgtggtggtgcttgtcatgctgctcctcctgagcctgtggggggcccactactacaggactcagaagctgctatcgaaaaacccaaagaatccttatgaggagtcgagcagagatgtgaggagtcgcaggcctgctgacactgaggatgggatgtcctcttgccctcaaccttggtttgtggttataaaagaacaccaagacctcaagaatgggggtcaaccagtggctggtgaggatggccaggcagcagatgggtcaatgcaaccaacttcatggaggcaggagccccagttatgtggaatgggcacagagcaaggctgctggattccagtatccagtgataagggctcctgtccccaggtaatggagcgaagctttcatatgccctcctatgggacacagacccttgaagggggtgtcgagaagccccattctctcctatcagctaacccattatggcaacaaagggccctggacccaccacaccaaatggagctgactcagtgaaaactggaattaaaaggaaagtcaagaagaatgaactatgtcgatg

SEQ ID NO: 130133 - DNA, 4489 bp, Homo sapiens
  Payload ID: 5465
  Gene Symbol: EGF
  Gene Name: epidermal growth factor
  Uniprot ID: P01133
  ENST ID: ENST00000509793
  CDS Start-End: 453-3950
aaaaagagaaactgttgggagaggaatcgtatctccatatttcttctttcagccccaatccaagggttgtagctggaactttccatcagttcttcctttctttttcctctctaagcctttgccttgctctgtcacagtgaagtcagccagagcagggctgttaaactctgtgaaatttgtcataagggtgtcaggtatttcttactggcttccaaagaaacatagataaagaaatctttcctgtggcttcccttggcaggctgcattcagaaggtctctcagttgaagaaagagcttggaggacaacagcacaacaggagagtaaaagatgccccagggctgaggcctccgctcaggcagccgcatctggggtcaatcatactcaccttgcccgggccatgctccagcaaaatcaagctgttttcttttgaaagttcaaactcatcaagattatgctgctcactcttatcattctgttgccagtagtttcaaaatttagttttgttagtctctcagcaccgcagcactggagctgtcctgaaggtactctcgcaggaaatgggaattctacttgtgtgggtcctgcacccttcttaattttctcccatggaaatagtatctttaggattgacacagaaggaaccaattatgagcaattggtggtggatgctggtgtctcagtgatcatggattttcattataatgagaaaagaatctattgggtggatttagaaagacaacttttgcaaagagtttttctgaatgggtcaaggcaagagagagtatgtaatatagagaaaaatgtttctggaatggcaataaattggataaatgaagaagttatttggtcaaatcaacaggaaggaatcattacagtaacagatatgaaaggaaataattcccacattcttttaagtgctttaaaatatcctgcaaatgtagcagttgatccagtagaaaggtttatattttggtcttcagaggtggctggaagcctttatagagcagatctcgatggtgtgggagtgaaggctctgttggagacatcagagaaaataacagctgtgtcattggatgtgcttgataagcggctgttttggattcagtacaacagagaaggaagcaattctcttatttgctcctgtgattatgatggaggttctgtccacattagtaaacatccaacacagcataatttgtttgcaatgtccctttttggtgaccgtatcttctattcaacatggaaaatgaagacaatttggatagccaacaaacacactggaaaggacatggttagaattaacctccattcatcatttgtaccacttggtgaactgaaagtagtgcatccacttgcacaacccaaggcagaagatgacacttgggagcctgatgttaatgaatgtgctttttggaatcatggctgtactcttgggtgtaaaaacacccctggatcctattactgcacgtgccctgtaggatttgttctgcttcctgatgggaaacgatgtcatcaacttgtttcctgtccacgcaatgtgtctgaatgcagccatgactgtgttctgacatcagaaggtcccttatgtttctgtcctgaaggctcagtgcttgagagagatgggaaaacatgtagcggttgttcctcacccgataatggtggatgtagccagctctgcgttcctcttagcccagtatcctgggaatgtgattgctttcctgggtatgacctacaactggatgaaaaaagctgtgcagcttcaggaccacaaccatttttgctgtttgccaattctcaagatattcgacacatgcattttgatggaacagactatggaactctgctcagccagcagatgggaatggtttatgccctagatcatgaccctgtggaaaataagatatactttgcccatacagccctgaagtggatagagagagctaatatggatggttcccagcgagaaaggcttattgaggaaggagtagatgtgccagaaggtcttgctgtggactggattggccgtagattctattggacagacagagggaaatctctgattggaaggagtgatttaaatgggaaacgttccaaaataatcactaaggagaacatctctcaaccacgaggaattgctgttcatccaatggccaagagattattctggactgatacagggattaatccacgaattgaaagttcttccctccaaggccttggccgtctggttatagccagctctgatctaatctggcccagtggaataacgattgacttcttaactgacaagttgtactggtgcgatgccaagcagtctgtgattgaaatggccaatctggatggttcaaaacgccgaagacttacccagaatgatgtaggtcacccatttgctgtagcagtgtttgaggattatgtgtggttctcagattgggctatgccatcagtaatgagagtaaacaagaggactggcaaagatagagtacgtctccaaggcagcatgctgaagccctcatcactggttgtggttcatccattggcaaaaccaggagcagatccctgcttatatcaaaacggaggctgtgaacatatttgcaaaaagaggcttggaactgcttggtgttcgtgtcgtgaaggttttatgaaagcctcagatgggaaaacgtgtctggctctggatggtcatcagctgttggcaggtggtgaagttgatctaaagaaccaagtaacaccattggacatcttgtccaagactagagtgtcagaagataacattacagaatctcaacacatgctagtggctgaaatcatggtgtcagatcaagatgactgtgctcctgtgggatgcagcatgtatgctcggtgtatttcagagggagaggatgccacatgtcagtgtttgaaaggatttgctggggatggaaaactatgttctgatatagatgaatgtgagatgggtgtcccagtgtgcccccctgcctcctccaagtgcatcaacaccgaaggtggttatgtctgccggtgctcagaaggctaccaaggagatgggattcactgtcttgatattgatgagtgccaactgggggagcacagctgtggagagaatgccagctgcacaaatacagagggaggctatacctgcatgtgtgctggacgcctgtctgaaccaggactgatttgccctgactctactccaccccctcacctcagggaagatgaccaccactattccgtaagaaatagtgactctgaatgtcccctgtcccacgatgggtactgcctccatgatggtgtgtgcatgtatattgaagcattggacaagtatgcatgcaactgtgttgttggctacatcggggagcgatgtcagtaccgagacctgaagtggtgggaactgcgccacgctggccacgggcagcagcagaaggtcatcgtggtggctgtctgcgtggtggtgcttgtcatgctgctcctcctgagcctgtggggggcccactactacaggactcagaagctgctatcgaaaaacccaaagaatccttatgaggagtcgagcagagatgtgaggagtcgcaggcctgctgacactgaggatgggatgtcctcttgccctcaaccttggtttgtggttataaaagaacaccaagacctcaagaatgggggtcaaccagtggctggtgaggatggccaggcagcagatgggtcaatgcaaccaacttcatggaggcaggagccccagttatgtggaatgggcacagagcaaggctgctggattccagtatccagtgataagggctcctgtccccaggtaatggagcgaagctttcatatgccctcctatgggacacagacccttgaagggggtgtcgagaagccccattctctcctatcagctaacccattatggcaacaaagggccctggacccaccacaccaaatggagctgactcagtgaaaactggaattaaaaggaaagtcaagaagaatgaactatgtcgatgcacagtatcttttctttcaaaagtagagcaaaactataggttttggttccacaatctctacgactaatcacctactcaatgcctggagacagatacgtagttgtgcttttgtttgctcttttaagcagtctcactgcagtcttatttccaagtaagagtactgggagaatcactaggtaacttattagaaacccaaattgggacaacagtgctttgtaaattgtgttgtcttcagcagtcaatacaaatagatttttgtttttgttgttcctgcagccccagaagaaattaggggttaaagcagacagtcacactggtttggtcagttacaaagtaatttctttgatctggacagaacatttatatcagtttcatgaaatgattggaatattacaataccgttaagatacagtgtaggcatttaactcctcattggcgtggtccatgctgatgattttgcaaaatgagttgtgatgaatcaatgaaaaatgta

SEQ ID NO: 130134 - DNA, 9821 bp, Homo sapiens
  Payload ID: 5466
  Gene Symbol: EGFR
  Gene Name: epidermal growth factor receptor
  Uniprot ID: P00533
  ENST ID: ENST00000275493
  CDS Start-End: 178-3810
gccggagtcccgagctagccccggcggccgccgccgcccagaccggacgacaggccacctcgtcggcgtccgcccgagtccccgcctcgccgccaacgccacaaccaccgcgcacggccccctgactccgtccagtattgatcgggagagccggagcgagctcttcggggagcagcgatgcgaccctccgggacggccggggcagcgctcctggcgctgctggctgcgctctgcccggcgagtcgggctctggaggaaaagaaagtttgccaaggcacgagtaacaagctcacgcagttgggcacttttgaagatcattttctcagcctccagaggatgttcaataactgtgaggtggtccttgggaatttggaaattacctatgtgcagaggaattatgatctttccttcttaaagaccatccaggaggtggctggttatgtcctcattgccctcaacacagtggagcgaattcctttggaaaacctgcagatcatcagaggaaatatgtactacgaaaattcctatgccttagcagtcttatctaactatgatgcaaataaaaccggactgaaggagctgcccatgagaaatttacaggaaatcctgcatggcgccgtgcggttcagcaacaaccctgccctgtgcaacgtggagagcatccagtggcgggacatagtcagcagtgactttctcagcaacatgtcgatggacttccagaaccacctgggcagctgccaaaagtgtgatccaagctgtcccaatgggagctgctggggtgcaggagaggagaactgccagaaactgaccaaaatcatctgtgcccagcagtgctccgggcgctgccgtggcaagtcccccagtgactgctgccacaaccagtgtgctgcaggctgcacaggcccccgggagagcgactgcctggtctgccgcaaattccgagacgaagccacgtgcaaggacacctgccccccactcatgctctacaaccccaccacgtaccagatggatgtgaaccccgagggcaaatacagctttggtgccacctgcgtgaagaagtgtccccgtaattatgtggtgacagatcacggctcgtgcgtccgagcctgtggggccgacagctatgagatggaggaagacggcgtccgcaagtgtaagaagtgcgaagggccttgccgcaaagtgtgtaacggaataggtattggtgaatttaaagactcactctccataaatgctacgaatattaaacacttcaaaaactgcacctccatcagtggcgatctccacatcctgccggtggcatttaggggtgactccttcacacatactcctcctctggatccacaggaactggatattctgaaaaccgtaaaggaaatcacagggtttttgctgattcaggcttggcctgaaaacaggacggacctccatgcctttgagaacctagaaatcatacgcggcaggaccaagcaacatggtcagttttctcttgcagtcgtcagcctgaacataacatccttgggattacgctccctcaaggagataagtgatggagatgtgataatttcaggaaacaaaaatttgtgctatgcaaatacaataaactggaaaaaactgtttgggacctccggtcagaaaaccaaaattataagcaacagaggtgaaaacagctgcaaggccacaggccaggtctgccatgccttgtgctcccccgagggctgctggggcccggagcccagggactgcgtctcttgccggaatgtcagccgaggcagggaatgcgtggacaagtgcaaccttctggagggtgagccaagggagtttgtggagaactctgagtgcatacagtgccacccagagtgcctgcctcaggccatgaacatcacctgcacaggacggggaccagacaactgtatccagtgtgcccactacattgacggcccccactgcgtcaagacctgcccggcaggagtcatgggagaaaacaacaccctggtctggaagtacgcagacgccggccatgtgtgccacctgtgccatccaaactgcacctacggatgcactgggccaggtcttgaaggctgtccaacgaatgggcctaagatcccgtccatcgccactgggatggtgggggccctcctcttgctgctggtggtggccctggggatcggcctcttcatgcgaaggcgccacatcgttcggaagcgcacgctgcggaggctgctgcaggagagggagcttgtggagcctcttacacccagtggagaagctcccaaccaagctctcttgaggatcttgaaggaaactgaattcaaaaagatcaaagtgctgggctccggtgcgttcggcacggtgtataagggactctggatcccagaaggtgagaaagttaaaattcccgtcgctatcaaggaattaagagaagcaacatctccgaaagccaacaaggaaatcctcgatgaagcctacgtgatggccagcgtggacaacccccacgtgtgccgcctgctgggcatctgcctcacctccaccgtgcagctcatcacgcagctcatgcccttcggctgcctcctggactatgtccgggaacacaaagacaatattggctcccagtacctgctcaactggtgtgtgcagatcgcaaagggcatgaactacttggaggaccgtcgcttggtgcaccgcgacctggcagccaggaacgtactggtgaaaacaccgcagcatgtcaagatcacagattttgggctggccaaactgctgggtgcggaagagaaagaataccatgcagaaggaggcaaagtgcctatcaagtggatggcattggaatcaattttacacagaatctatacccaccagagtgatgtctggagctacggggtgactgtttgggagttgatgacctttggatccaagccatatgacggaatccctgccagcgagatctcctccatcctggagaaaggagaacgcctccctcagccacccatatgtaccatcgatgtctacatgatcatggtcaagtgctggatgatagacgcagatagtcgcccaaagttccgtgagttgatcatcgaattctccaaaatggcccgagacccccagcgctaccttgtcattcagggggatgaaagaatgcatttgccaagtcctacagactccaacttctaccgtgccctgatggatgaagaagacatggacgacgtggtggatgccgacgagtacctcatcccacagcagggcttcttcagcagcccctccacgtcacggactcccctcctgagctctctgagtgcaaccagcaacaattccaccgtggcttgcattgatagaaatgggctgcaaagctgtcccatcaaggaagacagcttcttgcagcgatacagctcagaccccacaggcgccttgactgaggacagcatagacgacaccttcctcccagtgcctgaatacataaaccagtccgttcccaaaaggcccgctggctctgtgcagaatcctgtctatcacaatcagcctctgaaccccgcgcccagcagagacccacactaccaggacccccacagcactgcagtgggcaaccccgagtatctcaacactgtccagcccacctgtgtcaacagcacattcgacagccctgcccactgggcccagaaaggcagccaccaaattagcctggacaaccctgactaccagcaggacttctttcccaaggaagccaagccaaatggcatctttaagggctccacagctgaaaatgcagaatacctaagggtcgcgccacaaagcagtgaatttattggagcatgaccacggaggatagtatgagccctaaaaatccagactctttcgatacccaggaccaagccacagcaggtcctccatcccaacagccatgcccgcattagctcttagacccacagactggttttgcaacgtttacaccgactagccaggaagtacttccacctcgggcacattttgggaagttgcattcctttgtcttcaaactgtgaagcatttacagaaacgcatccagcaagaatattgtccctttgagcagaaatttatctttcaaagaggtatatttgaaaaaaaaaaaaagtatatgtgaggatttttattgattggggatcttggagtttttcattgtcgctattgatttttacttcaatgggctcttccaacaaggaagaagcttgctggtagcacttgctaccctgagttcatccaggcccaactgtgagcaaggagcacaagccacaagtcttccagaggatgcttgattccagtggttctgcttcaaggcttccactgcaaaacactaaagatccaagaaggccttcatggccccagcaggccggatcggtactgtatcaagtcatggcaggtacagtaggataagccactctgtcccttcctgggcaaagaagaaacggaggggatggaattcttccttagacttacttttgtaaaaatgtccccacggtacttactccccactgatggaccagtggtttccagtcatgagcgttagactgacttgtttgtcttccattccattgttttgaaactcagtatgctgcccctgtcttgctgtcatgaaatcagcaagagaggatgacacatcaaataataactcggattccagcccacattggattcatcagcatttggaccaatagcccacagctgagaatgtggaatacctaaggatagcaccgcttttgttctcgcaaaaacgtatctcctaatttgaggctcagatgaaatgcatcaggtcctttggggcatagatcagaagactacaaaaatgaagctgctctgaaatctcctttagccatcaccccaaccccccaaaattagtttgtgttacttatggaagatagttttctccttttacttcacttcaaaagctttttactcaaagagtatatgttccctccaggtcagctgcccccaaaccccctccttacgctttgtcacacaaaaagtgtctctgccttgagtcatctattcaagcacttacagctctggccacaacagggcattttacaggtgcgaatgacagtagcattatgagtagtgtggaattcaggtagtaaatatgaaactagggtttgaaattgataatgctttcacaacatttgcagatgttttagaaggaaaaaagttccttcctaaaataatttctctacaattggaagattggaagattcagctagttaggagcccaccttttttcctaatctgtgtgtgccctgtaacctgactggttaacagcagtcctttgtaaacagtgttttaaactctcctagtcaatatccaccccatccaatttatcaaggaagaaatggttcagaaaatattttcagcctacagttatgttcagtcacacacacatacaaaatgttccttttgcttttaaagtaatttttgactcccagatcagtcagagcccctacagcattgttaagaaagtatttgatttttgtctcaatgaaaataaaactatattcatttccactctattatgctctcaaatacccctaagcatctatactagcctggtatgggtatgaaagatacaaagataaataaaacatagtccctgattctaagaaattcacaatttagcaaaggaaatggactcatagatgctaaccttaaaacaacgtgacaaatgccagacaggacccatcagccaggcactgtgagagcacagagcagggaggttgggtcctgcctgaggagacctggaagggaggcctcacaggaggatgaccaggtctcagtcagcggggaggtggaaagtgcaggtgcatcaggggcaccctgaccgaggaaacagctgccagaggcctccactgctaaagtccacataaggctgaggtcagtcaccctaaacaacctgctccctctaagccaggggatgagcttggagcatcccacaagttccctaaaagttgcagcccccagggggattttgagctatcatctctgcacatgcttagtgagaagactacacaacatttctaagaatctgagattttatattgtcagttaaccactttcattattcattcacctcaggacatgcagaaatatttcagtcagaactgggaaacagaaggacctacattctgctgtcacttatgtgtcaagaagcagatgatcgatgaggcaggtcagttgtaagtgagtcacattgtagcattaaattctagtatttttgtagtttgaaacagtaacttaataaaagagcaaaagctattctagctttcttcttcatattttaattttccaccataaagtttagttgctaaattctattaattttaagattgtgcttcccaaaatagttctcacttcatctgtccagggaggcacagttctgtctggtagaagccgcaaagcccttagcctcttcacggatctggcgactgtgatgggcaggtcaggagaggagctgcccaaagtcccatgattttcacctaacagccctgatcagtcagtactcaaagcttggactccatccctgaaggtcttcctgattgatagcctggccttaataccctacagaaagcctgtccattggctgtttcttcctcagtcagttcctggaagaccttaccccatgaccccagcttcagatgtggtctttggaaacagaggtcgaaggaaagtaaggagctgagagctcacattcataggtgccgccagccttcgtgcatcttcttgcatcatctctaaggagctcctctaattacaccatgcccgtcaccccatgagggatcagagaagggatgagtcttctaaactctatattcgctgtgagtccaggttgtaagggggagcactgtggatgcatcctattgcactccagctgatgacaccaaagcttaggtgtttgctgaaagttcttgatgttgtgacttaccacccctgcctcacaactgcagacataaggggactatggattgcttagcaggaaaggcactggttctcaagggcggctgcccttgggaatcttctggtcccaaccagaaagactgtggcttgattttctcaggtgcagcccagccgtagggccttttcagagcaccccctggttattgcaacattcatcaaagtttctagaacctctggcctaaaggaagggcctggtgggatctacttggcactcgctggggggccaccccccagtgccactctcactaggcctctgattgcacttgtgtaggatgaagctggtgggtgatgggaactcagcacctcccctcaggcagaaaagaatcatctgtggagcttcaaaagaaggggcctggagtctctgcagaccaattcaacccaaatctcgggggctctttcatgattctaatgggcaaccagggttgaaacccttatttctagggtcttcagttgtacaagactgtgggtctgtaccagagcccccgtcagagtagaataaaaggctgggtagggtagagattcccatgtgcagtggagagaacaatctgcagtcactgataagcctgagacttggctcatttcaaaagcgttcaattcatcctcaccagcagttcagctggaaaggggcaaatacccccacctgagctttgaaaacgccctgggaccctctgcattctctaagtaagttatagaaaccagtctcttccctcctttgtgagtgagctgctattccacgtaggcaacacctgttgaaattgccctcaatgtctactctgcatttctttcttgtgataagcacacacttttattgcaacataatgatctgctcacatttccttgcctgggggctgtaaaaccttacagaacagaaatccttgcctctttcaccagccacacctgccataccaggggtacagctttgtactattgaagacacagacaggatttttaaatgtaaatctatttttgtaactttgttgcgggatatagttctctttatgtagcactgaactttgtacaatatatttttagaaactcatttttctactaaaacaaacacagtttactttagagagactgcaatagaatcaaaatttgaaactgaaatctttgtttaaaagggttaagttgaggcaagaggaaagccctttctctctcttataaaaaggcacaacctcattggggagctaagctaggtcattgtcatggtgaagaagagaagcatcgtttttatatttaggaaattttaaaagatgatggaaagcacatttagcttggtctgaggcaggttctgttggggcagtgttaatggaaagggctcactgttgttactactagaaaaatccagttgcatgccatactctcatcatctgccagtgtaaccctgtacatgtaagaaaagcaataacatagcactttgttggtttatatatataatgtgacttcaatgcaaattttatttttatatttacaattgatatgcatttaccagtataaactagacatgtctggagagcctaataatgttcagcacactttggttagttcaccaacagtcttaccaagcctgggcccagccaccctagagaagttattcagccctggctgcagtgacatcacctgaggagcttttaaaagcttgaagcccagctacacctcagaccgattaaacgcaaatctctggggctgaaacccaagcattcgtagtttttaaagctcctgaggtcattccaatgtgcggccaaagttgagaactactggcctagggattagccacaaggacatggacttggaggcaaattctgcaggtgtatgtgattctcaggcctagagagctaagacacaaagacctccacatctgtcgctgagagtcaagaacctgaacagagtttccatgaaggttctccaagcactagaagggagagtgtctaaacaatggttgaaaagcaaaggaaatataaaacagacacctctttccatttcctaaggtttctctctttattaagggtggactagtaataaaatataatattcttgctgcttatgcagctgacattgttgccctccctaaagcaaccaagtagcctttatttcccacagtgaaagaaaacgctggcctatcagttacattacaaaaggcagatttcaagaggattgagtaagtagttggatggctttcataaaaacaagaattcaagaagaggattcatgctttaagaaacatttgttatacattcctcacaaattatacctgggataaaaactatgtagcaggcagtgtgttttccttccatgtctctctgcactacctgcagtgtgtcctctgaggctgcaagtctgtcctatctgaattcccagcagaagcactaagaagctccaccctatcacctagcagataaaactatggggaaaacttaaatctgtgcatacatttctggatgcatttacttatctttaaaaaaaaaggaatcctatgacctgatttggccacaaaaataatcttgctgtacaatacaatctcttggaaattaagagatcctatggatttgatgactggtattagaggtgacaatgtaaccgattaacaacagacagcaataacttcgttttagaaacattcaagcaatagctttatagcttcaacatatggtacgttttaaccttgaaagttttgcaatgatgaaagcagtatttgtacaaatgaaaagcagaattctcttttatatggtttatactgttgatcagaaatgttgattgtgcattgagtattaaaaaattagatgtatattattcattgttctttactcctgagtaccttataataataataatgtattctttgttaacaa

SEQ ID NO: 130135 - DNA, 2239 bp, Homo sapiens
  Payload ID: 5466
  Gene Symbol: EGFR
  Gene Name: epidermal growth factor receptor
  Uniprot ID: P00533
  ENST ID: ENST00000342916
  CDS Start-End: 247-2133
ccccggcgcagcgcggccgcagcagcctccgccccccgcacggtgtgagcgcccgacgcggccgaggcggccggagtcccgagctagccccggcggccgccgccgcccagaccggacgacaggccacctcgtcggcgtccgcccgagtccccgcctcgccgccaacgccacaaccaccgcgcacggccccctgactccgtccagtattgatcgggagagccggagcgagctcttcggggagcagcgatgcgaccctccgggacggccggggcagcgctcctggcgctgctggctgcgctctgcccggcgagtcgggctctggaggaaaagaaagtttgccaaggcacgagtaacaagctcacgcagttgggcacttttgaagatcattttctcagcctccagaggatgttcaataactgtgaggtggtccttgggaatttggaaattacctatgtgcagaggaattatgatctttccttcttaaagaccatccaggaggtggctggttatgtcctcattgccctcaacacagtggagcgaattcctttggaaaacctgcagatcatcagaggaaatatgtactacgaaaattcctatgccttagcagtcttatctaactatgatgcaaataaaaccggactgaaggagctgcccatgagaaatttacaggaaatcctgcatggcgccgtgcggttcagcaacaaccctgccctgtgcaacgtggagagcatccagtggcgggacatagtcagcagtgactttctcagcaacatgtcgatggacttccagaaccacctgggcagctgccaaaagtgtgatccaagctgtcccaatgggagctgctggggtgcaggagaggagaactgccagaaactgaccaaaatcatctgtgcccagcagtgctccgggcgctgccgtggcaagtcccccagtgactgctgccacaaccagtgtgctgcaggctgcacaggcccccgggagagcgactgcctggtctgccgcaaattccgagacgaagccacgtgcaaggacacctgccccccactcatgctctacaaccccaccacgtaccagatggatgtgaaccccgagggcaaatacagctttggtgccacctgcgtgaagaagtgtccccgtaattatgtggtgacagatcacggctcgtgcgtccgagcctgtggggccgacagctatgagatggaggaagacggcgtccgcaagtgtaagaagtgcgaagggccttgccgcaaagtgtgtaacggaataggtattggtgaatttaaagactcactctccataaatgctacgaatattaaacacttcaaaaactgcacctccatcagtggcgatctccacatcctgccggtggcatttaggggtgactccttcacacatactcctcctctggatccacaggaactggatattctgaaaaccgtaaaggaaatcacagggtttttgctgattcaggcttggcctgaaaacaggacggacctccatgcctttgagaacctagaaatcatacgcggcaggaccaagcaacatggtcagttttctcttgcagtcgtcagcctgaacataacatccttgggattacgctccctcaaggagataagtgatggagatgtgataatttcaggaaacaaaaatttgtgctatgcaaatacaataaactggaaaaaactgtttgggacctccggtcagaaaaccaaaattataagcaacagaggtgaaaacagctgcaaggccacaggccaggtctgccatgccttgtgctcccccgagggctgctggggcccggagcccagggactgcgtctcttgccggaatgtcagccgaggcagggaatgcgtggacaagtgcaaccttctggagggtgagccaagggagtttgtggagaactctgagtgcatacagtgccacccagagtgcctgcctcaggccatgaacatcacctgcacaggacggggaccagacaactgtatccagtgtgcccactacattgacggcccccactgcgtcaagacctgcccggcaggagtcatgggagaaaacaacaccctggtctggaagtacgcagacgccggccatgtgtgccacctgtgccatccaaactgcacctacgggtcctaataaatcttcactgtctgactttagtctcccactaaaactgcatttcctttctacaatttcaatttctccctttgcttcaaataaagtcctgacactattcatttga

SEQ ID NO: 130136 - DNA, 2864 bp, Homo sapiens
  Payload ID: 5466
  Gene Symbol: EGFR
  Gene Name: epidermal growth factor receptor
  Uniprot ID: P00533
  ENST ID: ENST00000344576
  CDS Start-End: 246-2363
cccggcgcagcgcggccgcagcagcctccgccccccgcacggtgtgagcgcccgacgcggccgaggcggccggagtcccgagctagccccggcggccgccgccgcccagaccggacgacaggccacctcgtcggcgtccgcccgagtccccgcctcgccgccaacgccacaaccaccgcgcacggccccctgactccgtccagtattgatcgggagagccggagcgagctcttcggggagcagcgatgcgaccctccgggacggccggggcagcgctcctggcgctgctggctgcgctctgcccggcgagtcgggctctggaggaaaagaaagtttgccaaggcacgagtaacaagctcacgcagttgggcacttttgaagatcattttctcagcctccagaggatgttcaataactgtgaggtggtccttgggaatttggaaattacctatgtgcagaggaattatgatctttccttcttaaagaccatccaggaggtggctggttatgtcctcattgccctcaacacagtggagcgaattcctttggaaaacctgcagatcatcagaggaaatatgtactacgaaaattcctatgccttagcagtcttatctaactatgatgcaaataaaaccggactgaaggagctgcccatgagaaatttacaggaaatcctgcatggcgccgtgcggttcagcaacaaccctgccctgtgcaacgtggagagcatccagtggcgggacatagtcagcagtgactttctcagcaacatgtcgatggacttccagaaccacctgggcagctgccaaaagtgtgatccaagctgtcccaatgggagctgctggggtgcaggagaggagaactgccagaaactgaccaaaatcatctgtgcccagcagtgctccgggcgctgccgtggcaagtcccccagtgactgctgccacaaccagtgtgctgcaggctgcacaggcccccgggagagcgactgcctggtctgccgcaaattccgagacgaagccacgtgcaaggacacctgccccccactcatgctctacaaccccaccacgtaccagatggatgtgaaccccgagggcaaatacagctttggtgccacctgcgtgaagaagtgtccccgtaattatgtggtgacagatcacggctcgtgcgtccgagcctgtggggccgacagctatgagatggaggaagacggcgtccgcaagtgtaagaagtgcgaagggccttgccgcaaagtgtgtaacggaataggtattggtgaatttaaagactcactctccataaatgctacgaatattaaacacttcaaaaactgcacctccatcagtggcgatctccacatcctgccggtggcatttaggggtgactccttcacacatactcctcctctggatccacaggaactggatattctgaaaaccgtaaaggaaatcacagggtttttgctgattcaggcttggcctgaaaacaggacggacctccatgcctttgagaacctagaaatcatacgcggcaggaccaagcaacatggtcagttttctcttgcagtcgtcagcctgaacataacatccttgggattacgctccctcaaggagataagtgatggagatgtgataatttcaggaaacaaaaatttgtgctatgcaaatacaataaactggaaaaaactgtttgggacctccggtcagaaaaccaaaattataagcaacagaggtgaaaacagctgcaaggccacaggccaggtctgccatgccttgtgctcccccgagggctgctggggcccggagcccagggactgcgtctcttgccggaatgtcagccgaggcagggaatgcgtggacaagtgcaaccttctggagggtgagccaagggagtttgtggagaactctgagtgcatacagtgccacccagagtgcctgcctcaggccatgaacatcacctgcacaggacggggaccagacaactgtatccagtgtgcccactacattgacggcccccactgcgtcaagacctgcccggcaggagtcatgggagaaaacaacaccctggtctggaagtacgcagacgccggccatgtgtgccacctgtgccatccaaactgcacctacgggccaggaaatgagagtctcaaagccatgttattctgcctttttaaactatcatcctgtaatcaaagtaatgatggcagcgtgtcccaccagagcgggagcccagctgctcaggagtcatgcttaggatggatcccttctcttctgccgtcagagtttcagctgggttggggtggatgcagccacctccatgcctggccttctgcatctgtgatcatcacggcctcctcctgccactgagcctcatgccttcacgtgtctgttccccccgcttttcctttctgccacccctgcacgtgggccgccaggttcccaagagtatcctacccatttccttccttccactccctttgccagtgcctctcaccccaactagtagctaaccatcacccccaggactgacctcttcctcctcgctgccagatgattgttcaaagcacagaatttgtcagaaacctgcagggactccatgctgccagccttctccgtaattagcatggccccagtccatgcttctagccttggttccttctgcccctctgtttgaaattctagagccagctgtgggacaattatctgtgtcaaaagccagatgtgaaaacatctcaataacaaactggctgctttgttcaatgctagaacaacgcctgtcacagagtagaaactcaaaaatatttgctgagtgaatgaacaaatgaataaatgcataataaataattaaccaccaatccaacatccaga

SEQ ID NO: 130137 - DNA, 5464 bp, Homo sapiens
  Payload ID: 5466
  Gene Symbol: EGFR
  Gene Name: epidermal growth factor receptor
  ENST ID: ENST00000454757
  CDS Start-End: 247-3744
ccccggcgcagcgcggccgcagcagcctccgccccccgcacggtgtgagcgcccgacgcggccgaggcggccggagtcccgagctagccccggcggccgccgccgcccagaccggacgacaggccacctcgtcggcgtccgcccgagtccccgcctcgccgccaacgccacaaccaccgcgcacggccccctgactccgtccagtattgatcgggagagccggagcgagctcttcggggagcagcgatgcgaccctccgggacggccggggcagcgctcctggcgctgctggctgcgctctgcccggcgagtcgggctctggaggaaaagaaagtttgccaaggcacgagtaacaagctcacgcagttgggcacttttgaagatcattttctcagcctccagaggatgttcaataactgtgaggtggtccttgggaatttggaaattacctatgtgcagaggaattatgatctttccttcttaaagaccatccaggaggtggctggttatgtcctcattgccctcaacacagtggagcgaattcctttggaaaacctgcagatcatcagaggaaatatgtactacgaaaattcctatgccttagcagtcttatctaactatgatgcaaataaaaccggactgaaggagctgcccatgagaaatttacagggccaaaagtgtgatccaagctgtcccaatgggagctgctggggtgcaggagaggagaactgccagaaactgaccaaaatcatctgtgcccagcagtgctccgggcgctgccgtggcaagtcccccagtgactgctgccacaaccagtgtgctgcaggctgcacaggcccccgggagagcgactgcctggtctgccgcaaattccgagacgaagccacgtgcaaggacacctgccccccactcatgctctacaaccccaccacgtaccagatggatgtgaaccccgagggcaaatacagctttggtgccacctgcgtgaagaagtgtccccgtaattatgtggtgacagatcacggctcgtgcgtccgagcctgtggggccgacagctatgagatggaggaagacggcgtccgcaagtgtaagaagtgcgaagggccttgccgcaaagtgtgtaacggaataggtattggtgaatttaaagactcactctccataaatgctacgaatattaaacacttcaaaaactgcacctccatcagtggcgatctccacatcctgccggtggcatttaggggtgactccttcacacatactcctcctctggatccacaggaactggatattctgaaaaccgtaaaggaaatcacagggtttttgctgattcaggcttggcctgaaaacaggacggacctccatgcctttgagaacctagaaatcatacgcggcaggaccaagcaacatggtcagttttctcttgcagtcgtcagcctgaacataacatccttgggattacgctccctcaaggagataagtgatggagatgtgataatttcaggaaacaaaaatttgtgctatgcaaatacaataaactggaaaaaactgtttgggacctccggtcagaaaaccaaaattataagcaacagaggtgaaaacagctgcaaggccacaggccaggtctgccatgccttgtgctcccccgagggctgctggggcccggagcccagggactgcgtctcttgccggaatgtcagccgaggcagggaatgcgtggacaagtgcaaccttctggagggtgagccaagggagtttgtggagaactctgagtgcatacagtgccacccagagtgcctgcctcaggccatgaacatcacctgcacaggacggggaccagacaactgtatccagtgtgcccactacattgacggcccccactgcgtcaagacctgcccggcaggagtcatgggagaaaacaacaccctggtctggaagtacgcagacgccggccatgtgtgccacctgtgccatccaaactgcacctacggatgcactgggccaggtcttgaaggctgtccaacgaatgggcctaagatcccgtccatcgccactgggatggtgggggccctcctcttgctgctggtggtggccctggggatcggcctcttcatgcgaaggcgccacatcgttcggaagcgcacgctgcggaggctgctgcaggagagggagcttgtggagcctcttacacccagtggagaagctcccaaccaagctctcttgaggatcttgaaggaaactgaattcaaaaagatcaaagtgctgggctccggtgcgttcggcacggtgtataagggactctggatcccagaaggtgagaaagttaaaattcccgtcgctatcaaggaattaagagaagcaacatctccgaaagccaacaaggaaatcctcgatgaagcctacgtgatggccagcgtggacaacccccacgtgtgccgcctgctgggcatctgcctcacctccaccgtgcagctcatcacgcagctcatgcccttcggctgcctcctggactatgtccgggaacacaaagacaatattggctcccagtacctgctcaactggtgtgtgcagatcgcaaagggcatgaactacttggaggaccgtcgcttggtgcaccgcgacctggcagccaggaacgtactggtgaaaacaccgcagcatgtcaagatcacagattttgggctggccaaactgctgggtgcggaagagaaagaataccatgcagaaggaggcaaagtgcctatcaagtggatggcattggaatcaattttacacagaatctatacccaccagagtgatgtctggagctacggggtgactgtttgggagttgatgacctttggatccaagccatatgacggaatccctgccagcgagatctcctccatcctggagaaaggagaacgcctccctcagccacccatatgtaccatcgatgtctacatgatcatggtcaagtgctggatgatagacgcagatagtcgcccaaagttccgtgagttgatcatcgaattctccaaaatggcccgagacccccagcgctaccttgtcattcagggggatgaaagaatgcatttgccaagtcctacagactccaacttctaccgtgccctgatggatgaagaagacatggacgacgtggtggatgccgacgagtacctcatcccacagcagggcttcttcagcagcccctccacgtcacggactcccctcctgagctctctgagtgcaaccagcaacaattccaccgtggcttgcattgatagaaatgggctgcaaagctgtcccatcaaggaagacagcttcttgcagcgatacagctcagaccccacaggcgccttgactgaggacagcatagacgacaccttcctcccagtgcctgaatacataaaccagtccgttcccaaaaggcccgctggctctgtgcagaatcctgtctatcacaatcagcctctgaaccccgcgcccagcagagacccacactaccaggacccccacagcactgcagtgggcaaccccgagtatctcaacactgtccagcccacctgtgtcaacagcacattcgacagccctgcccactgggcccagaaaggcagccaccaaattagcctggacaaccctgactaccagcaggacttctttcccaaggaagccaagccaaatggcatctttaagggctccacagctgaaaatgcagaatacctaagggtcgcgccacaaagcagtgaatttattggagcatgaccacggaggatagtatgagccctaaaaatccagactctttcgatacccaggaccaagccacagcaggtcctccatcccaacagccatgcccgcattagctcttagacccacagactggttttgcaacgtttacaccgactagccaggaagtacttccacctcgggcacattttgggaagttgcattcctttgtcttcaaactgtgaagcatttacagaaacgcatccagcaagaatattgtccctttgagcagaaatttatctttcaaagaggtatatttgaaaaaaaaaaaaagtatatgtgaggatttttattgattggggatcttggagtttttcattgtcgctattgatttttacttcaatgggctcttccaacaaggaagaagcttgctggtagcacttgctaccctgagttcatccaggcccaactgtgagcaaggagcacaagccacaagtcttccagaggatgcttgattccagtggttctgcttcaaggcttccactgcaaaacactaaagatccaagaaggccttcatggccccagcaggccggatcggtactgtatcaagtcatggcaggtacagtaggataagccactctgtcccttcctgggcaaagaagaaacggaggggatggaattcttccttagacttacttttgtaaaaatgtccccacggtacttactccccactgatggaccagtggtttccagtcatgagcgttagactgacttgtttgtcttccattccattgttttgaaactcagtatgctgcccctgtcttgctgtcatgaaatcagcaagagaggatgacacatcaaataataactcggattccagcccacattggattcatcagcatttggaccaatagcccacagctgagaatgtggaatacctaaggatagcaccgcttttgttctcgcaaaaacgtatctcctaatttgaggctcagatgaaatgcatcaggtcctttggggcatagatcagaagactacaaaaatgaagctgctctgaaatctcctttagccatcaccccaaccccccaaaattagtttgtgttacttatggaagatagttttctccttttacttcacttcaaaagctttttactcaaagagtatatgttccctccaggtcagctgcccccaaaccccctccttacgctttgtcacacaaaaagtgtctctgccttgagtcatctattcaagcacttacagctctggccacaacagggcattttacaggtgcgaatgacagtagcattatgagtagtgtggaattcaggtagtaaatatgaaactagggtttgaaattgataatgctttcacaacatttgcagatgttttagaaggaaaaaagttccttcctaaaataatttctctacaattggaagattggaagattcagctagttaggagcccaccttttttcctaatctgtgtgtgccctgtaacctgactggttaacagcagtcctttgtaaacagtgttttaaactctcctagtcaatatccaccccatccaatttatcaaggaagaaatggttcagaaaatattttcagcctacagttatgttcagtcacacacacatacaaaatgttccttttgcttttaaagtaatttttgactcccagatcagtcagagcccctacagcattgttaagaaagtatttgatttttgtctcaatgaaaataaaactatattcatttccactct

SEQ ID NO: 130138 - DNA, 2529 bp, Homo sapiens
  Payload ID: 5466
  Gene Symbol: EGFR
  Gene Name: epidermal growth factor receptor
  ENST ID: ENST00000442591
  CDS Start-End: 161-2134
gccccggcggccgccgccgcccagaccggacgacaggccacctcgtcggcgtccgcccgagtccccgcctcgccgccaacgccacaaccaccgcgcacggccccctgactccgtccagtattgatcgggagagccggagcgagctcttcggggagcagcgatgcgaccctccgggacggccggggcagcgctcctggcgctgctggctgcgctctgcccggcgagtcgggctctggaggaaaagaaagtttgccaaggcacgagtaacaagctcacgcagttgggcacttttgaagatcattttctcagcctccagaggatgttcaataactgtgaggtggtccttgggaatttggaaattacctatgtgcagaggaattatgatctttccttcttaaagaccatccaggaggtggctggttatgtcctcattgccctcaacacagtggagcgaattcctttggaaaacctgcagatcatcagaggaaatatgtactacgaaaattcctatgccttagcagtcttatctaactatgatgcaaataaaaccggactgaaggagctgcccatgagaaatttacaggaaatcctgcatggcgccgtgcggttcagcaacaaccctgccctgtgcaacgtggagagcatccagtggcgggacatagtcagcagtgactttctcagcaacatgtcgatggacttccagaaccacctgggcagctgccaaaagtgtgatccaagctgtcccaatgggagctgctggggtgcaggagaggagaactgccagaaactgaccaaaatcatctgtgcccagcagtgctccgggcgctgccgtggcaagtcccccagtgactgctgccacaaccagtgtgctgcaggctgcacaggcccccgggagagcgactgcctggtctgccgcaaattccgagacgaagccacgtgcaaggacacctgccccccactcatgctctacaaccccaccacgtaccagatggatgtgaaccccgagggcaaatacagctttggtgccacctgcgtgaagaagtgtccccgtaattatgtggtgacagatcacggctcgtgcgtccgagcctgtggggccgacagctatgagatggaggaagacggcgtccgcaagtgtaagaagtgcgaagggccttgccgcaaagtgtgtaacggaataggtattggtgaatttaaagactcactctccataaatgctacgaatattaaacacttcaaaaactgcacctccatcagtggcgatctccacatcctgccggtggcatttaggggtgactccttcacacatactcctcctctggatccacaggaactggatattctgaaaaccgtaaaggaaatcacagggtttttgctgattcaggcttggcctgaaaacaggacggacctccatgcctttgagaacctagaaatcatacgcggcaggaccaagcaacatggtcagttttctcttgcagtcgtcagcctgaacataacatccttgggattacgctccctcaaggagataagtgatggagatgtgataatttcaggaaacaaaaatttgtgctatgcaaatacaataaactggaaaaaactgtttgggacctccggtcagaaaaccaaaattataagcaacagaggtgaaaacagctgcaaggccacaggccaggtctgccatgccttgtgctcccccgagggctgctggggcccggagcccagggactgcgtctcttgccggaatgtcagccgaggcagggaatgcgtggacaagtgcaaccttctggagggtgagccaagggagtttgtggagaactctgagtgcatacagtgccacccagagtgcctgcctcaggccatgaacatcacctgcacaggacggggaccagacaactgtatccagtgtgcccactacattgacggcccccactgcgtcaagacctgcccggcaggagtcatgggagaaaacaacaccctggtctggaagtacgcagacgccggccatgtgtgccacctgtgccatccaaactgcacctacggatgcactgggccaggtcttgaaggctgtccaacgaatggaagctacatagtgtctcactttccaagatcattctacaagatgtcagtgcactgaaacatgcaggggcgtgttgagtgccaaggatcttgacaagttgttttgaagatggcattttgctaagtccctgagggtcactggtcctcaaagcggcatggcggcatggcgtggctggttctgccacatgccagctgtgtgacctctgagactccacttcttcagtgctgaaaataaagaaggagttttactaaggaccaaacaagataatgaatgtgaaactgctccacgaaccccaaagaattatgcacatagatgcgatcattaagatgcgaagccatcgagttaccacctggcatgcttaaactgtaaagagtgggtcaaagtaaactgaattggaaaatccaaagttatgcagaaaaacaataaagaggtcttacgtagcaataccgaac

SEQ ID NO: 130139 - DNA, 691 bp, Homo sapiens
  Payload ID: 5466
  Gene Symbol: EGFR
  Gene Name: epidermal growth factor receptor
  ENST ID: ENST00000450046
  CDS Start-End: 308-691
atcattcctttgggcctaggattgcatttatttccatgacaaaagggcctgtctggtgtttcagcaaatgaaaacaaaaatataaagcccatctccttttgaatgagctctaaaacagttctccactggacttcagaacaagagggagctctgggctgctggctggttgtgcatttgctgtgggttccctccggcaggcgacctctccgcgctgagaaggttatccggataaccaatttgccaaggcacgagtaacaagctcacgcagttgggcacttttgaagatcattttctcagcctccagaggatgttcaataactgtgaggtggtccttgggaatttggaaattacctatgtgcagaggaattatgatctttccttcttaaagaccatccaggaggtggctggttatgtcctcattgccctcaacacagtggagcgaattcctttggaaaacctgcagatcatcagaggaaatatgtactacgaaaattcctatgccttagcagtcttatctaactatgatgcaaataaaaccggactgaaggagctgcccatgagaaatttacaggaaatcctgcatggcgccgtgcggttcagcaacaaccctgccctgtgcaacgtggagagcatccagtggcgggacatagtcagcagtgactttctcagcaacatgtcgatggacttccag

SEQ ID NO: 130140 - DNA, 1570 bp, Homo sapiens
  Payload ID: 5466
  Gene Symbol: EGFR
  Gene Name: epidermal growth factor receptor
  Uniprot ID: P00533
  ENST ID: ENST00000420316
  CDS Start-End: 245-1462
ccggcgcagcgcggccgcagcagcctccgccccccgcacggtgtgagcgcccgacgcggccgaggcggccggagtcccgagctagccccggcggccgccgccgcccagaccggacgacaggccacctcgtcggcgtccgcccgagtccccgcctcgccgccaacgccacaaccaccgcgcacggccccctgactccgtccagtattgatcgggagagccggagcgagctcttcggggagcagcgatgcgaccctccgggacggccggggcagcgctcctggcgctgctggctgcgctctgcccggcgagtcgggctctggaggaaaagaaagtttgccaaggcacgagtaacaagctcacgcagttgggcacttttgaagatcattttctcagcctccagaggatgttcaataactgtgaggtggtccttgggaatttggaaattacctatgtgcagaggaattatgatctttccttcttaaagaccatccaggaggtggctggttatgtcctcattgccctcaacacagtggagcgaattcctttggaaaacctgcagatcatcagaggaaatatgtactacgaaaattcctatgccttagcagtcttatctaactatgatgcaaataaaaccggactgaaggagctgcccatgagaaatttacaggaaatcctgcatggcgccgtgcggttcagcaacaaccctgccctgtgcaacgtggagagcatccagtggcgggacatagtcagcagtgactttctcagcaacatgtcgatggacttccagaaccacctgggcagctgccaaaagtgtgatccaagctgtcccaatgggagctgctggggtgcaggagaggagaactgccagaaactgaccaaaatcatctgtgcccagcagtgctccgggcgctgccgtggcaagtcccccagtgactgctgccacaaccagtgtgctgcaggctgcacaggcccccgggagagcgactgcctggtctgccgcaaattccgagacgaagccacgtgcaaggacacctgccccccactcatgctctacaaccccaccacgtaccagatggatgtgaaccccgagggcaaatacagctttggtgccacctgcgtgaagaagtgtccccgtaattatgtggtgacagatcacggctcgtgcgtccgagcctgtggggccgacagctatgagatggaggaagacggcgtccgcaagtgtaagaagtgcgaagggccttgccgcaaagtgtgtaacggaataggtattggtgaatttaaagactcactctccataaatgctacgaatattaaacacttcaaaaactgcacctccatcagtggcgatctccacatcctgccggtggcatttaggggtgactccttcacacatactcctcctctggatccacaggaactggatattctgaaaaccgtaaaggaaatcacaggtttgagctgaattatcacatgaatataaatgggaaatcagtgttttagagagagaacttttcgacatatttcctgttcccttggaataaaaacatttcttctgaaattttaccgttaa

SEQ ID NO: 130141 - DNA, 3844 bp, Homo sapiens
  Payload ID: 5466
  Gene Symbol: EGFR
  Gene Name: epidermal growth factor receptor
  ENST ID: ENST00000455089
  CDS Start-End: 258-3533
gtccgggcagcccccggcgcagcgcggccgcagcagcctccgccccccgcacggtgtgagcgcccgacgcggccgaggcggccggagtcccgagctagccccggcggccgccgccgcccagaccggacgacaggccacctcgtcggcgtccgcccgagtccccgcctcgccgccaacgccacaaccaccgcgcacggccccctgactccgtccagtattgatcgggagagccggagcgagctcttcggggagcagcgatgcgaccctccgggacggccggggcagcgctcctggcgctgctggctgcgctctgcccggcgagtcgggctctggaggaaaagaaagtttgccaaggcacgagtaacaagctcacgcagttgggcacttttgaagatcattttctcagcctccagaggatgttcaataactgtgaggtggtccttgggaatttggaaattacctatgtgcagaggaattatgatctttccttcttaaagaccatccaggaggtggctggttatgtcctcattgccctcaacacagtggagcgaattcctttggaaaacctgcagatcatcagaggaaatatgtactacgaaaattcctatgccttagcagtcttatctaactatgatgcaaataaaaccggactgaaggagctgcccatgagaaatttacagggccaaaagtgtgatccaagctgtcccaatgggagctgctggggtgcaggagaggagaactgccagaaactgaccaaaatcatctgtgcccagcagtgctccgggcgctgccgtggcaagtcccccagtgactgctgccacaaccagtgtgctgcaggctgcacaggcccccgggagagcgactgcctggtctgccgcaaattccgagacgaagccacgtgcaaggacacctgccccccactcatgctctacaaccccaccacgtaccagatggatgtgaaccccgagggcaaatacagctttggtgccacctgcgtgaagaagtgtccccgtaattatgtggtgacagatcacggctcgtgcgtccgagcctgtggggccgacagctatgagatggaggaagacggcgtccgcaagtgtaagaagtgcgaagggccttgccgcaaagtgtgtaacggaataggtattggtgaatttaaagactcactctccataaatgctacgaatattaaacacttcaaaaactgcacctccatcagtggcgatctccacatcctgccggtggcatttaggggtgactccttcacacatactcctcctctggatccacaggaactggatattctgaaaaccgtaaaggaaatcacagggtttttgctgattcaggcttggcctgaaaacaggacggacctccatgcctttgagaacctagaaatcatacgcggcaggaccaagcaacatggtcagttttctcttgcagtcgtcagcctgaacataacatccttgggattacgctccctcaaggagataagtgatggagatgtgataatttcaggaaacaaaaatttgtgctatgcaaatacaataaactggaaaaaactgtttgggacctccggtcagaaaaccaaaattataagcaacagaggtgaaaacagctgcaaggccacaggccaggtctgccatgccttgtgctcccccgagggctgctggggcccggagcccagggactgcgtctcttgccggaatgtcagccgaggcagggaatgcgtggacaagtgcaaccttctggagggtgagccaagggagtttgtggagaactctgagtgcatacagtgccacccagagtgcctgcctcaggccatgaacatcacctgcacaggacggggaccagacaactgtatccagtgtgcccactacattgacggcccccactgcgtcaagacctgcccggcaggagtcatgggagaaaacaacaccctggtctggaagtacgcagacgccggccatgtgtgccacctgtgccatccaaactgcacctacggatgcactgggccaggtcttgaaggctgtccaacgaatgggcctaagatcccgtccatcgccactgggatggtgggggccctcctcttgctgctggtggtggccctggggatcggcctcttcatgcgaaggcgccacatcgttcggaagcgcacgctgcggaggctgctgcaggagagggagcttgtggagcctcttacacccagtggagaagctcccaaccaagctctcttgaggatcttgaaggaaactgaattcaaaaagatcaaagtgctgggctccggtgcgttcggcacggtgtataagggactctggatcccagaaggtgagaaagttaaaattcccgtcgctatcaaggaattaagagaagcaacatctccgaaagccaacaaggaaatcctcgatgaagcctacgtgatggccagcgtggacaacccccacgtgtgccgcctgctgggcatctgcctcacctccaccgtgcagctcatcacgcagctcatgcccttcggctgcctcctggactatgtccgggaacacaaagacaatattggctcccagtacctgctcaactggtgtgtgcagatcgcaaagggcatgaactacttggaggaccgtcgcttggtgcaccgcgacctggcagccaggaacgtactggtgaaaacaccgcagcatgtcaagatcacagattttgggctggccaaactgctgggtgcggaagagaaagaataccatgcagaaggaggcaaagtgcctatcaagtggatggcattggaatcaattttacacagaatctatacccaccagagtgatgtctggagctacggggtgactgtttgggagttgatgacctttggatccaagccatatgacggaatccctgccagcgagatctcctccatcctggagaaaggagaacgcctccctcagccacccatatgtaccatcgatgtctacatgatcatggtcaagtgctggatgatagacgcagatagtcgcccaaagttccgtgagttgatcatcgaattctccaaaatggcccgagacccccagcgctaccttgtcattcagggggatgaaagaatgcatttgccaagtcctacagactccaacttctaccgtgccctgatggatgaagaagacatggacgacgtggtggatgccgacgagtacctcatcccacagcagggcttcttcagcagcccctccacgtcacggactcccctcctgagctctctgagtgcaaccagcaacaattccaccgtggcttgcattgatagaaatgggctgcaaagctgtcccatcaaggaagacagcttcttgcagcgatacagctcagaccccacaggcgccttgactgaggacagcatagacgacaccttcctcccagtgcctggtgagtggcttgtctggaaacagtcctgctcctcaacctcctcgacccactcagcagcagccagtctccagtgtccaagccaggtgctccctccagcatctccagagggggaaacagtggcagatttgcagacacagtgaagggcgtaaggagcagataaacacatgaccgagcctgcacaagctctttgttgtgtctggttgtttgctgtacctctgttgtaagaatgaatctgcaaaatttctagcttatgaagcaaatcacggacatacacatctgtgtgtgtgagtgttcatgatgtgtgtacatctgtgtatgtgtgtgtgtgtatgtgtgtgtttgtgacagatttgatccctgttctctctgctggctctatcttgacctgtgaaacgtatatttaactaattaaatattagttaatattaataaattttaagctttatccaga

SEQ ID NO: 130142 - DNA, 4736 bp, Homo sapiens
  Payload ID: 5467
  Gene Symbol: EPS15
  Gene Name: epidermal growth factor receptor pathway substrate 15
  ENST ID: ENST00000371730
  CDS Start-End: 11-2299
tggaaacaccatggctgcggcggcccagctctctctgacacagttatcaagtgggaatcctgtatatgaaaaatactatagacaggttgatacaggcaatactggaagggtgttggcttctgatgctgctgctttcctgaaaaaatcagggcttccagacttgatacttggaaagatttgggatttagccgacacagatggcaaaggtatcctgaacaaacaagaattctttgttgctttgcgtcttgtggcatgtgcccagaatggattggaagtttcactaagtagtttgaacctggctgttcctccaccaagatttcatgataccagtagtcctttgctaatcagtggaacctctgcagctgagctcccatgggctgtaaaacctgaagataaggccaaatatgatgcaatatttgatagtttaagcccagtgaatggatttctgtctggtgataaagtgaaaccagtgttgctcaactctaagttacctgtggatatccttggaagagtttgggagttgagtgatattgaccatgatggaatgcttgacagagatgagtttgcagttgccatgtttttggtatactgtgcactggagaaagaacctgtgccaatgtccttgcctccagccttggtgccaccatctaagagaaaaacgtgggttgtatcccctgcagaaaaagctaaatatgatgaaatcttcctgaaaactgataaagatatggacggatttgtgtctggattggaggtccgtgaaatattcttgaaaacaggtttaccttctaccttactagcccatatatggtcattatgcgacacaaaggactgtgggaagctttcaaaggatcagtttgccttggcttttcacttaatcagtcagaagttaatcaagggcattgatcctcctcacgttcttactcctgaaatgattccaccatcagacagggccagtttacaaaagaacatcataggatcaagtcctgttgcagatttctctgctattaaggaactagatactcttaacaatgaaatagttgacctacagagggaaaagaataatgtggaacaggaccttaaggagaaggaagatactattaaacagaggacaagtgaggttcaggatcttcaagatgaagttcaaagggagaatactaatctgcaaaaactacaggcccagaaacagcaggtacaggaactccttgatgaactggatgagcagaaagcccagctggaggagcaactcaaggaagtcagaaagaaatgtgctgaggaggcccaactggcaagaagtagtcctgaactactgccttctggtgtgactgatgaaaatgaggtgactacagctgttactgaaaaagtttgttctgaactcgacaataatagacattcaaaagaggaagatccatttaatgtagactcaagttcgctgacaggtccagttgcagatacaaacttggattttttccagtctgatccttttgttggcagtgatcctttcaaggatgatccttttggaaaaatcgatccatttggtggtgatcctttcaaaggttcagatccatttgcatcagactgtttcttcaggcaatctactgatccttttgccacttcaagcactgaccctttcagtgcagccaacaatagcagtattacatcggtagaaacgttgaagcacaatgatccttttgctcctggtggaacagttgttgcagcaagcgattcagccacagacccctttgcttctgtttttgggaatgaatcatttggaggtggatttgctgacttcagcacattgtcaaaggtcaacaatgaagatccttttcgttcagccacatcgagctctgtcagcaacgtagtgattacaaaaaatgtatttgaggaaacatcggtcaaaagtgaagatgaacccccagcactgccaccaaagatcggaactccaacaagaccctgccctctaccacctgggaaaagatccatcaacaaattggattctcctgatccctttaaactgaatgatccatttcagcctttcccaggcaacgatagccccaaagaaaaagatcctgaaatattttgtgatccattcacttctgctactaccactaccaataaagaggctgatccaagcaattttgccaacttcagtgcttatccctctgaagaagatatgatcgaatgggccaagagggaaagtgagagagaggaagagcagaggcttgcccgactaaatcagcaggaacaagaagacttagaactggctattgcactcagcaaatctgagatatcagaagcatgaagaattctcttgttctttggcaacaatatagtattcttcttcctgaatactgaaactatttacaatgtgtatcaaaactacctgtgagcatgggaatacaaaaggtttgagattcctgtaaatgtgacaaaattttaggattttttttttttcttcattacagattcgtctttttttttttttcttataaaagccgtaacccagtcagacaaattcaccttcacttaggcccctgttctggtatacatttactgtgagcttttgcctgcctgtgctattttacttgtaaagctagagcacccaagcttctgccttctggaatatagagaaatagtttcaccctgcactaccctgttctgtagttattctgatgatagccagtgaggttcttaaagtttgcagtattctcccctgattggaatggttgagtgagggtaagggaaagaatatcttatttcttttatgattggtgcaaattggctaaagtgcatttttaaatttcctctacttaatttgtttttcagagataaggaaaaatattttgcacagatttactccactatggaaaagggatgctgtaggttgaaccattatagcctcagattcgatcttttcctaactaaaaatattaaagcctcatgtgtgaaataaatttttaaaaagatttatctggatttagagaattttagatcaacagatacctctcagtgtgtttgctaattaataaaaatcagtttcttacaaataaagtttgtaagaaaatgttcattttaagtgatagatagtggagaaaatttatcacctaaaatatacccatcagtataaggcaagcaaaagtcttaacatggcagccattctgcctttgccgtggccctgtcctgtttagttcttagtgggttaatttttgtacttttgcagaagaaacttcagcaagctagaactggaaggtactttaatttttcatatatatttgtttttttttttttaatgaaggctcatttacttgaaatgtaaaaactttcactgaatacaaatagaaaaagtgatgtgttttatatcatattgctttttgtccatctttgtggtttagtttatttactcacttcatgtttttcacctataaaattgtcaagctagcaaaaaaactcttgtttttttaattgggagagaagagacctgccagattatcagacctcttcatgttaaaagaccatctcctgtaaaactgacctagtggacaagctgaatttgaaatagactgtgaagtaagctgtaacttgtcattttaattttgtttaacacggttactgacttagatgatgtattaaataccaagataaagaaaaatgcacctaaaatctaattagaattctctgggtcaacaagtcaaggtggtattgatctgtgttaatctgagtaacttattgcctagcctataaataaattccaaaatatccaattcatttcttcttgaaatggtgcttgttttgttttctttccattacacaattagactcctacagtttaaaacaaactttaaaccactatcttgcactgctaacttttttctacctttgtaaatagaaacatttctgcataaaagtcatacatatgaagcaagggctgaatcataatcacaaggcttaattttgataaacgaatccagtgacctaaggattttctgcaaaatttgactgggagttgtgataggtggtatttttgtttattttcttcctcttactccttaggataaaggtaagttgacttgaacaactttcttttgcactgggaaaataagcaaatgtttaaatgcttcaaaaaaattttcaattaaactcaaatattaaatatctataacttataaacaccaactttcaatgtaataaatgtatcctaatcttatgtatgtttaactggattacatagatttttatcttttgttaaaatgtgtataccccgtggaccaacataatattaaagtatgtatatattatataaatatatatgtatatgtgctcgcttgtgtaggatgaatgtcttagagtcgtttgtggtattttatgttgttgactctggctccagggcctgtgcttgaaaaggacagataagtattgcccagagctaagtggcactacttacaaagttttaaatgtcttctacatactgattcatgtttatttgagctctctttatagaattttctcttaaagtttcaaacctctaagttgtagcctgtaattatgagaacagtaaactttaagtaataataaagaatcccatccatatatccaatttgcaattgagttttgcatggttctctgattatgtccatgctgtgtccaaggaggagtaggtacatacaatcagcacagattaatatatgtaaagggtttgggacagcacctggtatagaataaataataaatgtaaactatta

SEQ ID NO: 130143 - DNA, 5225 bp, Homo sapiens
  Payload ID: 5467
  Gene Symbol: EPS15
  Gene Name: epidermal growth factor receptor pathway substrate 15
  Uniprot ID: P42566
  ENST ID: ENST00000371733
  CDS Start-End: 98-2788
gccccggcctcgcctgcggccgctccctccgcctcctccccgccccgagccccagtcagcccgtcttccttcccctcccttgcatgatggaaacaccatggctgcggcggcccagctctctctgacacagttatcaagtgggaatcctgtatatgaaaaatactatagacaggttgatacaggcaatactggaagggtgttggcttctgatgctgctgctttcctgaaaaaatcagggcttccagacttgatacttggaaagatttgggatttagccgacacagatggcaaaggtatcctgaacaaacaagaattctttgttgctttgcgtcttgtggcatgtgcccagaatggattggaagtttcactaagtagtttgaacctggctgttcctccaccaagatttcatgataccagtagtcctttgctaatcagtggaacctctgcagctgagctcccatgggctgtaaaacctgaagataaggccaaatatgatgcaatatttgatagtttaagcccagtgaatggatttctgtctggtgataaagtgaaaccagtgttgctcaactctaagttacctgtggatatccttggaagagtttgggagttgagtgatattgaccatgatggaatgcttgacagagatgagtttgcagttgccatgtttttggtatactgtgcactggagaaagaacctgtgccaatgtccttgcctccagccttggtgccaccatctaagagaaaaacgtgggttgtatcccctgcagaaaaagctaaatatgatgaaatcttcctgaaaactgataaagatatggacggatttgtgtctggattggaggtccgtgaaatattcttgaaaacaggtttaccttctaccttactagcccatatatggtcattatgcgacacaaaggactgtgggaagctttcaaaggatcagtttgccttggcttttcacttaatcagtcagaagttaatcaagggcattgatcctcctcacgttcttactcctgaaatgattccaccatcagacagggccagtttacaaaagaacatcataggatcaagtcctgttgcagatttctctgctattaaggaactagatactcttaacaatgaaatagttgacctacagagggaaaagaataatgtggaacaggaccttaaggagaaggaagatactattaaacagaggacaagtgaggttcaggatcttcaagatgaagttcaaagggagaatactaatctgcaaaaactacaggcccagaaacagcaggtacaggaactccttgatgaactggatgagcagaaagcccagctggaggagcaactcaaggaagtcagaaagaaatgtgctgaggaggcccaactgatctcttctctgaaagctgaattaactagtcaggaatcgcagatctccacttacgaagaagaattggcaaaagctagagaagagctgagccgtctacagcaagaaacagcagaattggaggagagtgtagagtcagggaaggctcagttggaacctcttcagcagcacctacaagattcacaacaggaaattagttcaatgcaaatgaaactgatggaaatgaaagatttggaaaatcataatagtcagttaaattggtgcagtagcccacacagcattcttgtaaacggagctacagattattgcagcctcagcaccagcagcagtgaaacagccaaccttaatgaacatgttgaaggccagagcaacctagagtctgagcccatacaccaggaatctccagcaagaagtagtcctgaactactgccttctggtgtgactgatgaaaatgaggtgactacagctgttactgaaaaagtttgttctgaactcgacaataatagacattcaaaagaggaagatccatttaatgtagactcaagttcgctgacaggtccagttgcagatacaaacttggattttttccagtctgatccttttgttggcagtgatcctttcaaggatgatccttttggaaaaatcgatccatttggtggtgatcctttcaaaggttcagatccatttgcatcagactgtttcttcaggcaatctactgatccttttgccacttcaagcactgaccctttcagtgcagccaacaatagcagtattacatcggtagaaacgttgaagcacaatgatccttttgctcctggtggaacagttgttgcagcaagcgattcagccacagacccctttgcttctgtttttgggaatgaatcatttggaggtggatttgctgacttcagcacattgtcaaaggtcaacaatgaagatccttttcgttcagccacatcgagctctgtcagcaacgtagtgattacaaaaaatgtatttgaggaaacatcggtcaaaagtgaagatgaacccccagcactgccaccaaagatcggaactccaacaagaccctgccctctaccacctgggaaaagatccatcaacaaattggattctcctgatccctttaaactgaatgatccatttcagcctttcccaggcaacgatagccccaaagaaaaagatcctgaaatattttgtgatccattcacttctgctactaccactaccaataaagaggctgatccaagcaattttgccaacttcagtgcttatccctctgaagaagatatgatcgaatgggccaagagggaaagtgagagagaggaagagcagaggcttgcccgactaaatcagcaggaacaagaagacttagaactggctattgcactcagcaaatctgagatatcagaagcatgaagaattctcttgttctttggcaacaatatagtattcttcttcctgaatactgaaactatttacaatgtgtatcaaaactacctgtgagcatgggaatacaaaaggtttgagattcctgtaaatgtgacaaaattttaggattttttttttttcttcattacagattcgtctttttttttttttcttataaaagccgtaacccagtcagacaaattcaccttcacttaggcccctgttctggtatacatttactgtgagcttttgcctgcctgtgctattttacttgtaaagctagagcacccaagcttctgccttctggaatatagagaaatagtttcaccctgcactaccctgttctgtagttattctgatgatagccagtgaggttcttaaagtttgcagtattctcccctgattggaatggttgagtgagggtaagggaaagaatatcttatttcttttatgattggtgcaaattggctaaagtgcatttttaaatttcctctacttaatttgtttttcagagataaggaaaaatattttgcacagatttactccactatggaaaagggatgctgtaggttgaaccattatagcctcagattcgatcttttcctaactaaaaatattaaagcctcatgtgtgaaataaatttttaaaaagatttatctggatttagagaattttagatcaacagatacctctcagtgtgtttgctaattaataaaaatcagtttcttacaaataaagtttgtaagaaaatgttcattttaagtgatagatagtggagaaaatttatcacctaaaatatacccatcagtataaggcaagcaaaagtcttaacatggcagccattctgcctttgccgtggccctgtcctgtttagttcttagtgggttaatttttgtacttttgcagaagaaacttcagcaagctagaactggaaggtactttaatttttcatatatatttgtttttttttttttaatgaaggctcatttacttgaaatgtaaaaactttcactgaatacaaatagaaaaagtgatgtgttttatatcatattgctttttgtccatctttgtggtttagtttatttactcacttcatgtttttcacctataaaattgtcaagctagcaaaaaaactcttgtttttttaattgggagagaagagacctgccagattatcagacctcttcatgttaaaagaccatctcctgtaaaactgacctagtggacaagctgaatttgaaatagactgtgaagtaagctgtaacttgtcattttaattttgtttaacacggttactgacttagatgatgtattaaataccaagataaagaaaaatgcacctaaaatctaattagaattctctgggtcaacaagtcaaggtggtattgatctgtgttaatctgagtaacttattgcctagcctataaataaattccaaaatatccaattcatttcttcttgaaatggtgcttgttttgttttctttccattacacaattagactcctacagtttaaaacaaactttaaaccactatcttgcactgctaacttttttctacctttgtaaatagaaacatttctgcataaaagtcatacatatgaagcaagggctgaatcataatcacaaggcttaattttgataaacgaatccagtgacctaaggattttctgcaaaatttgactgggagttgtgataggtggtatttttgtttattttcttcctcttactccttaggataaaggtaagttgacttgaacaactttcttttgcactgggaaaataagcaaatgtttaaatgcttcaaaaaaattttcaattaaactcaaatattaaatatctataacttataaacaccaactttcaatgtaataaatgtatcctaatcttatgtatgtttaactggattacatagatttttatcttttgttaaaatgtgtataccccgtggaccaacataatattaaagtatgtatatattatataaatatatatgtatatgtgctcgcttgtgtaggatgaatgtcttagagtcgtttgtggtattttatgttgttgactctggctccagggcctgtgcttgaaaaggacagataagtattgcccagagctaagtggcactacttacaaagttttaaatgtcttctacatactgattcatgtttatttgagctctctttatagaattttctcttaaagtttcaaacctctaagttgtagcctgtaattatgagaacagtaaactttaagtaataataaagaatcccatccatatatccaatttgcaattgagttttgcatggttctctgattatgtccatgctgtgtccaaggaggagtaggtacatacaatcagcacagattaatatatgtaaagggtttgggacagcacctggtatagaataaataataaatgtaaactatta

SEQ ID NO: 130144 - DNA, 374 bp, Homo sapiens
  Payload ID: 5467
  Gene Symbol: EPS15
  Gene Name: epidermal growth factor receptor pathway substrate 15
  ENST ID: ENST00000465467
  CDS Start-End: 1-272
ctgcggcggcccagctctctctgacacagttatcaagtgggaatcctgtatatgaaaaatactatagacaggttgatacaggcaatactggaagggtgttggcttctgatgctgctgctttcctgaaaaaatcagggcttccagacttgatacttggaaagatttgggatttagccgacacagatggcaaaggtatcctgaacaaacaacatgataccagtagtcctttgctaatcagtggaacctctgcagctgagctcccatgggcttgaatggatttctgtctggtgataaagtgaaaccagtgttgctcaactctaagttacctgtggatatccttggaagagtttgggagttgagtgatattgaccatg

SEQ ID NO: 130145 - DNA, 2924 bp, Homo sapiens
  Payload ID: 5468
  Gene Symbol: EPS15L1
  Gene Name: epidermal growth factor receptor pathway substrate 15-like 1
  Uniprot ID: Q9UBC2
  ENST ID: ENST00000248070
  CDS Start-End: 141-2735
acatgcgtggccctgtctacggccccgccctctcccgggacaggcggcctgcgcaccgccctcccgtcgtcccagtgcgcacgcgtggctgcagccccgcccccgttcccccggcgctcggagcccgagtccgcgggaagatggcggcgccgctcatccccctctcccagcagattcccactggaaattcgttgtatgaatcttattacaagcaggtcgatccggcatacacagggagggtgggggcgagtgaagctgcgctttttctaaagaagtctggcctctcggacattatccttgggaagatatgggacttggccgatccagaaggtaaagggttcttggacaaacagggtttctatgttgcactgagactggtggcctgtgcacagagtggccatgaagttaccttgagcaatctgaatttgagcatgccaccgcctaaatttcacgacaccagcagccctctgatggtcacaccgccctctgcagaggcccactgggctgtgagggtggaagaaaaggccaaatttgatgggatttttgaaagcctcttgcccatcaatggtttgctctctggagacaaagtcaagccagtcctcatgaactcaaagctgcctcttgatgtcctgggcagggtctgggacctcagtgacattgacaaggatgggcacttggatcgagatgagttcgctgtggccatgcacttggtgtaccgagccctggagaaggagcccgtgccctccgccctgcccccgtccctcatcccaccctccaagagaaagaagactgtgttccctggcgccgtccccgtcctgcctgccagccccccaccaaaagacagcctccgctccacgccgtcccacggcagcgtcagcagcctcaacagcacagggagcctgtcccccaagcacagcctcaagcaaacacagccaacagtgaactgggtggtgcccgtggcagacaagatgcgatttgatgagatattcctgaagaccgacctggacctggatggctacgtgagtggccaggaggtgaaggagatcttcatgcactcgggcctcacccagaaccttctagcacacatatgggccctggccgatacgaggcaaacggggaagttaagcaaagaccaattcgcgttagctatgtatttcattcagcagaaggtcagtaaaggcatcgaccctcctcaagtcctctcgccggacatggtcccgccttcggagagaggcacgcccggcccggacagttcaggctctctcggctccggggagtttactggcgtgaaggagcttgatgacatcagtcaagagattgcccagttacaaagagagaaatattcactggaacaagacattcgagaaaaggaagaggcaatcagacagaaaaccagcgaggtgcaggaattacaaaatgacctagaccgggaaacaagcagtttgcaggagctcgaggctcagaaacaggatgctcaagaccgcctggacgagatggaccagcagaaggccaagctccgagacatgctgagcgacgtccggcagaagtgccaggatgagactcagatgatctcatcactgaaaacgcaaatccaatctcaggaatctgacttaaagtcccaggaagacgatctgaaccgagccaagtcggagctgaaccgattgcagcaggaggaaacccagctggagcagagcattcaggctgggcgagtccagctggaaaccatcatcaagtccctgaagtcaacgcaagacgaaatcaaccaggcaaggagcaaactttcccagctgcatgaaagccgccaggaggcccacaggagcctggagcagtatgaccaggtgctcgatggagcccatggtgccagcctgaccgacctggccaacctgagcgaaggcgtctccctggcagagaggggcagttttggagccatggatgatcctttcaaaaataaagccttgttatttagcaacaacacgcaagagttgcatccggatcctttccagacagaagaccccttcaaatctgacccatttaaaggagctgaccccttcaaaggcgacccgttccagaatgacccctttgcagaacagcagacaacttcaacagatccatttggaggggaccctttcaaagaaagtgacccattccgtggctctgccactgacgacttcttcaagaaacagacaaagaatgacccatttacctcggatccattcacgaaaaacccttccttaccttcgaagctcgacccctttgaatccagtgatcccttttcatcctccagtgtctcctcaaaaggatcagatccctttggaaccttagatcccttcggaagtgggtccttcaatagtgctgaaggctttgccgacttcagccagatgtccaagcccccaccttctggccctttcacctcctccttgggaggggcaggattctcagatgacccctttaaaagtaaacaggacactcctgctctgcctccgaagaaacctgctcctccacggcctaaaccgcccagcggtaaaagtacacctgtaagccagcttggttccgcagactttcccgaggcccccgatccattccagccactcggggctgacagcggcgacccgttccaaagtaaaaaggggtttggggacccgtttagtggaaaagacccatttgtcccctcctctgcagctaaaccttctaaggcctctgcctcgggctttgcagacttcacctctgtaagttgagtcctccgcctccgggccaccccactcccttccgcttgcagcttccctgggatttttgtctccttttaaaggcaaacctcccagcttctttagcctcttggtacctcacactctctgtccctcgcgttatttattctacactgccacttctgtaagaaaaacagtttctcaataaaaaaaaaaagagcc

SEQ ID NO: 130146 - DNA, 3266 bp, Homo sapiens
  Payload ID: 5468
  Gene Symbol: EPS15L1
  Gene Name: epidermal growth factor receptor pathway substrate 15-like 1
  Uniprot ID: Q9UBC2
  ENST ID: ENST00000455140
  CDS Start-End: 68-2800
agtgcgcacgcgtggctgcagccccgcccccgttcccccggcgctcggagcccgagtccgcgggaagatggcggcgccgctcatccccctctcccagcagattcccactggaaattcgttgtatgaatcttattacaagcaggtcgatccggcatacacagggagggtgggggcgagtgaagctgcgctttttctaaagaagtctggcctctcggacattatccttgggaagatatgggacttggccgatccagaaggtaaagggttcttggacaaacagggtttctatgttgcactgagactggtggcctgtgcacagagtggccatgaagttaccttgagcaatctgaatttgagcatgccaccgcctaaatttcacgacaccagcagccctctgatggtcacaccgccctctgcagaggcccactgggctgtgagggtggaagaaaaggccaaatttgatgggatttttgaaagcctcttgcccatcaatggtttgctctctggagacaaagtcaagccagtcctcatgaactcaaagctgcctcttgatgtcctgggcagggtctgggacctcagtgacattgacaaggatgggcacttggatcgagatgagttcgctgtggccatgcacttggtgtaccgagccctggagaaggagcccgtgccctccgccctgcccccgtccctcatcccaccctccaagagaaagaagactgtgttccctggcgccgtccccgtcctgcctgccagccccccaccaaaagacagcctccgctccacgccgtcccacggcagcgtcagcagcctcaacagcacagggagcctgtcccccaagcacagcctcaagcaaacacagccaacagtgaactgggtggtgcccgtggcagacaagatgcgatttgatgagatattcctgaagaccgacctggacctggatggctacgtgagtggccaggaggtgaaggagatcttcatgcactcgggcctcacccagaaccttctagcacacatatgggccctggccgatacgaggcaaacggggaagttaagcaaagaccaattcgcgttagctatgtatttcattcagcagaaggtcagtaaaggcatcgaccctcctcaagtcctctcgccggacatggtcccgccttcggagagaggcacgcccggcccggacagttcaggctctctcggctccggggagtttactggcgtgaaggagcttgatgacatcagtcaagagattgcccagttacaaagagagaaatattcactggaacaagacattcgagaaaaggaagaggcaatcagacagaaaaccagcgaggtgcaggaattacaaaatgacctagaccgggaaacaagcagtttgcaggagctcgaggctcagaaacaggatgctcaagaccgcctggacgagatggaccagcagaaggccaagctccgagacatgctgagcgacgtccggcagaagtgccaggatgagactcagatgatctcatcactgaaaacgcaaatccaatctcaggaatctgacttaaagtcccaggaagacgatctgaaccgagccaagtcggagctgaaccgattgcagcaggaggaaacccagctggagcagagcattcaggctgggcgagtccagctggaaaccatcatcaagtccctgaagtcaacgcaagacgaaatcaaccaggcaaggagcaaactttcccagctgcatgaaagccgccaggaggcccacaggagcctggagcagtatgaccaggtgctcgatggagcccatggtgccagcctgaccgacctggccaacctgagcgaaggcgtctccctggcagagaggggcagttttggagccatggatgatcctttcaaaaataaagccttgttatttagcaacaacacgcaagagttgcatccggatcctttccagacagaagaccccttcaaatctgacccatttaaaggagctgaccccttcaaaggcgacccgttccagaatgacccctttgcagaacagcagacaacttcaacagatccatttggaggggaccctttcaaagaaagtgacccattccgtggctctgccactgacgacttcttcaagaaacagacaaagaatgacccatttacctcggatccattcacgaaaaacccttccttaccttcgaagctcgacccctttgaatccagtgatcccttttcatcctccagtgtctcctcaaaaggatcagatccctttggaaccttagatcccttcggaagtgggtccttcaatagtgctgaaggctttgccgacttcagccagatgtccaagcccccaccttctggccctttcacctcctccttgggaggggcaggattctcagatgacccctttaaaagtaaacaggacactcctgctctgcctccgaagaaacctgctcctccacggcctaaaccgcccagcggtaaaagtacacctgtaagccagcttggttccgcagactttcccgaggcccccgatccattccagccactcggggctgacagcggcgacccgttccaaagtaaaaaggggtttggggacccgtttagtggaaaagacccatttgtcccctcctctgcagctaaaccttctaaggcctctgcctcgggctttgcagacttcacctcttttggcaatgaggagcagcagctggcgtgggccaagcgggagagcgagaaggcggaacaggagaggctggcgcggctgcggcggcaggagcaggaggacctggaactggccatcgcgctcagcaaggctgacatgcctgccgcctaggcgagggccgtgtgtaggcgggacagggcacgggcgggttccagagagggggcagtgcagatgtctatatatacacacacacaccgtcgccaccgtactccaaggaccgggactcgggggcttgttcagggtgagcagactcggctgcaagacctggaaaggtcacatctcctggggaagcccttacagaggccttggccaccacttctgcaggtccgtctctccactgtgccatcccccccggggctgactgcctcccgctcttcctctggggacgaacacacagcggtcagtcgaggagaggaagcacccagggcttccccgcctcctccctactcatagctgcagacatccccacccgccctcccacgcatcagtcagacactcccccagtggtgtatgcactcgttgtataaaatgaagtttgaatgattaatataaaatattttaatacaaaacaagagaa

SEQ ID NO: 130147 - DNA, 2666 bp, Homo sapiens
  Payload ID: 5468
  Gene Symbol: EPS15L1
  Gene Name: epidermal growth factor receptor pathway substrate 15-like 1
  Uniprot ID: Q9UBC2
  ENST ID: ENST00000535753
  CDS Start-End: 32-2296
cccggcgctcggagcccgagtccgcgggaagatggcggcgccgctcatccccctctcccagcagattcccactggaaattcgttgtatgaatcttattacaagcaggtcgatccggcatacacagggagggtgggggcgagtgaagctgcgctttttctaaagaagtctggcctctcggacattatccttgggaagatatgggacttggccgatccagaaggtaaagggttcttggacaaacagggtttctatgttgcactgagactggtggcctgtgcacagagtggccatgaagttaccttgagcaatctgaatttgagcatgccaccgcctaaatttcacgacaccagcagccctctgatggtcacaccgccctctgcagaggcccactgggctgtgagggtggaagaaaaggccaaatttgatgggatttttgaaagcctcttgcccatcaatggtttgctctctggagacaaagtcaagccagtcctcatgaactcaaagctgcctcttgatgtcctgggcagggtctgggacctcagtgacattgacaaggatgggcacttggatcgagatgagttcgctgtggccatgcacttggtgtaccgagccctggagaaggagcccgtgccctccgccctgcccccgtccctcatcccaccctccaagagaaagaagactgtgttccctggcgccgtccccgtcctgcctgccagccccccaccaaaagacagcctccgctccacgccgtcccacggcagcgtcagcagcctcaacagcacagggagcctgtcccccaagcacagcctcaagcaaacacagccaacagtgaactgggtggtgcccgtggcagacaagatgcgatttgatgagatattcctgaagaccgacctggacctggatggctacgtgagtggccaggaggtgaaggagatcttcatgcactcgggcctcacccagaaccttctagcacacatatgggccctggccgatacgaggcaaacggggaagttaagcaaagaccaattcgcgttagctatgtatttcattcagcagaaggtcagtaaaggcatcgaccctcctcaagtcctctcgccggacatggtcccgccttcggagagaggcacgcccggcccggacagttcaggctctctcggctccggggagtttactggcgtgaaggagcttgatgacatcagtcaagagattgcccagttacaaagagagaaatattcactggaacaagacattcgagaaaaggaagaggcaatcagacagaaaaccagcgaggtgcaggaattacaaaatgacctagaccgggaaacaagcagtttgcaggagctcgaggctcagaaacaggatgctcaagaccgcctggacgagatggaccagcagaaggccaagctccgagacatgctgagcgacgtccggcagaagtgccaggatgagactcagatgatctcatcactgaaaacgcaaatccaatctcaggaatctgacttaaagtcccaggaagacgatctgaaccgagccaagtcggagctgaaccgattgcagcaggaggaaacccagctggagcagagcattcaggctgggcgagtccagctggaaaccatcatcaagtccctgaagtcaacgcaagacgaaatcaaccaggcaaggagcaaactttcccagctgcatgaaagccgccaggaggcccacaggagcctggagcagtatgaccaggtgctcgatggagcccatggtgccagcctgaccgacctggccaacctgagcgaaggcgtctccctggcagagaggggcagttttggagccatggatgatcctttcaaaaataaagccttgttatttagcaacaacacgcaagagttgcatccggatcctttccagacagaagaccccttcaaatctgacccatttaaaggagctgaccccttcaaaggcgacccgttccagaatgacccctttgcagaacagcagacaacttcaacagatccatttggaggggaccctttcaaagaaagtgacccattccgtggctctgccactgacgacttcttcaagaaacagacaaagaatgacccatttacctcggatccattcacgaaaaacccttccttaccttcgaagctcgacccctttgaatccagtgatcccttttcatcctccagtgtctcctcaaaaggatcagatccctttggaaccttagatcccttcggaagtgggtccttcaatagtgctgaaggctttgccgacttcagccagatgtccaaggtaaaagtacacctgtaagccagcttggttccgcagactttcccgaggcccccgatccattccagccactcggggctgacagcggcgacccgttccaaagtaaaaaggggtttggggacccgtttagtggaaaagacccatttgtcccctcctctgcagctaaaccttctaaggcctctgcctcgggctttgcagacttcacctctgtaagttgagtcctccgcctccgggccaccccactcccttccgcttgcagcttccctgggatttttgtctccttttaaaggcaaacctcccagcttctttagcctcttggtacctcacactctctgtccctcgcgttatttattctacactgccacttctgtaagaaaaacagtttctcaat

SEQ ID NO: 130148 - DNA, 2788 bp, Homo sapiens
  Payload ID: 5468
  Gene Symbol: EPS15L1
  Gene Name: epidermal growth factor receptor pathway substrate 15-like 1
  ENST ID: ENST00000592031
  CDS Start-End: 26-265
gctcggagcccgagtccgcgggaagatggcggcgccgctcatccccctctcccagcagattcccactggaaattcgttgtatgaatcttattacaagcaggtcgatccggcatacacagggagggtgggggcgagtgaagctgcgctttttctaaagaagtctggcctctcggacattatccttgggaagatatgggacttggccgatccagaagggtttctatgttgcactgagactggtggcctgtgcacagagtggccatgaagttaccttgagcaatctgaatttgagcatgccaccgcctaaatttcacgacaccagcagccctctgatggtcacaccgccctctgcagaggcccactgggctgtgagggtggaagaaaaggccaaatttgatgggatttttgaaagcctcttgcccatcaatggtttgctctctggagacaaagtcaagccagtcctcatgaactcaaagctgcctcttgatgtcctgggcagggtctgggacctcagtgacattgacaaggatgggcacttggatcgagatgagttcgctgtggccatgcacttggtgtaccgagccctggagaaggagcccgtgccctccgccctgcccccgtccctcatcccaccctccaagagaaagaagactgtgttccctggcgccgtccccgtcctgcctgccagccccccaccaaaagacagcctccgctccacgccgtcccacggcagcgtcagcagcctcaacagcacagggagcctgtcccccaagcacagcctcaagcaaacacagccaacagtgaactgggtggtgcccgtggcagacaagatgcgatttgatgagatattcctgaagaccgacctggacctggatggctacgtgagtggccaggaggtgaaggagatcttcatgcactcgggcctcacccagaaccttctagcacacatatgggccctggccgatacgaggcaaacggggaagttaagcaaagaccaattcgcgttagctatgtatttcattcagcagaaggtcagtaaaggcatcgaccctcctcaagtcctctcgccggacatggtcccgccttcggagagaggcacgcccggcccggacagttcaggctctctcggctccggggagtttactggcgtgaaggagcttgatgacatcagtcaagagattgcccagttacaaagagagaaatattcactggaacaagacattcgagaaaaggaagaggcaatcagacagaaaaccagcgaggtgcaggaattacaaaatgacctagaccgggaaacaagcagtttgcaggagctcgaggctcagaaacaggatgctcaagaccgcctggacgagatggaccagcagaaggccaagctccgagacatgctgagcgacgtccggcagaagtgccaggatgagactcagatgatctcatcactgaaaacgcaaatccaatctcaggaatctgacttaaagtcccaggaagacgatctgaaccgagccaagtcggagctgaaccgattgcagcaggaggaaacccagctggagcagagcattcaggctgggcgagtccagctggaaaccatcatcaagtccctgaagtcaacgcaagacgaaatcaaccaggcaaggagcaaactttcccagctgcatgaaagccgccaggaggcccacaggagcctggagcagtatgaccaggtgctcgatggagcccatggtgccagcctgaccgacctggccaacctgagcgaaggcgtctccctggcagagaggggcagttttggagccatggatgatcctttcaaaaataaagccttgttatttagcaacaacacgcaagagttgcatccggatcctttccagacagaagaccccttcaaatctgacccatttaaaggagctgaccccttcaaaggcgacccgttccagaatgacccctttgcagaacagcagacaacttcaacagatccatttggaggggaccctttcaaagaaagtgacccattccgtggctctgccactgacgacttcttcaagaaacagacaaagaatgacccatttacctcggatccattcacgaaaaacccttccttaccttcgaagctcgacccctttgaatccagtgatcccttttcatcctccagtgtctcctcaaaaggatcagatccctttggaaccttagatcccttcggaagtgggtccttcaatagtgctgaaggctttgccgacttcagccagatgtccaagcccccaccttctggccctttcacctcctccttgggaggggcaggattctcagatgacccctttaaaagtaaacaggacactcctgctctgcctccgaagaaacctgctcctccacggcctaaaccgcccagcggtaaaagtacacctgtaagccagcttggttccgcagactttcccgaggcccccgatccattccagccactcggggctgacagcggcgacccgttccaaagtaaaaaggggtttggggacccgtttagtggaaaagacccatttgtcccctcctctgcagctaaaccttctaaggcctctgcctcgggctttgcagacttcacctctgtaagttgagtcctccgcctccgggccaccccactcccttccgcttgcagcttccctgggatttttgtctccttttaaaggcaaacctcccagcttctttagcctcttggtacctcacactctctgtccctcgcgttatttattctacactgccacttctgtaagaaaaacagtttctcaataaaaaaaaaaagagccgc

SEQ ID NO: 130149 - DNA, 420 bp, Homo sapiens
  Payload ID: 5468
  Gene Symbol: EPS15L1
  Gene Name: epidermal growth factor receptor pathway substrate 15-like 1
  ENST ID: ENST00000602151
  CDS Start-End: 1-271
ggcggcgccgctcatccccctctcccagcagattcccactggaaattcgttgtatgaatcttattacaagcaggtcgatccggcatacacagggagggtgggggcgagtgaagctgcgctttttctaaagaagtctggcctctcggacattatccttgggaagatatgggacttggccgatccagaaggtaaagggttcttggacaaacaggtatatacacatgtacacagagcaaatggaggggctgggcagagcccccaggctgggtgacctccacggctccttccacattcctccactgtcaagtattactaggcatgagcacggctgtcaaacttaacacgggaagttttcattttgaaataaaggtcttttaaacacttggagccatctttcatggctagtgtatcttttattta

SEQ ID NO: 130150 - DNA, 681 bp, Homo sapiens
  Payload ID: 5468
  Gene Symbol: EPS15L1
  Gene Name: epidermal growth factor receptor pathway substrate 15-like 1
  ENST ID: ENST00000594851
  CDS Start-End: 1-215
cgcagactttcccgaggcccccgatccattccagccactcggggctgacagcggcgacccgttccaaatttggcaatgaggagcagcagctggcgtgggccaagcgggagagcgagaaggcggaacaggagaggctggcgcggctgcggcggcaggagcaggaggacctggaactggccatcgcgctcagcaaggctgacatgcctgccgcctaggcgagggccgtgtgtaggcgggacagggcacgggcgggttccagagagggggcagtgcagatgtctatatatacacacacacaccgtcgccaccgtactccaaggaccgggactcgggggcttgttcagggtgagcagactcggctgcaagacctggaaaggtcacatctcctggggaagcccttacagaggccttggccaccacttctgcaggtccgtctctccactgtgccatcccccccggggctgactgcctcccgctcttcctctggggacgaacacacagcggtcagtcgaggagaggaagcacccagggcttccccgcctcctccctactcatagctgcagacatccccacccgccctcccacgcatcagtcagacactcccccagtggtgtatgcactcgttgtataaaatgaagtttgaatgattaatataaaatattttaatacaaaacaagagaa

SEQ ID NO: 130151 - DNA, 2489 bp, Homo sapiens
  Payload ID: 5468
  Gene Symbol: EPS15L1
  Gene Name: epidermal growth factor receptor pathway substrate 15-like 1
  ENST ID: ENST00000594975
  CDS Start-End: 141-2411
acatgcgtggccctgtctacggccccgccctctcccgggacaggcggcctgcgcaccgccctcccgtcgtcccagtgcgcacgcgtggctgcagccccgcccccgttcccccggcgctcggagcccgagtccgcgggaagatggcggcgccgctcatccccctctcccagcagattcccactggaaattcgttgtatgaatcttattacaagcaggtcgatccggcatacacagggagggtgggggcgagtgaagctgcgctttttctaaagaagtctggcctctcggacattatccttgggaagatatgggacttggccgatccagaaggtaaagggttcttggacaaacagggtttctatgttgcactgagactggtggcctgtgcacagagtggccatgaagttaccttgagcaatctgaatttgagcatgccaccgcctaaatttcacgacaccagcagccctctgatggtcacaccgccctctgcagaggcccactgggctgtgagggtggaagaaaaggccaaatttgatgggatttttgaaagcctcttgcccatcaatggtttgctctctggagacaaagtcaagccagtcctcatgaactcaaagctgcctcttgatgtcctgggcagggtctgggacctcagtgacattgacaaggatgggcacttggatcgagatgagttcgctgtggccatgcacttggtgtaccgagccctggagaaggagcccgtgccctccgccctgcccccgtccctcatcccaccctccaagagaaagaagactgtgttccctggcgccgtccccgtcctgcctgccagccccccaccaaaagacagcctccgctccacgccgtcccacggcagcgtcagcagcctcaacagcacagggagcctgtcccccaagcacagcctcaagcaaacacagccaacagtgaactgggtggtgcccgtggcagacaagatgcgatttgatgagatattcctgaagaccgacctggacctggatggctacgtgagtggccaggaggtgaaggagatcttcatgcactcgggcctcacccagaaccttctagcacacatatgggccctggccgatacgaggcaaacggggaagttaagcaaagaccaattcgcgttagctatgtatttcattcagcagaaggtcagtaaaggcatcgaccctcctcaagtcctctcgccggacatggtcccgccttcggagagaggcacgcccggcccggacagttcaggctctctcggctccggggagtttactggcgtgaaggagcttgatgacatcagtcaagagattgcccagttacaaagagagaaatattcactggaacaagacattcgagaaaaggaagaggcaatcagacagaaaaccagcgaggtgcaggaattacaaaatgacctagaccgggaaacaagcagtttgcaggagctcgaggctcagaaacaggatgctcaagaccgcctggacgagatggaccagcagaaggccaagctccgagacatgctgagcgacgtccggcagaagtgccaggatgagactcagatgatctcatcactgaaaacgcaaatccaatctcaggaatctgacttaaagtcccaggaagacgatctgaaccgagccaagtcggagctgaaccgattgcagcaggaggaaacccagctggagcagagcattcaggctgggcgagtccagctggaaaccatcatcaagtccctgaagtcaacgcaagacgaaatcaaccaggcaaggagcaaactttcccagctgcatgaaagccgccaggaggcccacaggagcctggagcagtatgaccaggtgctcgatggagcccatggtgccagcctgaccgacctggccaacctgagcgaaggcgtctccctggcagagaggggcagttttggagccatggtaaaggatgatcctttcaaaaataaagccttgttatttagcaacaacacgcaagagttgcatccggatcctttccagacagaagaccccttcaaatctgacccatttaaaggagctgaccccttcaaaggcgacccgttccagaatgacccctttgcagaacagcagacaacttcaacagatccatttggaggggaccctttcaaagaaagtgacccattccgtggctctgccactgacgacttcttcaagaaacagacaaagaatgacccatttacctcggatccattcacgaaaaacccttccttaccttcgaagctcgacccctttgaatccagtgatcccttttcatcctccagtgtctcctcaaaaggatcagatccctttggaaccttagatcccttcggaagtgggtccttcaatagtgctgaaggctttgccgacttcagccagatgtccaaggtaaaagtacacctgtaagccagcttggttccgcagactttcccgaggcccccgatccattccagccactcggggctgacagcggcgacccgttcc

SEQ ID NO: 130152 - DNA, 3082 bp, Homo sapiens
  Payload ID: 5468
  Gene Symbol: EPS15L1
  Gene Name: epidermal growth factor receptor pathway substrate 15-like 1
  Uniprot ID: Q9UBC2
  ENST ID: ENST00000602022
  CDS Start-End: 17-2281
ccgagtccgcgggaagatggcggcgccgctcatccccctctcccagcagattcccactggaaattcgttgtatgaatcttattacaagcaggtcgatccggcatacacagggagggtgggggcgagtgaagctgcgctttttctaaagaagtctggcctctcggacattatccttgggaagatatgggacttggccgatccagaaggtaaagggttcttggacaaacagggtttctatgttgcactgagactggtggcctgtgcacagagtggccatgaagttaccttgagcaatctgaatttgagcatgccaccgcctaaatttcacgacaccagcagccctctgatggtcacaccgccctctgcagaggcccactgggctgtgagggtggaagaaaaggccaaatttgatgggatttttgaaagcctcttgcccatcaatggtttgctctctggagacaaagtcaagccagtcctcatgaactcaaagctgcctcttgatgtcctgggcagggtctgggacctcagtgacattgacaaggatgggcacttggatcgagatgagttcgctgtggccatgcacttggtgtaccgagccctggagaaggagcccgtgccctccgccctgcccccgtccctcatcccaccctccaagagaaagaagactgtgttccctggcgccgtccccgtcctgcctgccagccccccaccaaaagacagcctccgctccacgccgtcccacggcagcgtcagcagcctcaacagcacagggagcctgtcccccaagcacagcctcaagcaaacacagccaacagtgaactgggtggtgcccgtggcagacaagatgcgatttgatgagatattcctgaagaccgacctggacctggatggctacgtgagtggccaggaggtgaaggagatcttcatgcactcgggcctcacccagaaccttctagcacacatatgggccctggccgatacgaggcaaacggggaagttaagcaaagaccaattcgcgttagctatgtatttcattcagcagaaggtcagtaaaggcatcgaccctcctcaagtcctctcgccggacatggtcccgccttcggagagaggcacgcccggcccggacagttcaggctctctcggctccggggagtttactggcgtgaaggagcttgatgacatcagtcaagagattgcccagttacaaagagagaaatattcactggaacaagacattcgagaaaaggaagaggcaatcagacagaaaaccagcgaggtgcaggaattacaaaatgacctagaccgggaaacaagcagtttgcaggagctcgaggctcagaaacaggatgctcaagaccgcctggacgagatggaccagcagaaggccaagctccgagacatgctgagcgacgtccggcagaagtgccaggatgagactcagatgatctcatcactgaaaacgcaaatccaatctcaggaatctgacttaaagtcccaggaagacgatctgaaccgagccaagtcggagctgaaccgattgcagcaggaggaaacccagctggagcagagcattcaggctgggcgagtccagctggaaaccatcatcaagtccctgaagtcaacgcaagacgaaatcaaccaggcaaggagcaaactttcccagctgcatgaaagccgccaggaggcccacaggagcctggagcagtatgaccaggtgctcgatggagcccatggtgccagcctgaccgacctggccaacctgagcgaaggcgtctccctggcagagaggggcagttttggagccatggatgatcctttcaaaaataaagccttgttatttagcaacaacacgcaagagttgcatccggatcctttccagacagaagaccccttcaaatctgacccatttaaaggagctgaccccttcaaaggcgacccgttccagaatgacccctttgcagaacagcagacaacttcaacagatccatttggaggggaccctttcaaagaaagtgacccattccgtggctctgccactgacgacttcttcaagaaacagacaaagaatgacccatttacctcggatccattcacgaaaaacccttccttaccttcgaagctcgacccctttgaatccagtgatcccttttcatcctccagtgtctcctcaaaaggatcagatccctttggaaccttagatcccttcggaagtgggtccttcaatagtgctgaaggctttgccgacttcagccagatgtccaaggtaaaagtacacctgtaagccagcttggttccgcagactttcccgaggcccccgatccattccagccactcggggctgacagcggcgacccgttccaaagtaaaaaggggtttggggacccgtttagtggaaaagacccatttgtcccctcctctgcagctaaaccttctaaggcctctgcctcgggctttgcagacttcacctcttttggcaatgaggagcagcagctggcgtgggccaagcgggagagcgagaaggcggaacaggagaggctggcgcggctgcggcggcaggagcaggaggacctggaactggccatcgcgctcagcaaggctgacatgcctgccgcctaggcgagggccgtgtgtaggcgggacagggcacgggcgggttccagagagggggcagtgcagatgtctatatatacacacacacaccgtcgccaccgtactccaaggaccgggactcgggggcttgttcagggtgagcagactcggctgcaagacctggaaaggtcacatctcctggggaagcccttacagaggccttggccaccacttctgcaggtccgtctctccactgtgccatcccccccggggctgactgcctcccgctcttcctctggggacgaacacacagcggtcagtcgaggagaggaagcacccagggcttccccgcctcctccctactcatagctgcagacatccccacccgccctcccacgcatcagtcagacactcccccagtggtgtatgcactcgttgtataaaatgaagtttgaatgattaatataaaatattttaatacaaaacaagagaa

SEQ ID NO: 130153 - DNA, 629 bp, Homo sapiens
  Payload ID: 5468
  Gene Symbol: EPS15L1
  Gene Name: epidermal growth factor receptor pathway substrate 15-like 1
  ENST ID: ENST00000596037
  CDS Start-End: 7-339
gggaagatggcggcgccgctcatccccctctcccagcagattcccactggaaattcgttgtatgaatcttattacaagcaggtcgatccggcatacacagggagggtgggggcgagtgaagctgcgctttttctaaagaagtctggcctctcggacattatccttgggaagatatgggacttggccgatccagaaggtaaagggttcttggacaaacagggtttctatgttgcactgagactggtggcctgtgcacagagtggccatgaagttaccttgagcaatctgaatttgagcatgccaccgcctaaatttcaaacccacccacctatgatttaattctgtgccagccacaaaggaatgtttctctctcttctcagcacgacaccagcagccctctgatggtcacaccgccctctgcagaggcccactgggctgtgagggtggaagaaaaggccaaatttgatgggatttttgaaagcctcttgcccatcaatggtttgctctctggagacaaagtcaagccagtcctcatgaactcaaagctgcctcttgatgtcctgggcagggtctgggacctcagtgacattgacaaggatgggcacttggatcgagatgagttcgctgtg

SEQ ID NO: 130154 - DNA, 3486 bp, Homo sapiens
  Payload ID: 5468
  Gene Symbol: EPS15L1
  Gene Name: epidermal growth factor receptor pathway substrate 15-like 1
  Uniprot ID: Q9UBC2
  ENST ID: ENST00000597937
  CDS Start-End: 6-1811
ggaagatggcggcgccgctcatccccctctcccagcagattcccactggaaattcgttgtatgaatcttattacaagcaggtcgatccggcatacacagggagggtgggggcgagtgaagctgcgctttttctaaagaagtctggcctctcggacattatccttgggaagatatgggacttggccgatccagaaggtaaagggttcttggacaaacagggtttctatgttgcactgagactggtggcctgtgcacagagtggccatgaagttaccttgagcaatctgaatttgagcatgccaccgcctaaatttcacgacaccagcagccctctgatggtcacaccgccctctgcagaggcccactgggctgtgagggtggaagaaaaggccaaatttgatgggatttttgaaagcctcttgcccatcaatggtttgctctctggagacaaagtcaagccagtcctcatgaactcaaagctgcctcttgatgtcctgggcagggtctgggacctcagtgacattgacaaggatgggcacttggatcgagatgagttcgctgtggccatgcacttggtgtaccgagccctggagaaggagcccgtgccctccgccctgcccccgtccctcatcccaccctccaagagaaagaagactgtgttccctggcgccgtccccgtcctgcctgccagccccccaccaaaagacagcctccgctccacgccgtcccacggcagcgtcagcagcctcaacagcacagggagcctgtcccccaagcacagcctcaagcaaacacagccaacagtgaactgggtggtgcccgtggcagacaagatgcgatttgatgagatattcctgaagaccgacctggacctggatggctacgtgagtggccaggaggtgaaggagatcttcatgcactcgggcctcacccagaaccttctagcacacatatgggccctggccgatacgaggcaaacggggaagttaagcaaagaccaattcgcgttagctatgtatttcattcagcagaaggtcagtaaaggcatcgaccctcctcaagtcctctcgccggacatggtcccgccttcggagagaggcacgcccggcccggacagttcaggctctctcggctccggggagtttactggcgtgaaggagcttgatgacatcagtcaagagattgcccagttacaaagagagaaatattcactggaacaagacattcgagaaaaggaagaggcaatcagacagaaaaccagcgaggtgcaggaattacaaaatgacctagaccgggaaacaagcagtttgcaggagctcgaggctcagaaacaggatgctcaagaccgcctggacgagatggaccagcagaaggccaagctccgagacatgctgagcgacgtccggcagaagtgccaggatgagactcagatgatctcatcactgaaaacgcaaatccaatctcaggaatctgacttaaagtcccaggaagacgatctgaaccgagccaagtcggagctgaaccgattgcagcaggaggaaacccagctggagcagagcattcaggctgggcgagtccagctggaaaccatcatcaagtccctgaagtcaacgcaagacgaaatcaaccaggcaaggagcaaactttcccagctgcatgaaagccgccaggaggcccacaggagcctggagcagtatgaccaggtgctcgatggagcccatggtgccagcctgaccgacctggccaacctgagcgaaggcgtctccctggcagagaggggcagttttggagccatggtaaaggttgaataaacgtattacagtatggggctctggtcccctggtgtgacagcagaacatcccacccgccagatctgttcatggccaacgttggttccagccaagtgcaggcggctgtctgttgtttttgctgccactttgcgcgttcacaccaggccttgcagcctggcacaggtggccatgctgaatcctggcttccagaacaaagtccaagataggcctggatcctttcagaacctgttttgaatgccctccatctctgcggaagtatttacattgggccaaccacccaagttcagagggcttctcaaacttaaccaaaattggatcagtttctgctcattgtggaaaccccacattctactaatcagggggcaggggacatctgaggggcatgtgtctatgtgtatgtgtgtttccacaaggaacaccttgaaaagcaaatgtgttgctaaagatgaggaagtaatggcaagcagcgccccagggtgttgctctttcaagtaagaattggcctctcctgaaattttggttatgtttaaaaacctctgcactttactctgacctcatgaccctggagttgtgatcaggcctggggcaggggactgtcggccccttacatttttgagagctcttgagcccctgataccaagacaggtgtgaccttttccttaggtggtcacatcccccctgttcacaccagagtctgcccctgcagcctcgaacctggggacatgtagtttcccatttcgtcttggtgctgttccgggagcggatgggccgggccgcgcatgtctggatgtttccttggtgctctgctgcctccagcagctctctccgtgctgccaccctctctcccagggctcctccctggagcccttctgctcctgggcctctgtacgtcatggattcctcttcctccctggaataagagtgagcgctcgtgctctctaaacaccacacttgcctctttatgttcaatgcttgatgtgtttcttttctcagcagccaagtcctcagtcccaaggatttatggggaagcacacgcgtcccctgggctgctgggaaggcactgctggcgagctcatctgtctcttgtgtctggcccccgctgggtgcaccgcctccctctttcctcccatactctcttttctcgtggactcgtaatgaggtggtttccatagccgcccccgggcccgtcatcatcagctttatcgtctaaatttaaacgatgagcattcatccttcatgagttacgagaagccagaactcctcgctttgctccctggctgttcttggcgtgtgtgtttccgtctcacaacccggctcctactttccccatctggcattgtcccctggcaccgcttttggcttgtcctgctcagtcttcgttcagggaacagcttcctcttaaatgtcccttttgcaggtttttagaaaccggttttcttggataaaagttggcagtgaagtggcagtttgcaagtggccagtgattcccccaactccaaagacagatttttacctttctggttatttttgttcatcttttgggcagggcaaaggttacctgagacacaattactttgggaatgtagattaagatacgttacatggaaacttgcaactggcatccgaaagaaaaactgtttttatcctgttgtacaaatacagtttttaaagcatt

SEQ ID NO: 130155 - DNA, 3915 bp, Homo sapiens
  Payload ID: 5468
  Gene Symbol: EPS15L1
  Gene Name: epidermal growth factor receptor pathway substrate 15-like 1
  ENST ID: ENST00000602009
  CDS Start-End: 897-2240
cgtattaatttatttaccattagaaatggagggcttcctgtatgtggctgggcttggtggctcacacctgtaatcccagcactttgggaggccgaggcaggcggatcacttgaggccaggagttcaagaccaacccggccatcatgttgaaacaccatctctacaaaaaatacaaaaattagccgggcctggtggcgcatgcctgtgatcccagctactcgggaggtacgagtgctgaggcacgagaattgcttgaacctgggagtcggaagttgcagtgagctgagattgtgccactacactccagcctgggcaacagagcaagatttttgtctcaaaaaaagaaaaaaaaaaaaaaaaagaggacttcctgtactttaagttgattttgataattatttgctcaagcactaacatctgctcacacttttgtctttctggtacaagtgggctccttggaggcaggtgagactgatctttgtctccctgcaaagacactgccccaccatgggagactcctgccacactcaggcagcagctaggacgaaggacaagacccggggccagggcctccctcctgaggaccttggctcccagatccgaggttgccataacgttatttccttcagggtatatgttcactttggaaaccaaggggccaagactgttctaagatcattttgtgcttttagccaagggtgatgatgggtccgtggccattttcacttggctttcggtcagagctcggtctggacattcacacaggtgtgctctcctacttactcgggctatttctttccaactaggtggaagaaaaggccaaatttgatgggatttttgaaagcctcttgcccatcaatggtttgctctctggagacaaagtcaagccagtcctcatgaactcaaagctgcctcttgatgtcctgggcagggtctgggacctcagtgacattgacaaggatgggcacttggatcgagatgagttcgctgtggccatgcacttggtgtaccgagccctggagaaggagcccgtgccctccgccctgcccccgtccctcatcccaccctccaagagaaagaagactgtgttccctggcgccgtccccgtcctgcctgccagccccccaccaaaagacagcctccgctccacgccgtcccacggcagcgtcagcagcctcaacagcacagggagcctgtcccccaagcacagcctcaagcaaacacagccaacagtgaactgggtggtgcccgtggcagacaagatgcgatttgatgagatattcctgaagaccgacctggacctggatggctacgtgagtggccaggaggtgaaggagatcttcatgcactcgggcctcacccagaaccttctagcacacatatgggccctggccgatacgaggcaaacggggaagttaagcaaagaccaattcgcgttagctatgtatttcattcagcagaaggtcagtaaaggcatcgaccctcctcaagtcctctcgccggacatggtcccgccttcggagagaggcacgcccggcccggacagttcaggctctctcggctccggggagtttactggcgtgaaggagcttgatgacatcagtcaagagattgcccagttacaaagagagaaatattcactggaacaagacattcgagaaaaggaagaggcaatcagacagaaaaccagcgaggtgcaggaattacaaaatgacctagaccgggaaacaagcagtttgcaggagctcgaggctcagaaacaggatgctcaagaccgcctggacgagatggaccagcagaaggccaagctccgagacatgctgagcgacgtccggcagaagtgccaggatgagactcagatgatctcatcactgaaaacgcaaatccaatctcaggaatctgacttaaagtcccaggaagacgatctgaaccgagccaagtcggagctgaaccgattgcagcaggaggaaacccagctggagcagagcattcaggctgggcgagtccagctggaaaccatcatcaagtccctgaagtcaacgcaagacgaaatcaaccaggcaaggagcaaactttcccagctgcatgaaagccgccaggaggcccacaggagcctggagcagtatgaccaggtgctcgatggagcccatggtgccagcctgaccgacctggccaacctgagcgaaggcgtctccctggcagagaggggcagttttggagccatggtaaaggttgaataaacgtattacagtatggggctctggtcccctggtgtgacagcagaacatcccacccgccagatctgttcatggccaacgttggttccagccaagtgcaggcggctgtctgttgtttttgctgccactttgcgcgttcacaccaggccttgcagcctggcacaggtggccatgctgaatcctggcttccagaacaaagtccaagataggcctggatcctttcagaacctgttttgaatgccctccatctctgcggaagtatttacattgggccaaccacccaagttcagagggcttctcaaacttaaccaaaattggatcagtttctgctcattgtggaaaccccacattctactaatcagggggcaggggacatctgaggggcatgtgtctatgtgtatgtgtgtttccacaaggaacaccttgaaaagcaaatgtgttgctaaagatgaggaagtaatggcaagcagcgccccagggtgttgctctttcaagtaagaattggcctctcctgaaattttggttatgtttaaaaacctctgcactttactctgacctcatgaccctggagttgtgatcaggcctggggcaggggactgtcggccccttacatttttgagagctcttgagcccctgataccaagacaggtgtgaccttttccttaggtggtcacatcccccctgttcacaccagagtctgcccctgcagcctcgaacctggggacatgtagtttcccatttcgtcttggtgctgttccgggagcggatgggccgggccgcgcatgtctggatgtttccttggtgctctgctgcctccagcagctctctccgtgctgccaccctctctcccagggctcctccctggagcccttctgctcctgggcctctgtacgtcatggattcctcttcctccctggaataagagtgagcgctcgtgctctctaaacaccacacttgcctctttatgttcaatgcttgatgtgtttcttttctcagcagccaagtcctcagtcccaaggatttatggggaagcacacgcgtcccctgggctgctgggaaggcactgctggcgagctcatctgtctcttgtgtctggcccccgctgggtgcaccgcctccctctttcctcccatactctcttttctcgtggactcgtaatgaggtggtttccatagccgcccccgggcccgtcatcatcagctttatcgtctaaatttaaacgatgagcattcatccttcatgagttacgagaagccagaactcctcgctttgctccctggctgttcttggcgtgtgtgtttccgtctcacaacccggctcctactttccccatctggcattgtcccctggcaccgcttttggcttgtcctgctcagtcttcgttcagggaacagcttcctcttaaatgtcccttttgcaggtttttagaaaccggttttcttggataaaagttggcagtgaagtggcagtttgcaagtggccagtgattcccccaactccaaagacagatttttacctttctggttatttttgttcatcttttgggcagggcaaaggttacctgagacacaattactttgggaatgtagattaagatacgttacatggaaacttgcaactggcatccgaaagaaaaactgtttttatcctgttgtacaaatacagtttttaaagcatt

SEQ ID NO: 130156 - DNA, 583 bp, Homo sapiens
  Payload ID: 5468
  Gene Symbol: EPS15L1
  Gene Name: epidermal growth factor receptor pathway substrate 15-like 1
  ENST ID: ENST00000593760
  CDS Start-End: 15-266
gagtccgcgggaagatggcggcgccgctcatccccctctcccagcagattcccactggaaattcgttgtatgaatcttattacaagcaggtcgatccggcatacacagggagggtgggggcgagtgaagctgcgctttttctaaagaagtctggcctctcggacattatccttgggaagaaaaggccaaatttgatgggatttttgaaagcctcttgcccatcaatggtttgctctctggagacaaagtcaagccagtcctcatgaactcaaagctgcctcttgatgtcctgggcagggtctgggacctcagtgacattgacaaggatgggcacttggatcgagatgagttcgctgtggccatgcacttggtgtaccgagccctggagaaggagcccgtgccctccgccctgcccccgtccctcatcccaccctccaagagaaagaagactgtgttccctggcgccgtccccgtcctgcctgccagccccccaccaaaagacagcctccgctccacgccgtcccacggcagcgtcagcagcctcaacagcacagggagcctgtcccccaagcacagcctcaag

SEQ ID NO: 130157 - DNA, 1921 bp, Homo sapiens
  Payload ID: 5468
  Gene Symbol: EPS15L1
  Gene Name: epidermal growth factor receptor pathway substrate 15-like 1
  ENST ID: ENST00000599790
  CDS Start-End: 1-640
cgaaatcaaccaggcaaggagcaaactttcccagctgcatgaaagccgccaggaggcccacaggagcctggagcagtatgaccaggtgctcgatggagcccatggtgccagcctgaccgacctggccaacctgagcgaaggcgtctccctggcagagaggggcagttttggagccatggatgatcctttcaaaaataaagccttgttatttagcaacaacacgcaagagttgcatccggatcctttccagacagaagaccccttcaaatctgacccatttaaaggagctgaccccttcaaaggcgacccgttccagaatgacccctttgcagaacagcagacaacttcaacagatccatttggaggggaccctttcaaagaaagtgacccattccgtggctctgccactgacgacttcttcaagaaacagacaaagaatgacccatttacctcggatccattcacgaaaaacccttccttaccttcgaagctcgacccctttgaatccagtgatcccttttcatcctccagtgtctcctcaaaaggatcagatccctttggaaccttagatcccttcggaagtgggtccttcaatagtgctgaaggctttgccgacttcagccagatgtccaaggaatgaaggaaagcagatgaggtgtgtcccgtccctgacacctgcgtccactctgtcccttctcggcagcccccaggcaggggcagatgggctctgtcttcggggggctgcaggggcctgctttcctcacgagttccacctgcagaggcccaggcattatccacgctgcgggaagaggcagtagccacaagcagaacacagcccccctcctggagcccatggcccaggtggtaaggggtggccggtgtggggggtcccctggagcagctgggcccagtccctgtgagcgctgctgtcagcctgaaggtggtgaggggagggagccccgggagtacctggaagacgcgtgccccaggcatgaggccccctcggggccccaccggccccatgcccaggtgccccaggtgccagtgtgactgggcagtctcccttggctgccccgtgttcactcagctggtggagcagatgagtctctgagcatcttggggttggcagcggtcgcaacttgtgatcacagaacacagattccgagaagcacttgagattctgttcaggttttcaaagacgcgtgtgtgcgtgccctggcggcgcagcagatcccacttctgaccgaggcagggtgtgtgtttacacagatgagcctgggcagagggagcccagaggccctggcatggcgcccccctccttccagcacacggagaaggcctccatccctcatatgccacgctgtgacacggtttgggactggcagaagatttagggcccagtgcacaggctcctgggcaggcgggaaaccatctcccgaaagcagaaaacgttggccacacggtggcagcagtccctcaggcgtcctggtcgtttctggttgtcgcaagtggactcctcttcctttgggaggctggatctgtcttcctcctctcactgtgagcagagggagggagagctagcagagcctgagctagggccgggatctaatgaccgccctctgcctgtccttgggccctgaaaccaggggctcttcacacacatgcagctgtgatttcagagccggtctcacttcctattggcggtgccgggccaggacagagttggacagagctgtggaaaatgggtctccaatactatcttgttttgattccagcgttccatcagctgccttcatgacacttgtacagccgcattctgagctcaaccctgaccttgcagctctgtttttcctttttggttacctatctgtttttcaagaacaacattgtggatataaataaaatgctaagggaaatgaaa

SEQ ID NO: 130158 - DNA, 4061 bp, Homo sapiens
  Payload ID: 5469
  Gene Symbol: EPS8
  Gene Name: epidermal growth factor receptor pathway substrate 8
  Uniprot ID: Q12929
  ENST ID: ENST00000281172
  CDS Start-End: 438-2906
cacttcgcctcaagcgctggagtcgaccagaactctgcggctcggctgccggcaagacccggatagcggatttcgctcctggctgcggggcgcgcactcgcccgcccgcccgctcgctcgttcctcgcgcgggcactgggcatgcgcggcgcgcggttggcactggctgcgagcgggcgggcggctccagacttcacaggcagcagctagcgaggcggtctcgcccggcgcgaggccggcgctgtgctcgcctcggagatcgctgctctttagctgggtgcagaaggcggctccgcggctcgcggacgactggctgggcgcgaatcagattggggggctttctcccggtcccctcccacctcgtctgggctcgcggcgtctccggggaaagccgtggccccgagggcggatccgagaacacacaagtgaaagacacaatgaatggtcatatttctaatcatcccagtagttttggaatgtacccatctcagatgaatggctacggatcatcacctaccttttcccagacggacagagaacatggttcaaaaacaagtgcaaaggccctttatgaacaaaggaagaattatgcacgggacagtgtcagcagtgtgtcagatatatctcaataccgtgttgaacacttgactacctttgtcctggatcggaaagatgctatgatcactgttgatgatggaataaggaaattgaaattgcttgatgccaagggcaaagtgtggactcaagatatgattcttcaagtggatgacagagctgtgagcctgattgatttagaatcaaagaatgaactggagaattttcctttaaacacaatccagcactgccaagctgtgatgcattcatgcagctatgattcagttcttgcactggtgtgcaaagagccaacccagaacaagccagatcttcatctcttccagtgtgatgaggttaaggcaaacctaattagtgaagatattgaaagtgcaatcagtgacagtaaaggagggaaacagaagaggcggcccgacgccctgaggatgatttccaatgcagaccctagtataccgcctccacccagagctcctgcccctgcgccccctgggaccgtcacccaggtggatgttagaagtcgagtggcagcctggtctgcatgggcagccgaccaaggggactttgagaaaccaaggcagtatcatgagcaggaagaaacacctgagatgatggcagcccgcattgacagagatgtgcaaatcttaaaccacattttggatgacattgaattttttatcacaaaactccaaaaagcagcagaagcattttctgagctttctaaaaggaagaaaaacaagaaaggtaaaaggaaaggaccaggagagggtgttttaacgctgcgggcaaaacctccacctcctgatgaatttcttgactgtttccaaaagtttaaacacggatttaaccttctggccaaactgaagtctcatattcagaatcctagtgctgcagatttggttcactttttgtttactccattaaatatggtggtgcaggcaacaggaggtcctgaactagccagttcagtacttagtcccctattgaataaggacacaattgatttcttaaattatactgtcaatggtgatgaacggcagctgtggatgtcattgggaggaacttggatgaaagccagagcagagtggccaaaagaacagtttattccaccatatgttccacgattccgcaatggctgggagcccccaatgctgaactttatgggagccacaatggaacaagatctttatcaactggcagaatctgtggcaaatgtagcagaacatcagcgcaaacaggaaataaaaagattatccacagagcattccagtgtatcagagtatcatccagccgatggctatgcgttcagtagcaacatttacacaagaggatcccacctggaccaaggggaagctgctgttgcttttaagccaacttctaatcgccatatagatagaaattatgaaccactcaaaacacaacccaagaaatatgccaaatccaagtatgactttgtagcaaggaacaacagtgagctctcggttctaaaggatgatattttagagatacttgatgatcggaagcaatggtggaaagttcgaaatgcaagtggagactctggatttgtgccaaataacattttggatattgtgagacctccagaatctggattggggcgtgctgatccaccttatactcatactatacagaaacaaaggatggagtatggcccaagaccagctgatactccccctgctccatcacctcctccaacaccagctcctgttcctgttccccttcccccttccactccagcacctgttcctgtgtcaaaggtcccagcaaatataacacgtcaaaacagcagctccagtgacagtggtggcagtatcgtgcgagacagccagagacacaaacaacttccggtggaccgaaggaaatctcagatggaggaagtgcaagatgaactcatccacagactgaccattggtcggagtgccgctcagaagaaattccatgtgccacggcagaacgtgccagttatcaatatcacttacgactccacaccagaggatgtgaagacgtggttacagtcaaagggattcaaccctgtgactgtcaatagtcttggagtattaaatggtgcacaacttttctctctcaataaggatgaactgaggacagtctgccctgaaggggcgagagtctatagccaaatcactgtacaaaaagctgcattggaggatagcagtggcagctccgagttacaagaaattatgagaagacgacaggaaaaaatcagtgctgccgctagtgattcaggagtggaatcttttgatgaaggaagcagtcactaatttgtttgtttgtatttaaactccattgtttttggcattattccaacatgctttgttttaagaagccttgaagggaatgtcagattcatttttcttgatgtaatttatcaccataaaaaaaaacccatgcaaacctgagtgagcacaggatttgcttctaggcccattatttttattaaaactgaaaaaatttaaactgaattttttgaccttggaaaatatttttcttactttaccaaggtgaagtttccttaattagactaattattttatccccatcccagggtataaacaggaattgttttgatagtggtggagttattcactgcaacaaagcaacaatgttgtccatgattcaaaatctaagcagtttcgattttgcctgtgaatatggtgtctgtcattcagggcatagctcactgtaggctagcctctgcttacttaagtctcttctctgacatactcaatggaagaatatttagatttatttaaagttcttaatgccaacagtttaaaaaaaaattaaaacatttgaatgaactgtaaagtacagccataccttggacatgcaaatataaatctatggagcattctcaagagagtttgtcatggctctgttgattgcaactccttgtatagcttgtattttgatttagtttatattctgcttattatgtatactgtgttcttatatatgagaaagcacaaatgcgaaagaggtcatgtcttctcaaaatctagcaaaggaagtagtctgcattggtgtgcattacagtattttgcttaatgaaagcctcagttctgaatgttgatatgagtagttaaaaggaagtggggccattttatgtgtttatctgtgtcaagtatttctggtaataagaagcacttaatttacacatattttaatcctgtgaaagattccacatagagaaaagaaagatacctaaccttcaacaaatgttatttttggaaacacaatttttgtcattaaatgttatattatttcacatatataaaacagatgttatgtaagaatgttgtatattttaacataaatcatttagagaaattatctagattcattaattttcatagtgcctttttcacatgagtcagctggaaagtctgcaataaacagtatttgctgtctgttaa

SEQ ID NO: 130159 - DNA, 1858 bp, Homo sapiens
  Payload ID: 5469
  Gene Symbol: EPS8
  Gene Name: epidermal growth factor receptor pathway substrate 8
  Uniprot ID: Q12929
  ENST ID: ENST00000542903
  CDS Start-End: 127-1815
agtattgacaaggatgcatttcatggctgatgagcacagttttgacttgtgtatccagtggaggtgttccctttggcaaatgttgagaaaccaaggcagtatcatgagcaggaagaaacacctgagatgatggcagcccgcattgacagagatgtgcaaatcttaaaccacattttggatgacattgaattttttatcacaaaactccaaaaagcagcagaagcattttctgagctttctaaaaggaagaaaaacaagaaaggtaaaaggaaaggaccaggagagggtgttttaacgctgcgggcaaaacctccacctcctgatgaatttcttgactgtttccaaaagtttaaacacggatttaaccttctggccaaactgaagtctcatattcagaatcctagtgctgcagatttggttcactttttgtttactccattaaatatggtggtgcaggcaacaggaggtcctgaactagccagttcagtacttagtcccctattgaataaggacacaattgatttcttaaattatactgtcaatggtgatgaacggcagctgtggatgtcattgggaggaacttggatgaaagccagagcagagtggccaaaagaacagtttattccaccatatgttccacgattccgcaatggctgggagcccccaatgctgaactttatgggagccacaatggaacaagatctttatcaactggcagaatctgtggcaaatgtagcagaacatcagcgcaaacaggaaataaaaagattatccacagagcattccagtgtatcagagtatcatccagccgatggctatgcgttcagtagcaacatttacacaagaggatcccacctggaccaaggggaagctgctgttgcttttaagccaacttctaatcgccatatagatagaaattatgaaccactcaaaacacaacccaagaaatatgccaaatccaagtatgactttgtagcaaggaacaacagtgagctctcggttctaaaggatgatattttagagatacttgatgatcggaagcaatggtggaaagttcgaaatgcaagtggagactctggatttgtgccaaataacattttggatattgtgagacctccagaatctggattggggcgtgctgatccaccttatactcatactatacagaaacaaaggatggagtatggcccaagaccagctgatactccccctgctccatcacctcctccaacaccagctcctgttcctgttccccttcccccttccactccagcacctgttcctgtgtcaaaggtcccagcaaatataacacgtcaaaacagcagctccagtgacagtggtggcagtatcgtgcgagacagccagagacacaaacaacttccggtggaccgaaggaaatctcagatggaggaagtgcaagatgaactcatccacagactgaccattggtcggagtgccgctcagaagaaattccatgtgccacggcagaacgtgccagttatcaatatcacttacgactccacaccagaggatgtgaagacgtggttacagtcaaagggattcaaccctgtgactgtcaatagtcttggagtattaaatggtgcacaacttttctctctcaataaggatgaactgaggacagtctgccctgaaggggcgagagtctatagccaaatcactgtacaaaaagctgcattggaggatagcagtggcagctccgagttacaagaaattatgagaagacgacaggaaaaaatcagtgctgccgctagtgattcaggagtggaatcttttgatgaaggaagcagtcactaatttgtttgtttgtatttaaactccattgtttttggcattattc

SEQ ID NO: 130160 - DNA, 655 bp, Homo sapiens
  Payload ID: 5469
  Gene Symbol: EPS8
  Gene Name: epidermal growth factor receptor pathway substrate 8
  ENST ID: ENST00000546261
  CDS Start-End: 1-205
agatattgaaagtgcaatcagtgacagtaaaggagggaaacagaagaggcggcccgacgccctgaggatgatttccaatgcagaccctagtataccgcctccacccagagctcctgcccctgcgccccctgggaccgtcacccaggtggatgttagaagtcgagtggcagcctggtctgcatgggcagccgaccaaggggactagtccctttttggacaagtttgtcatattcatggaaaggttgtcaggacagtggttggctgctggcagtggagaagggtaaaagttgagaaaccaaggcagtatcatgagcaggaagaaacacctgagatgatggcagcccgcattgacagagatgtgcaaatcttaaaccacattttggatgacattgaattttttatcacaaaactccaaaaagcagcagaagcattttctgagctttctaaaaggaagaaaaacaagaaaggtaaaaggaaaggaccaggagagggtgttttaacgctgcgggcaaaacctccacctcctgatgaatttcttgactgtttccaaaagtttaaacacggatttaaccttctggccaaactgaagtctcatattcagaatcctagtgctgcagatttggttcactttttgtttactccattaaatatggtg

SEQ ID NO: 130161 - DNA, 559 bp, Homo sapiens
  Payload ID: 5469
  Gene Symbol: EPS8
  Gene Name: epidermal growth factor receptor pathway substrate 8
  ENST ID: ENST00000536793
  CDS Start-End: 356-559
agacttcacaggcagcagctagcgaggcggtctcgcccggcgcgaggccggcgctgtgctcgcctcggagatcgctgctctttagctgggtgcagaaggcggctccgcggctcgcggacgactggctgggcgcgaatcagattggggggctttctcccggtcccctcccacctcgtctgggctcgcggcgtctccggggaaagccgtggccccgagggcggatccgaggacggtcagtaaaatcttcccctgaggacattgtgattgaactgagatctgaagaatgagacagaattaactcgaagtgaccagatcttgaatattatttctttataacacacaagtgaaagacacaatgaatggtcatatttctaatcatcccagtagttttggaatgtacccatctcagatgaatggctacggatcatcacctaccttttcccagacggacagagaacatggttcaaaaacaagtgcaaaggccctttatgaacaaaggaagaattatgcacgggacagtgtcagcagtgtgtcagatatatctcaataccgtgttgaa

SEQ ID NO: 130162 - DNA, 543 bp, Homo sapiens
  Payload ID: 5469
  Gene Symbol: EPS8
  Gene Name: epidermal growth factor receptor pathway substrate 8
  ENST ID: ENST00000535752
  CDS Start-End: 182-543
gtagaagtgacttgaagaaagagcgagaagtatagaagggcgcaggcgctagttcagtgctcgtgagcaaacaccgtctacaagattcgagtcaaacaacgtgagaacttgaaatacgtctccattctttttccttagtactctcgttcattcacttacgaacacacaagtgaaagacacaatgaatggtcatatttctaatcatcccagtagttttggaatgtacccatctcagatgaatggctacggatcatcacctaccttttcccagacggacagagaacatggttcaaaaacaagtgcaaaggccctttatgaacaaaggaagaattatgcacgggacagtgtcagcagtgtgtcagatatatctcaataccgtgttgaacacttgactacctttgtcctggatcggaaagatgctatgatcactgttgatgatggaataaggaaattgaaattgcttgatgccaagggcaaagtgtggactcaagatatgattcttcaagtggatgacagagctgtgagcctgattgatttagaatc

SEQ ID NO: 130163 - DNA, 3925 bp, Homo sapiens
  Payload ID: 5469
  Gene Symbol: EPS8
  Gene Name: epidermal growth factor receptor pathway substrate 8
  Uniprot ID: Q12929
  ENST ID: ENST00000543523
  CDS Start-End: 298-2766
agacttcacaggcagcagctagcgaggcggtctcgcccggcgcgaggccggcgctgtgctcgcctcggagatcgctgctctttagctgggtgcagaaggcggctccgcggctcgcggacgactggctgggcgcgaatcagattggggggctttctcccggtcccctcccacctcgtctgggctcgcggcgtctccggggaaagccgtggccccgagggcggatccgagctccttgggttctggaaagtgagcactagtaatggacgtcatgtggtaaacacacaagtgaaagacacaatgaatggtcatatttctaatcatcccagtagttttggaatgtacccatctcagatgaatggctacggatcatcacctaccttttcccagacggacagagaacatggttcaaaaacaagtgcaaaggccctttatgaacaaaggaagaattatgcacgggacagtgtcagcagtgtgtcagatatatctcaataccgtgttgaacacttgactacctttgtcctggatcggaaagatgctatgatcactgttgatgatggaataaggaaattgaaattgcttgatgccaagggcaaagtgtggactcaagatatgattcttcaagtggatgacagagctgtgagcctgattgatttagaatcaaagaatgaactggagaattttcctttaaacacaatccagcactgccaagctgtgatgcattcatgcagctatgattcagttcttgcactggtgtgcaaagagccaacccagaacaagccagatcttcatctcttccagtgtgatgaggttaaggcaaacctaattagtgaagatattgaaagtgcaatcagtgacagtaaaggagggaaacagaagaggcggcccgacgccctgaggatgatttccaatgcagaccctagtataccgcctccacccagagctcctgcccctgcgccccctgggaccgtcacccaggtggatgttagaagtcgagtggcagcctggtctgcatgggcagccgaccaaggggactttgagaaaccaaggcagtatcatgagcaggaagaaacacctgagatgatggcagcccgcattgacagagatgtgcaaatcttaaaccacattttggatgacattgaattttttatcacaaaactccaaaaagcagcagaagcattttctgagctttctaaaaggaagaaaaacaagaaaggtaaaaggaaaggaccaggagagggtgttttaacgctgcgggcaaaacctccacctcctgatgaatttcttgactgtttccaaaagtttaaacacggatttaaccttctggccaaactgaagtctcatattcagaatcctagtgctgcagatttggttcactttttgtttactccattaaatatggtggtgcaggcaacaggaggtcctgaactagccagttcagtacttagtcccctattgaataaggacacaattgatttcttaaattatactgtcaatggtgatgaacggcagctgtggatgtcattgggaggaacttggatgaaagccagagcagagtggccaaaagaacagtttattccaccatatgttccacgattccgcaatggctgggagcccccaatgctgaactttatgggagccacaatggaacaagatctttatcaactggcagaatctgtggcaaatgtagcagaacatcagcgcaaacaggaaataaaaagattatccacagagcattccagtgtatcagagtatcatccagccgatggctatgcgttcagtagcaacatttacacaagaggatcccacctggaccaaggggaagctgctgttgcttttaagccaacttctaatcgccatatagatagaaattatgaaccactcaaaacacaacccaagaaatatgccaaatccaagtatgactttgtagcaaggaacaacagtgagctctcggttctaaaggatgatattttagagatacttgatgatcggaagcaatggtggaaagttcgaaatgcaagtggagactctggatttgtgccaaataacattttggatattgtgagacctccagaatctggattggggcgtgctgatccaccttatactcatactatacagaaacaaaggatggagtatggcccaagaccagctgatactccccctgctccatcacctcctccaacaccagctcctgttcctgttccccttcccccttccactccagcacctgttcctgtgtcaaaggtcccagcaaatataacacgtcaaaacagcagctccagtgacagtggtggcagtatcgtgcgagacagccagagacacaaacaacttccggtggaccgaaggaaatctcagatggaggaagtgcaagatgaactcatccacagactgaccattggtcggagtgccgctcagaagaaattccatgtgccacggcagaacgtgccagttatcaatatcacttacgactccacaccagaggatgtgaagacgtggttacagtcaaagggattcaaccctgtgactgtcaatagtcttggagtattaaatggtgcacaacttttctctctcaataaggatgaactgaggacagtctgccctgaaggggcgagagtctatagccaaatcactgtacaaaaagctgcattggaggatagcagtggcagctccgagttacaagaaattatgagaagacgacaggaaaaaatcagtgctgccgctagtgattcaggagtggaatcttttgatgaaggaagcagtcactaatttgtttgtttgtatttaaactccattgtttttggcattattccaacatgctttgttttaagaagccttgaagggaatgtcagattcatttttcttgatgtaatttatcaccataaaaaaaaacccatgcaaacctgagtgagcacaggatttgcttctaggcccattatttttattaaaactgaaaaaatttaaactgaattttttgaccttggaaaatatttttcttactttaccaaggtgaagtttccttaattagactaattattttatccccatcccagggtataaacaggaattgttttgatagtggtggagttattcactgcaacaaagcaacaatgttgtccatgattcaaaatctaagcagtttcgattttgcctgtgaatatggtgtctgtcattcagggcatagctcactgtaggctagcctctgcttacttaagtctcttctctgacatactcaatggaagaatatttagatttatttaaagttcttaatgccaacagtttaaaaaaaaattaaaacatttgaatgaactgtaaagtacagccataccttggacatgcaaatataaatctatggagcattctcaagagagtttgtcatggctctgttgattgcaactccttgtatagcttgtattttgatttagtttatattctgcttattatgtatactgtgttcttatatatgagaaagcacaaatgcgaaagaggtcatgtcttctcaaaatctagcaaaggaagtagtctgcattggtgtgcattacagtattttgcttaatgaaagcctcagttctgaatgttgatatgagtagttaaaaggaagtggggccattttatgtgtttatctgtgtcaagtatttctggtaataagaagcacttaatttacacatattttaatcctgtgaaagattccacatagagaaaagaaagatacctaaccttcaacaaatgttatttttggaaacacaatttttgtcattaaatgttatattatttcacatatataaaacagatgttatgtaagaatgttgtatattttaacataaatcatttagagaaattatctagattcattaattttcatagtgcctttttcacatgagtcagctggaaagtctgcaataaacagtatttgctgtctgttaataaa

SEQ ID NO: 130164 - DNA, 2204 bp, Homo sapiens
  Payload ID: 5469
  Gene Symbol: EPS8
  Gene Name: epidermal growth factor receptor pathway substrate 8
  Uniprot ID: Q12929
  ENST ID: ENST00000540613
  CDS Start-End: 402-2090
aataccctgaatggtcttaagacatttattttttaatgtgaaaatttctgtctgcttttaaagcatgtagcttaaaattaatgagcccaacattgtgggttttaagcttaattacactagaattttaagaagcactctgctgtcagaactccgaaagctttattgtagtcacagtgttggaatgtataaaaattatagctctgttgcattagaacttagttgaccagcttttgagaagtaaaagcttgactgctggtttatatttctggcttgtgtaggaattaaagggtgctaagttaaggttggttctacaggtagctgactcagggaagagagagaatggggtgatattacaagttgagaaaccaaggcagtatcatgagcaggaagaaacacctgagatgatggcagcccgcattgacagagatgtgcaaatcttaaaccacattttggatgacattgaattttttatcacaaaactccaaaaagcagcagaagcattttctgagctttctaaaaggaagaaaaacaagaaaggtaaaaggaaaggaccaggagagggtgttttaacgctgcgggcaaaacctccacctcctgatgaatttcttgactgtttccaaaagtttaaacacggatttaaccttctggccaaactgaagtctcatattcagaatcctagtgctgcagatttggttcactttttgtttactccattaaatatggtggtgcaggcaacaggaggtcctgaactagccagttcagtacttagtcccctattgaataaggacacaattgatttcttaaattatactgtcaatggtgatgaacggcagctgtggatgtcattgggaggaacttggatgaaagccagagcagagtggccaaaagaacagtttattccaccatatgttccacgattccgcaatggctgggagcccccaatgctgaactttatgggagccacaatggaacaagatctttatcaactggcagaatctgtggcaaatgtagcagaacatcagcgcaaacaggaaataaaaagattatccacagagcattccagtgtatcagagtatcatccagccgatggctatgcgttcagtagcaacatttacacaagaggatcccacctggaccaaggggaagctgctgttgcttttaagccaacttctaatcgccatatagatagaaattatgaaccactcaaaacacaacccaagaaatatgccaaatccaagtatgactttgtagcaaggaacaacagtgagctctcggttctaaaggatgatattttagagatacttgatgatcggaagcaatggtggaaagttcgaaatgcaagtggagactctggatttgtgccaaataacattttggatattgtgagacctccagaatctggattggggcgtgctgatccaccttatactcatactatacagaaacaaaggatggagtatggcccaagaccagctgatactccccctgctccatcacctcctccaacaccagctcctgttcctgttccccttcccccttccactccagcacctgttcctgtgtcaaaggtcccagcaaatataacacgtcaaaacagcagctccagtgacagtggtggcagtatcgtgcgagacagccagagacacaaacaacttccggtggaccgaaggaaatctcagatggaggaagtgcaagatgaactcatccacagactgaccattggtcggagtgccgctcagaagaaattccatgtgccacggcagaacgtgccagttatcaatatcacttacgactccacaccagaggatgtgaagacgtggttacagtcaaagggattcaaccctgtgactgtcaatagtcttggagtattaaatggtgcacaacttttctctctcaataaggatgaactgaggacagtctgccctgaaggggcgagagtctatagccaaatcactgtacaaaaagctgcattggaggatagcagtggcagctccgagttacaagaaattatgagaagacgacaggaaaaaatcagtgctgccgctagtgattcaggagtggaatcttttgatgaaggaagcagtcactaatttgtttgtttgtatttaaactccattgtttttggcattattccaacatgctttgttttaagaagccttgaagggaatgtcagattcatttttcttgatgtaatttatcaccat

SEQ ID NO: 130165 - DNA, 2965 bp, Homo sapiens
  Payload ID: 5469
  Gene Symbol: EPS8
  Gene Name: epidermal growth factor receptor pathway substrate 8
  Uniprot ID: Q12929
  ENST ID: ENST00000543612
  CDS Start-End: 163-2631
acaatgccgaaactgacgcttagagtcccaccctttctgacgttgtgccaaaggtcacttggcacataagtaaactgagtggaatggcctctcaatattgcctggacgattgcttagaggagtatttcctgaactgtgtggaacacacaagtgaaagacacaatgaatggtcatatttctaatcatcccagtagttttggaatgtacccatctcagatgaatggctacggatcatcacctaccttttcccagacggacagagaacatggttcaaaaacaagtgcaaaggccctttatgaacaaaggaagaattatgcacgggacagtgtcagcagtgtgtcagatatatctcaataccgtgttgaacacttgactacctttgtcctggatcggaaagatgctatgatcactgttgatgatggaataaggaaattgaaattgcttgatgccaagggcaaagtgtggactcaagatatgattcttcaagtggatgacagagctgtgagcctgattgatttagaatcaaagaatgaactggagaattttcctttaaacacaatccagcactgccaagctgtgatgcattcatgcagctatgattcagttcttgcactggtgtgcaaagagccaacccagaacaagccagatcttcatctcttccagtgtgatgaggttaaggcaaacctaattagtgaagatattgaaagtgcaatcagtgacagtaaaggagggaaacagaagaggcggcccgacgccctgaggatgatttccaatgcagaccctagtataccgcctccacccagagctcctgcccctgcgccccctgggaccgtcacccaggtggatgttagaagtcgagtggcagcctggtctgcatgggcagccgaccaaggggactttgagaaaccaaggcagtatcatgagcaggaagaaacacctgagatgatggcagcccgcattgacagagatgtgcaaatcttaaaccacattttggatgacattgaattttttatcacaaaactccaaaaagcagcagaagcattttctgagctttctaaaaggaagaaaaacaagaaaggtaaaaggaaaggaccaggagagggtgttttaacgctgcgggcaaaacctccacctcctgatgaatttcttgactgtttccaaaagtttaaacacggatttaaccttctggccaaactgaagtctcatattcagaatcctagtgctgcagatttggttcactttttgtttactccattaaatatggtggtgcaggcaacaggaggtcctgaactagccagttcagtacttagtcccctattgaataaggacacaattgatttcttaaattatactgtcaatggtgatgaacggcagctgtggatgtcattgggaggaacttggatgaaagccagagcagagtggccaaaagaacagtttattccaccatatgttccacgattccgcaatggctgggagcccccaatgctgaactttatgggagccacaatggaacaagatctttatcaactggcagaatctgtggcaaatgtagcagaacatcagcgcaaacaggaaataaaaagattatccacagagcattccagtgtatcagagtatcatccagccgatggctatgcgttcagtagcaacatttacacaagaggatcccacctggaccaaggggaagctgctgttgcttttaagccaacttctaatcgccatatagatagaaattatgaaccactcaaaacacaacccaagaaatatgccaaatccaagtatgactttgtagcaaggaacaacagtgagctctcggttctaaaggatgatattttagagatacttgatgatcggaagcaatggtggaaagttcgaaatgcaagtggagactctggatttgtgccaaataacattttggatattgtgagacctccagaatctggattggggcgtgctgatccaccttatactcatactatacagaaacaaaggatggagtatggcccaagaccagctgatactccccctgctccatcacctcctccaacaccagctcctgttcctgttccccttcccccttccactccagcacctgttcctgtgtcaaaggtcccagcaaatataacacgtcaaaacagcagctccagtgacagtggtggcagtatcgtgcgagacagccagagacacaaacaacttccggtggaccgaaggaaatctcagatggaggaagtgcaagatgaactcatccacagactgaccattggtcggagtgccgctcagaagaaattccatgtgccacggcagaacgtgccagttatcaatatcacttacgactccacaccagaggatgtgaagacgtggttacagtcaaagggattcaaccctgtgactgtcaatagtcttggagtattaaatggtgcacaacttttctctctcaataaggatgaactgaggacagtctgccctgaaggggcgagagtctatagccaaatcactgtacaaaaagctgcattggaggatagcagtggcagctccgagttacaagaaattatgagaagacgacaggaaaaaatcagtgctgccgctagtgattcaggagtggaatcttttgatgaaggaagcagtcactaatttgtttgtttgtatttaaactccattgtttttggcattattccaacatgctttgttttaagaagccttgaagggaatgtcagattcatttttcttgatgtaatttatcaccataaaaaaaaacccatgcaaacctgagtgagcacaggatttgcttctaggcccattatttttattaaaactgaaaaaatttaaactgaattttttgaccttggaaaatatttttcttactttaccaaggtgaagtttccttaattagactaattattttatccccatcccagggtataaacaggaattgttttgatagtggtggagttattcactgcaacaa

SEQ ID NO: 130166 - DNA, 621 bp, Homo sapiens
  Payload ID: 5469
  Gene Symbol: EPS8
  Gene Name: epidermal growth factor receptor pathway substrate 8
  ENST ID: ENST00000536956
  CDS Start-End: 262-387
gcgggcggctccagacttcacaggcagcagctagcgaggcggtctcgcccggcgcgaggccggcgctgtgctcgcctcggagatcgctgctctttagctgggtgcagaaggcggctccgcggctcgcggacgactggctgggcgcgaatcagattggggggctttctcccggtcccctcccacctcgtctgggctcgcggcgtctccggggaaagccgtggccccgagggcggatccgagaacacacaagtgaaagacacaatgaatggtcatatttctaatcatcccagtagttttggaatgtacccatctcagatgaaaacaaaggaagaattatgcacgggacagtgtcagcagtgtgtcagatatatctcaataccgtgttgaacacttgactacctttgtcctggatcggaaagatgctatgatcactgttgatgatggaataaggaaattgaaattgcttgatgccaagggcaaagtgtggactcaagatatgattcttcaagtggatgacagagctgtgagcctgattgatttagaatcaaagaatgaactggagaattttcctttaaacacaatccagcactgccaagctgtgatgcattcatgcagctatga

SEQ ID NO: 130167 - DNA, 374 bp, Homo sapiens
  Payload ID: 5469
  Gene Symbol: EPS8
  Gene Name: epidermal growth factor receptor pathway substrate 8
  ENST ID: ENST00000543363
  CDS Start-End: 171-374
agaaggctcagagaatggaggcagccagacacccgttttagtacagtgtggagctgaaggaagtatatattaaaaaacaaacaaacaatggactttggaatcagaccttatctgccttggttttcttatcaaagaggtggaaatgtcaaaacacacaagtgaaagacacaatgaatggtcatatttctaatcatcccagtagttttggaatgtacccatctcagatgaatggctacggatcatcacctaccttttcccagacggacagagaacatggttcaaaaacaagtgcaaaggccctttatgaacaaaggaagaattatgcacgggacagtgtcagcagtgtgtcagatatatctcaataccgtgttgaa

SEQ ID NO: 130168 - DNA, 542 bp, Homo sapiens
  Payload ID: 5469
  Gene Symbol: EPS8
  Gene Name: epidermal growth factor receptor pathway substrate 8
  ENST ID: ENST00000546311
  CDS Start-End: 159-542
attgccatggtgatgaataatctgctgagttttatggttggcatgattcttctggattaggtcacttgtgttttctttctataataccagtcgactacgcttttggtaacagttaaagttccatcactaaaaagctaaacacacaagtgaaagacacaatgaatggtcatatttctaatcatcccagtagttttggaatgtacccatctcagatgaatggctacggatcatcacctaccttttcccagacggacagagaacatggttcaaaaacaagtgcaaaggccctttatgaacaaaggaagaattatgcacgggacagtgtcagcagtgtgtcagatatatctcaataccgtgttgaacacttgactacctttgtcctggatcggaaagatgctatgatcactgttgatgatggaataaggaaattgaaattgcttgatgccaagggcaaagtgtggactcaagatatgattcttcaagtggatgacagagctgtgagcctgattgatttagaatcaaagaatgaactggagaatttt

SEQ ID NO: 130169 - DNA, 577 bp, Homo sapiens
  Payload ID: 5469
  Gene Symbol: EPS8
  Gene Name: epidermal growth factor receptor pathway substrate 8
  ENST ID: ENST00000544064
  CDS Start-End: 377-577
acaggcagcagctagcgaggcggtctcgcccggcgcgaggccggcgctgtgctcgcctcggagatcgctgctctttagctgggtgcagaaggcggctccgcggctcgcggacgactggctgggcgcgaatcagattggggggctttctcccggtcccctcccacctcgtctgggctcgcggcgtctccggggaaagccgtggccccgagggcggatccgaggacggtcagtaaaatcttcccctgaggacattgtgattgaactgagatctgaagaatgagacagaattaactcgaagtgaccagatcttgaatattatttctttatgtaggctttctgtgctcttccaatcagaaacacacaagtgaaagacacaatgaatggtcatatttctaatcatcccagtagttttggaatgtacccatctcagatgaatggctacggatcatcacctaccttttcccagacggacagagaacatggttcaaaaacaagtgcaaaggccctttatgaacaaaggaagaattatgcacgggacagtgtcagcagtgtgtcagatatatctcaataccgtgtt

SEQ ID NO: 130170 - DNA, 3722 bp, Homo sapiens
  Payload ID: 5469
  Gene Symbol: EPS8
  Gene Name: epidermal growth factor receptor pathway substrate 8
  ENST ID: ENST00000543468
  CDS Start-End: 232-834
ctagcgaggcggtctcgcccggcgcgaggccggcgctgtgctcgcctcggagatcgctgctctttagctgggtgcagaaggcggctccgcggctcgcggacgactggctgggcgcgaatcagattggggggctttctcccggtcccctcccacctcgtctgggctcgcggcgtctccggggaaagccgtggccccgagggcggatccgagaacacacaagtgaaagacacaatgaatggtcatatttctaatcatcccagtagttttggaatgtacccatctcagatgaatggctacggatcatcacctaccttttcccagacggacagagaacatggttcaaaaacaagtgcaaaggccctttatgaacaaaggaagaattatgcacgggacagtgtcagcagtgtgtcagatatatctcaataccgtgttgaacacttgactacctttgtcctggatcggaaagatgctatgatcactgttgatgatggaataaggaaattgaaattgcttgatgccaagggcaaagtgtggactcaagatatgattcttcaagtggatgacagagctgtgagcctgattgatttagaatcaaagaatgaactggagaattttcctttaaacacaatccagcactgccaagctgtgatgcattcatgcagctatgattcagttcttgcactggtgtgcaaagagccaacccagaacaagccagatcttcatctcttccagtgtgatgaggttaaggcaaacctaattagtgaagatattgaaagtgcaatcagtgacagtaaaggagggaaacagaagaggcggcccgacgccctgagttgagaaaccaaggcagtatcatgagcaggaagaaacacctgagatgatggcagcccgcattgacagagatgtgcaaatcttaaaccacattttggatgacattgaattttttatcacaaaactccaaaaagcagcagaagcattttctgagctttctaaaaggaagaaaaacaagaaaggtaaaaggaaaggaccaggagagggtgttttaacgctgcgggcaaaacctccacctcctgatgaatttcttgactgtttccaaaagtttaaacacggatttaaccttctggccaaactgaagtctcatattcagaatcctagtgctgcagatttggttcactttttgtttactccattaaatatggtggtgcaggcaacaggaggtcctgaactagccagttcagtacttagtcccctattgaataaggacacaattgatttcttaaattatactgtcaatggtgatgaacggcagctgtggatgtcattgggaggaacttggatgaaagccagagcagagtggccaaaagaacagtttattccaccatatgttccacgattccgcaatggctgggagcccccaatgctgaactttatgggagccacaatggaacaagatctttatcaactggcagaatctgtggcaaatgtagcagaacatcagcgcaaacaggaaataaaaagattatccacagagcattccagtgtatcagagtatcatccagccgatggctatgcgttcagtagcaacatttacacaagaggatcccacctggaccaaggggaagctgctgttgcttttaagccaacttctaatcgccatatagatagaaattatgaaccactcaaaacacaacccaagaaatatgccaaatccaagtatgactttgtagcaaggaacaacagtgagctctcggttctaaaggatgatattttagagatacttgatgatcggaagcaatggtggaaagttcgaaatgcaagtggagactctggatttgtgccaaataacattttggatattgtgagacctccagaatctggattggggcgtgctgatccaccttatactcatactatacagaaacaaaggatggagtatggcccaagaccagctgatactccccctgctccatcacctcctccaacaccagctcctgttcctgttccccttcccccttccactccagcacctgttcctgtgtcaaaggtcccagcaaatataacacgtcaaaacagcagctccagtgacagtggtggcagtatcgtgcgagacagccagagacacaaacaacttccggtggaccgaaggaaatctcagatggaggaagtgcaagatgaactcatccacagactgaccattggtcggagtgccgctcagaagaaattccatgtgccacggcagaacgtgccagttatcaatatcacttacgactccacaccagaggatgtgaagacgtggttacagtcaaagggattcaaccctgtgactgtcaatagtcttggagtattaaatggtgcacaacttttctctctcaataaggatgaactgaggacagtctgccctgaaggggcgagagtctatagccaaatcactgtacaaaaagctgcattggaggatagcagtggcagctccgagttacaagaaattatgagaagacgacaggaaaaaatcagtgctgccgctagtgattcaggagtggaatcttttgatgaaggaagcagtcactaatttgtttgtttgtatttaaactccattgtttttggcattattccaacatgctttgttttaagaagccttgaagggaatgtcagattcatttttcttgatgtaatttatcaccataaaaaaaaacccatgcaaacctgagtgagcacaggatttgcttctaggcccattatttttattaaaactgaaaaaatttaaactgaattttttgaccttggaaaatatttttcttactttaccaaggtgaagtttccttaattagactaattattttatccccatcccagggtataaacaggaattgttttgatagtggtggagttattcactgcaacaaagcaacaatgttgtccatgattcaaaatctaagcagtttcgattttgcctgtgaatatggtgtctgtcattcagggcatagctcactgtaggctagcctctgcttacttaagtctcttctctgacatactcaatggaagaatatttagatttatttaaagttcttaatgccaacagtttaaaaaaaaattaaaacatttgaatgaactgtaaagtacagccataccttggacatgcaaatataaatctatggagcattctcaagagagtttgtcatggctctgttgattgcaactccttgtatagcttgtattttgatttagtttatattctgcttattatgtatactgtgttcttatatatgagaaagcacaaatgcgaaagaggtcatgtcttctcaaaatctagcaaaggaagtagtctgcattggtgtgcattacagtattttgcttaatgaaagcctcagttctgaatgttgatatgagtagttaaaaggaagtggggccattttatgtgtttatctgtgtcaagtatttctggtaataagaagcacttaatttacacatattttaatcctgtgaaagattccacatagagaaaagaaagatacctaaccttcaacaaatgttatttttggaaacacaatttttgtcattaaatgttatattatttcacatatataaaacagatgttatgtaagaatgttgtatattttaacataaatcatttagagaaattatctagattcattaattttcatagtgcctttttcacatgagtcagctggaaagtctgcaataaacagtatttgctgtctgttaataaa

SEQ ID NO: 130171 - DNA, 1217 bp, Homo sapiens
  Payload ID: 5470
  Gene Symbol: EPPIN
  Gene Name: epididymal peptidase inhibitor
  Uniprot ID: O95925
  ENST ID: ENST00000336443
  CDS Start-End: 565-918
acagatgatgaaaccaaggttcagagagggtcagaattcagaccaagtcagaattcaaaatctaaactggctccggggtaagtgatactaattgctgtataatactaccacctagaggaacttccaaacatggattcctcaacaaggccaaaaagaccgcattggcttacatcagtggcccacaatggtgtgattttgccttccaggggacctttgcagtgcctggagacattttcagttgttacaatcaggggtgctactggattctgatgggaagaggcctgggatgctgctaaacatcctacaatccccagttcagccccccaaacaaagaattatccagcccaaatatcaccagtggttgagaaattctgccttagatgggatggagctggggggtgggaatagagggaggagaggtcactggggagtggtgggggtgtaggcagtagggaaatgagtgaggctgccctgaggaaaagaactcctgggggcaagcaaactgaaagcaaacttccctgactctctagaattgccttgtgtctggcaaagtggggagacactatgctctctaaggcacacgggtgtaaaaccgctctttccctagggagatgtcccaaaatcagagaagaatgtgaattccaagaaagggatgtgtgtacaaaggacagacaatgccaggacaacaagaagtgttgtgtcttcagctgcggaaaaaaatgtttagatctcaaacaagatgtatgcgaaatgccaaaagaaactggcccctgcctggcttattttcttcattggtggtatgacaagaaagataatacttgctccatgtttgtctatggtggctgccagggaaacaataacaacttccaatccaaagccaactgcctgaacacctgcaagaataaacgctttccctgattggataaggatgcactggaagaactgccagaatgtggctcatgctctgagtactgttcctgtacctgacggatgctccagactggcttccagtttcactctcagcattccaagatcttagcccttcccagaacagaacgcttgcatctacctcctcttcctccatctttggctcttttgatgcacaatatccatccgttttgatttcatctttatgtcccctttatctccaacttctagaactcccagtttatacctgtgtcactctcaattttttccagtaaagtacttgatgtagt

SEQ ID NO: 130172 - DNA, 1987 bp, Homo sapiens
  Payload ID: 5470
  Gene Symbol: EPPIN
  Gene Name: epididymal peptidase inhibitor
  Uniprot ID: O95925
  ENST ID: ENST00000354280
  CDS Start-End: 68-469
tatccaaggtgcagcagctgagcattccaaattcgggaaccaccagaaaggctggcctctcttcaacatgggatcttctggacttttgagcctcctggtgctattcgtcctcttagcgaatgtccagggacctggtctgactgattggttatttcccaggagatgtcccaaaatcagagaagaatgtgaattccaagaaagggatgtgtgtacaaaggacagacaatgccaggacaacaagaagtgttgtgtcttcagctgcggaaaaaaatgtttagatctcaaacaagatgtatgcgaaatgccaaaagaaactggcccctgcctggcttattttcttcattggtggtatgacaagaaagataatacttgctccatgtttgtctatggtggctgccagggaaacaataacaacttccaatccaaagccaactgcctgaacacctgcaagaataaacgctttccctgattggataaggatgcactggaagaactgccagaatgtggctcatgctctgagtactgttcctgtacctgacggatgctccagactggcttccagtttcactctcagcattccaagatcttagcccttcccagaacagaacgcttgcatctacctcctcttcctccatctttggctcttttgatgcacaatatccatccgttttgatttcatctttatgtcccctttatctccaacttctagaactcccagtttatacctgtgtcactctcaattttttccagtaaagtacttgatgtagtcctgtgccttgaggctgagtgattgacatctttttggcacattacactttgcagagtaagggatcattgaggcttctggtgacatcattcaagggagtgaagacaatcagaactttgagagttcagagttccaggaatattgttattgttatcttcctctgtttctacaaaagattgtaaaaccctttttaggcaagggcccaaggacagtgccttagtttggatcctctagaaactaaccctgggaaaagggcatgggtgcaggtagtttgtttgagagatttcccaggacatacaagatggggagtgagatgagtaattcagggaagagaagggaagagagaagagtctattatgagctggttactactgtggctcaatcctattggggaccttttaaagaatcatgtaaaacaggcttacaaattttctttttaaaaatattttattttattttacgttccgggatacatgtgcaggacctgcaggtttgttacataggtaagcctgtgccatggtggtttgctgcacctatcaacccattacctgggtattaagccccgcatgcattagctatttatcctgatgctttccctccccctgccccctcaacagtccacgtgttctcattgttcatctcccacttgcaagtgagaacatgtggtatttacttttgttcctgcgttactttgctgaggataacggcttccagcttcatccatgtccctgcaaaggacgtgatctcatttctttttatggctgcatagtattccatggcatatatgtaccacattttctttatccagcctatcgttgatggatatttggtttgattccatgtttttgctattgtaaatagtgctgcagtgaacatacacatgcatgtatctttataaaagaatgatttatattcctttgagtgtatacccagtaatgggattgctgggtcaaatggtatttctggttctagatctttcaggaattggcacactctcttccacaatggttgaaccaatttacattcccaacagtgtaaaagcattcatgtttctccacagctttaccagcatctgttgtttctggactttttaataatcaccattctgactggcatgagatggtatctcattgtggttttgatttgcatttctctgatgatcactggtgttgagctttttttcatatgtttgttggccgcataaatgtcttcttttgagaa

SEQ ID NO: 130173 - DNA, 998 bp, Homo sapiens
  Payload ID: 5470
  Gene Symbol: EPPIN
  Gene Name: epididymal peptidase inhibitor
  ENST ID: ENST00000409554
  CDS Start-End: 396-629
gtgtgctagtaagtgtgcacgtacgatggaaaatgaatgaagaatgaggacattccaccactctccaagttatcaagatgaagacccaagatggtggcattcactctgaaggtagcctggaaagtgggagacacgctttgcccactccctgtggttgactagagcccccagcccagtgcagcctaggggtgtaaggatcaagatccattcaataagagacccttcctcccaagctgtgagctgtgggtgccagttagtcccatttgtgaccttgggaacttagtgttcccagcaagaaagggggtggctggcttgtctccagttcttatatccaaggtgcagcagctgagcattccaaattcgggaaccaccagaaaggctggcctctcttcaacatgggatcttctggacttttgagcctcctggtgctattcgtcctcttagcgaatgtccagggacctggtctgactgattggttatttcccaggagatgtcccaaaatcagagaagaatgtgaattccaagaaagggatgtgtgtacaaaggacagacaatgccaggacaacaagaagtgttgtgtcttcagctgcggaaaaaaatgtttagatctcaaacaagggaaacaataacaacttccaatccaaagccaactgcctgaacacctgcaagaataaacgctttccctgattggataaggatgcactggaagaactgccagaatgtggctcatgctctgagtactgttcctgtacctgacggatgctccagactggcttccagtttcactctcagcattccaagatcttagcccttcccagaacagaacgcttgcatctacctcctcttcctccatctttggctcttttgatgcacaatatccatccgttttgatttcatctttatgtcccctttatctccaacttctagaactcccagtttatacctgtgtcactctcaattttttccagtaaagtacttgatgtagtcctgtgccttga

SEQ ID NO: 130174 - DNA, 927 bp, Homo sapiens
  Payload ID: 5471
  Gene Symbol: EDDM3A
  Gene Name: epididymal protein 3A
  Uniprot ID: Q14507
  ENST ID: ENST00000326842
  CDS Start-End: 128-571
tccagggctctgagaaaaggaggaggacgcagactctgctcttcagatccacatgctgatccccactacaatcagtgacctgaactcagagtccaagtaggacacgcaggtggacgtggtgactgagatgacatcctctctaaagatttggggcatactcttggccctgctttgcatcctttgcaggctgtgtgtatacagtaacaacatttactggagagaattcataaaacttcattacttaagtccaagtcgagaattcaaagagtacaaatgtgatgtcctcatgagagaaaaagaggctctgaaaggcaagagctttcatatgttcatctatagcttatggttcaaaattcagcgtgcatgcatcaatgagaaggggagcgaccgatatagaaatgcatatgtatgggccccaggtgccctcaaagtactcgagtgtcactgggagaagtacaacaataggtacacagagagcagaagcttcagctacattgaattccattgtggcgtagatggatatgttgataacatagaagacctgaggattatagaacctatcagcaactagaaagtctatgcacatcctcagatattggtagagtattcagtgcttccaaagtggtgggccctgcctccatcaatagcccctgccactccccgcttacatttatgtgtcagtgttttccaactacttagagtttatgtacctcgtgatttcttgataccaaatctttgtgtggtttctgtatctgtaatacaattttgtcctaatttgcctaatttacacccacattttttccaagattcagctcatatggcatctgtcctcgactaacctaagactttcctgatattgactctctttatacctacccaagctgaacgaccctccttttcttaaataaaatatattattctaacgta

SEQ ID NO: 130175 - DNA, 584 bp, Homo sapiens
  Payload ID: 5471
  Gene Symbol: EDDM3A
  Gene Name: epididymal protein 3A
  ENST ID: ENST00000618864
  CDS Start-End: 62-505
aaccccactataaccagtgacctgaactcagagtctgagtagggtgtccctggtgactgaaatggcatcctctctgaagatctggggcagtcccttggccctgctttgcattctttgcaggctacttgtacacagcaaggacgtttcctggagagaattcataaaacttcattacttaagtccaagtcgagaattcaaagagtacaaatgtgatgtcctcatgagagaaaaagaggctctgaaaggcaagagctttcatatgttcatctatagcttatggttcaaaattcagcgtgcatgcatcaatgagaaggggagcgaccgatatagaaatgcatatgtatgggccccaggtgccctcaaagtactcgagtgtcactgggagaagtacaacaataggtacacagagagcagaagcttcagctacattgaattccattgtggcgtagatggatatgttgataacatagaagacctgaggattatagaacctatcagcaactagaaagtctatgcacatcctcagatattggtagagtattcagtgcttccaaagtggtgggccctgcctccatcaatagccc

SEQ ID NO: 130176 - DNA, 896 bp, Homo sapiens
  Payload ID: 5472
  Gene Symbol: EDDM3B
  Gene Name: epididymal protein 3B
  Uniprot ID: P56851
  ENST ID: ENST00000326783
  CDS Start-End: 99-542
ggaggactcagactctgctcttcagatccacacactgatcccaactacaaccagtgacctgaacttggagtctgagtagggcggccccggtgactgagatggcatcgtctctaaagatctggggcacactcttggccctactttgcatcctatgcacactgcttgtacagagcaaagaagtttcttggagagaattcatgaaacagcactacttaagtccaagtcgagaattcagagagtacaaatgtgatgtcctcatgagagaaaatgaagctctgaaagacaagagctctcacatgtttatctatatctcatggtacaaaatcgagcatatatgcactagtgacaactggatggatcgcttccgaaatgcatatgtatgggtccagaatcctctcaaagtactcaagtgtcaccaggagaattccaaaaatagctacacagagagcaggagcttcaactacattgaattccattgtagcatggacgggtatgttgatagcatagaagacctaaagatggtagaacctatcggcaactagaaagtctatgcacatcctcaggtattggtagagtattcagtgctttctaagtagcagcccctgcctccatcaatagtcctaccactcccctcttgcatttatttgtcaatgttttccaaatacttagagttatgaatagcataatttcttgataccataactttgcctgtgttgtttctctgcctggaatacacttttgtcttcatttacctaatttactcttatacttttgtcgacattcagctcatatggcatctgttcttgattaacccaagactttcctgatattgactctcttgatacatacccaagctgaacaatcttcccttccctaaataaattatatgactgcaa

SEQ ID NO: 130177 - DNA, 1052 bp, Homo sapiens
  Payload ID: 5473
  Gene Symbol: ELSPBP1
  Gene Name: epididymal sperm binding protein 1
  Uniprot ID: Q96BH3
  ENST ID: ENST00000339841
  CDS Start-End: 179-850
cactgatgaagaaccctcctttgagaagctgcctttgtgtcctacagacaggctggggccaaagccattcaaccaatccccagataatccagagctcttgggagcagaaccttaaagagagatcgtggagagagccagggcccagaagaactctctcaaagagaagagggcagccaagatgacccgatggtccagttacctgttgggatggacaaccttccttctctattcctatgagtcaagtggagggatgcatgaggaatgtgtctttcctttcacctacaagggatctgtttacttcacttgcacccatattcatagcttatccccttggtgtgccaccagagccgtgtacaacggccagtggaagtactgccagagtgaagattacccacgctgtatcttccctttcatctatcgaggaaaggcttataacagctgcatctcccagggcagcttcttaggcagtctgtggtgctcagtcacctctgtcttcgatgagaaacagcagtggaaattctgtgaaacgaatgagtatgggggaaattctctcaggaagccctgcatcttcccctccatctacagaaataatgtggtctctgattgcatggaggatgaaagcaacaagctctggtgcccaaccacagagaacatggataaggatggaaagtggagtttctgtgccgacaccagaatttccgcgttggtccctggctttccttgtcactttccgttcaactataaaaacaagaattattttaactgcactaacgaaggatcaaaggagaaccttgtgtggtgtgcaacttcttacaactacgaccaagaccacacctgggtgtattgctgatgctgaggaaaggagaaatatcttcagaggaagactgccgccatactgaggctgagcacagatttgtctttttcattgcatctgtcaagcttaaataaccacctttagaaataccctctgcaccacctgcttcaatcagctggtcctttgtgaagaacgtagagagaatgcggcataaccaccaataaaggagtcttgattt

SEQ ID NO: 130178 - DNA, 456 bp, Homo sapiens
  Payload ID: 5473
  Gene Symbol: ELSPBP1
  Gene Name: epididymal sperm binding protein 1
  ENST ID: ENST00000593413
  CDS Start-End: 1-231
agcaacaagctctggtgcccaaccacagagaacatggataaggatggaaagtggagtttctgtgccgacaccagaatttccgcgttggtccctggctttccttgtcactttccgttcaactataaaaacaagaattattttaactgcactaacgaaggatcaaaggagaaccttgtgtggtgtgcaacttcttacaactacgaccaagaccacacctgggtgtattgctgatgctgagatctttgcttctattttcaaggaaaggagaaatatcttcagaggaagactgccgccatactgaggctgagcacagatttgtctttttcattgcatctgtcaagcttaaataaccacctttagaaataccctctgcaccacctgcttcaatcagctggtcctttgtgaagaacgtagagagaatgcggcataaccaccaataaaggagtcttgatttaa

SEQ ID NO: 130179 - DNA, 574 bp, Homo sapiens
  Payload ID: 5473
  Gene Symbol: ELSPBP1
  Gene Name: epididymal sperm binding protein 1
  ENST ID: ENST00000596043
  CDS Start-End: 125-574
ggggccaaagccattcaaccaatccccagataatccagagctcttgggagcagaaccttaaagagagatcgtggagagagccagggcccagaagaactctctcaaagagaagagggcagccaagatgacccgatggtccagttacctgttgggatggacaaccttccttctctattcctatgagtcaagtggagattacccacgctgtatcttccctttcatctatcgaggaaaggcttataacagctgcatctcccagggcagcttcttaggcagtctgtggtgctcagtcacctctgtcttcgatgagaaacagcagtggaaattctgtgaaacgaatgagtatgggggaaattctctcaggaagccctgcatcttcccctccatctacagaaataatgtggtctctgattgcatggaggatgaaagcaacaagctctggtgcccaaccacagagaacatggataaggatggaaagtggagtttctgtgccgacaccagaatttccgcgttggtccctggctttccttgtcactttccgttcaactataaaaacaagaattattttaactgc

SEQ ID NO: 130180 - DNA, 557 bp, Homo sapiens
  Payload ID: 5473
  Gene Symbol: ELSPBP1
  Gene Name: epididymal sperm binding protein 1
  ENST ID: ENST00000597519
  CDS Start-End: 121-348
ccaaagccattcaaccaatccccagataatccagagctcttgggagcagaaccttaaagagagatcgtggagagagccagggcccagaagaactctctcaaagagaagagggcagccaagatgacccgatggtccagttacctgttgggatggacaaccttccttctctattcctatgagtcaagtggaggaatttccgcgttggtccctggctttccttgtcactttccgttcaactataaaaacaagaattattttaactgcactaacgaaggatcaaaggagaaccttgtgtggtgtgcaacttcttacaactacgaccaagaccacacctgggtgtattgctgatgctgaggaaaggagaaatatcttcagaggaagactgccgccatactgaggctgagcacagatttgtctttttcattgcatctgtcaagcttaaataaccacctttagaaataccctctgcaccacctgcttcaatcagctggtcctttgtgaagaacgtagagagaatgcggcataaccaccaataaaggagtcttgatttaaccctg

SEQ ID NO: 130181 - DNA, 696 bp, Homo sapiens
  Payload ID: 5473
  Gene Symbol: ELSPBP1
  Gene Name: epididymal sperm binding protein 1
  ENST ID: ENST00000593782
  CDS Start-End: 1-464
attacccacgctgtatcttccctttcatctatcgaggaaaggcttataacagctgcatctcccagggcagcttcttaggcagtctgtggtgctcagtcacctctgtcttcgatgagaaacagcagtggaaattctgtgaaacgaatgagtatgggggaaattctctcaggaagccctgcatcttcccctccatctacagaaataatgtggtctctgattgcatggaggatgaaagcaacaagctctggtgcccaaccacagagaacatggataaggatggaaagtggagtttctgtgccgacaccagaatttccgcgttggtccctggctttccttgtcactttccgttcaactataaaaacaagaattattttaactgcactaacgaaggatcaaaggagaaccttgtgtggtgtgcaacttcttacaactacgaccaagaccacacctgggtgtattgctgatgctgaggtgagagcagggaccaacagtggtcatttcacggatgcagaggaaaggagaaatatcttcagaggaagactgccgccatactgaggctgagcacagatttgtctttttcattgcatctgtcaagcttaaataaccacctttagaaataccctctgcaccacctgcttcaatcagctggtcctttgtgaagaacgtagagagaatgcggcataaccaccaataaag

SEQ ID NO: 130182 - DNA, 893 bp, Homo sapiens
  Payload ID: 5473
  Gene Symbol: ELSPBP1
  Gene Name: epididymal sperm binding protein 1
  ENST ID: ENST00000619003
  CDS Start-End: 28-690
agagaagagggcagccaagatgacccgatggtccagttacctgttggatggacaaccttccttctctattcctatgagtcaagtggagggatgcatgaggaatgtgtctttcctttcacctacaagggatctgtttacttcacttgcacccatattcatagcttatccccttggtgtgccaccagagccgtgtacaacggccagtggaagtactgccagagtgaagattacccacgctgtatcttccctttcatctatcgaggaaaggcttataacagctgcatctcccagggcagcttcttaggcagtctgtggtgctcagtcacctctgtcttcgatgagaaacagcagtggaaattctgtgaaacgaatgagtatgggggaaattctctcaggaagccctgcatcttcccctccatctacagaaataatgtggtctctgattgcatggaggatgaaagcaacaagctctggtgcccaaccacagagaacatggataaggatggaaagtggagtttctgtgccgacaccagaatttccgcgttggtccctggctttccttgtcactttccgttcaactataaaaacaagaattattttaactgcactaacgaaggatcaaaggagaaccttgtgtggtgtgcaacttcttacaactacgaccaagaccacacctgggtgtattgctgatgctgaggtgaggaaaggagaaatatcttcagaggaagactgccgccatactgaggctgagcacagatttgtctttttcattgcatctgtcaagcttaaataaccacctttagaaataccctctgcaccacctgcttcaatcagctggtcctttgtgaagaacgtagagagaatgcggcataaccaccaataaaggagtcttg

SEQ ID NO: 130183 - DNA, 3633 bp, Homo sapiens
  Payload ID: 5474
  Gene Symbol: EPM2A
  Gene Name: epilepsy, progressive myoclonus type 2A, Lafora disease (laforin)
  Uniprot ID: O95278
  ENST ID: ENST00000367519
  CDS Start-End: 527-1522
tacagacaaagaacctgagacctgctagagtaagtgacttggttaagatagggagcgctccagagaccaggtccaagatcttcccccgtttcacaattagaaggcggctgtctagaggtcattcccttccttatgatcctcataaagttaatttccagtctcttggagagagaactggacgatcgcctggcttagaagttttcctccctccccgaaccccgttttctcttccatttcttccggtcgcgtgtccccagcgcccacaggtggaaatcaaccgcccgcggggttgcggggcacaaagaggcagctagcggctccgctgaccccttcccgccggcctggacgaagtctgggctcgggagccgcgtgatgcatcccaaagaaggcgcagaacagcacgtgttctccccggtgcccggggctcccacaccaccgcccaatcgctgcggccgcctagtgctcgggccgcgcctgccggccgcggggactccgggcccgggtattcgcgccgccgccgcccgccatgcgcttccgctttggggtggtggtgccacccgccgtggccggcgcccggccggagctgctggtggtggggtcgcggcccgagctggggcgttgggagccgcgcggtgccgtccgcctgaggccggccggcaccgcggcgggcgacggggccctggccctgcaggagccgggcctgtggctcggggaggtggagctggcggccgaggaggcggcgcaggacggggcggagccgggccgcgtggacacgttctggtacaagttcctgaagcgggagccgggaggagagctctcctgggaaggcaatggacctcatcatgaccgttgctgtacttacaatgaaaacaacttggtggatggtgtgtattgtctcccaataggacactggattgaggccactgggcacaccaatgaaatgaagcacacaacagacttctattttaatattgcaggccaccaagccatgcattattcaagaattctaccaaatatctggctgggtagctgccctcgtcaggtggaacatgtaaccatcaaactgaagcatgaattggggattacagctgtaatgaatttccagactgaatgggatattgtacagaattcctcaggctgtaaccgctacccagagcccatgactccagacactatgattaaactatatagggaagaaggcttggcctacatctggatgccaacaccagatatgagcaccgaaggccgagtacagatgctgccccaggcggtgtgcctgctgcatgcgctgctggagaagggacacatcgtgtacgtgcactgcaacgctggggtgggccgctccaccgcggctgtctgcggctggctccagtatgtgatgggctggaatctgaggaaggtgcagtatttcctcatggccaagaggccggctgtctacattgacgaagaggccttggcccgggcacaagaagattttttccagaaatttgggaaggttcgttcttctgtgtgtagcctgtagctggtcagcctgcttctgccccctcctgatttccctaaggagcctgggatgatgttggtcaaatgacctagaaacaaggattctacctgaactgaaaggactgtgtgacctcccccaagccaaccactttcacctgggatgactttcgattatgctttgttttggggctgtatttttgaaatactctacaagaaagctgtggctcaacacatgagaagaagcacgaagcagttaggctgtacatcagacagaagggtaatgcgtgcagttcctgctgcctgcaggcagacgaggcctttgctttacagcactgtatgtgttgcacgatggatccgtgacagcactttcctgttgcactgaaactcttggccatgtagaggaaaagatatggagttatgtggatttcatcactagtatgtgtgcgtgagctggtcagttgccaaaggaggaaataaggttagaagcctgaaccgttacaaaagaagagctcactatggtcaaaaagtgatggctttcaggacttgttttttatcctgcctcacagttgttaaagtctgttccaaggcatcaccttccttctctacccaacaaccctgtgtaacaactaaagtagaattatctctcatttgttgttgtttttcctcaaaattaccaaacaaagcaaaaaatacccttgttttttatagttgagatgtcaagaagttaaattgaggcttaatgagcataggtagcttgtccaaggtctcatgaccagtcaagggcaagctggagttaataatctatatttatttgactcagcactgttttcatcacaacttgttttcccagcatcatgtagtgcatttagttttgtctttctcagggtatagtcaatatgcctgcaggagtttctatagcgagacatagaatagtattctgatcagttgccaaagaatctaggaaattagttgtattttgtgcaagctaatttaaaaacatgatgggctgttttaagaccagagtggaaattcatgagaggaactatactaccaaaagagcccaaatgaccaaatccatggataattgcttcacagccttggccatcctggctcagctctcaatttagtataatatgcagttcctgtgcctccagactatgcagctcatcaccctaggttctacaggaaatacagagatgaacaactttgccttcaaaaatgtgctgcctagaaacagacctgcattcaaccaactgtaatgcaggattggaccatgaatgatatgctagaatagaagaaagagaagtgtttttttaattgagagcctctatgtgcaaggtgatatataatcatatccagtttaatcttcacaatatccaatgaagaaggtctcattatctccatgataaagatggggaaactaaggtcagaagggttaactcaactgtctattgtcacatgatgaataaatagatgaagtgagatacaaagctgggtttgattcaaagcccttactttcctaattaaactatgatgcgtatttatttttctgcaccttcctttcttccacaaacacatattgatagatgcaagagactcttatttagaaggcgtgggggacaagaaggatacaaggtaagtttcagtggagctcagaggacggggagatagaactgtggcacttaggggagatgacatttgctttgggcagaggcagctagccaggacacatttccactataattttacaaagttaaatttataagctagcattaagtaaagtgaagtccagctcccttgctaaaaataactagaggtaataattggtattcaggtaactcatttacagtcataatgtgttgtgaaaatttaatcttaaaaattaaatttttaaactatgtgggtctgtgaatttctttaatgtctaagaaatccagcttcataatttccatgatacaaagatcttttttcaggtggatttttacctttgttccttttgctctgatagacaaaatcagtttaggactattaaagaatgttttggaataaactgtctttttcctcaatgaatgggatgtctaatgtatttcaaaatcacccaaaacttttggcaaataaaagcatttaaaaaga

SEQ ID NO: 130184 - DNA, 1037 bp, Homo sapiens
  Payload ID: 5474
  Gene Symbol: EPM2A
  Gene Name: epilepsy, progressive myoclonus type 2A, Lafora disease (laforin)
  ENST ID: ENST00000435470
  CDS Start-End: 1-713
tggacacgttctggtacaagttcctgaagcgggagccgggaggagagctctcctgggaaggcaatggacctcatcatgaccgttgctgtacttacaatgaaaacaacttggtggatggtgtgtattgtctcccaataggacactggattgaggccactgggcacaccaatgaaatgaagcacacaacagacttctattttaatattgcaggccaccaagccatgcattattcaagaattctaccaaatatctggctgggtagctgccctcgtcaggtggaacatgtaaccatcaaactgaagcatgaattggggattacagctgtaatgaatttccagactgaatgggatattgtacagaattcctcaggctgtaaccgctacccagagcccatgactccagacactatgattaaactatatagggaagaaggcttggcctacatctggatgccaacaccagatatgagcaccgaaggccgagtacagatgctgccccaggcggtgtgcctgctgcatgcgctgctggagaagggacacatcgtgtacgtgcactgcaacgctggggtgggccgctccaccgcggctgtctgcggctggctccagtatgtgatgggctggaatctgaggaaggtgcagtatttcctcatggccaagaggccggctgtctacattgacgaagaggcagctagccaggacacatttccactataattttacaaagttaaatttataagctagcattaagtaaagtgaagtccagctcccttgctaaaaataactagaggtaataattggtattcaggtaactcatttacagtcataatgtgttgtgaaaatttaatcttaaaaattaaatttttaaactatgtgggtctgtgaatttctttaatgtctaagaaatccagcttcataatttccatgatacaaagatcttttttcaggtggatttttacctttgttccttttgctctgatagacaaaatcagtttaggactattaaagaatgttttggaataaactgtctttttcctcaat

SEQ ID NO: 130185 - DNA, 736 bp, Homo sapiens
  Payload ID: 5474
  Gene Symbol: EPM2A
  Gene Name: epilepsy, progressive myoclonus type 2A, Lafora disease (laforin)
  ENST ID: ENST00000450221
  CDS Start-End: 1-512
gcaatggacctcatcatgaccgttgctgtacttacaatgaaaacaacttggtggatggtgtgtattgtctcccaataggacactggattgaggccactgggcacaccaatgaaatgaagcacacaacagacttctattttaatattgcaggccaccaagccatgcattattcaagaattctaccaaatatctggctgggtagctgccctcgtcaggtggaacatgtaaccatcaaactgaagcatgaattggggattacagctgtaatgaatttccagactgaatgggatattgtacagaattcctcaggctgtaaccgctacccagagcccatgactccagacactatgattaaactatatagggaagaaggcttggcctacatctggatgccaacaccagatatgagcaccgaagatgagaagaggacagctgacatgtgctgctcggggatgtgggaagagactgcagattttggccttgggattctggattacttaaaacaaaagtaagacacaaatatctccctaaccttattatatctcgtagaagatggcagatgggtgacgactggtgcaagctcacacaggaaagaaaaatttcataagcattgaatagttgtgttactaattagtgggacaatcttcgtaactccttcttcccccacttctgcccaatatgtaataataggcatgctctgaataattgtactcaaataagaaattactcctccaaa

SEQ ID NO: 130186 - DNA, 3641 bp, Homo sapiens
  Payload ID: 5474
  Gene Symbol: EPM2A
  Gene Name: epilepsy, progressive myoclonus type 2A, Lafora disease (laforin)
  Uniprot ID: O95278
  ENST ID: ENST00000611340
  CDS Start-End: 956-1537
taatgctcatgtgtttgagatgtgagagtgaatgtgtttgagatatgagaatgaattgtgaatgaatgagagtgaatgctcatgtgtttgagatgtgagaatgaattgtgcttgcagaaagccagtaaacagatagttcaatgagataagagctgtcttaggagattgtacctttttctgaaagagctgtggtaaggctgacaggtcaagattgactgactggctgggccttcaccaggtgtgagaagtcttagtaccattgttggtcccaggacttctcttccagtaagctcattaaaatgttttatttttccaacaccatcaccaatttgagtttcattatctggaatatcttctaagttttttgctctgatgctggcatcctgggcaaagtccagatagctcaggcctgtagtgccgccagtacatacaggagtgagaagcccaacagtttcaattccgtgatctttatggttttaaatggtaaattgtaatgccacatgaatgtagcgttttatcctgaattttagctaagtaaaacttcagagaattaagggaatgatttttttctcttttttatttgacagggtctggctctgtcacccaggctggagtacagtggcatgatcttggctcactgcagcctctgcctcccaggctcaagccatcctcccatgtcaaccttctgagtagctgaaaccacaggcatgtttcaccatggccagctaatttttgtattttttagtagaaatggggtttcgccatgttgcccaggcctgtctcgaactcctgaagcacaagtgatccacctgcctaggtgacccaaagtaatgggattacaggcaatggacctcatcatgaccgttgctgtacttacaatgaaaacaacttggtggatggtgtgtattgtctcccaataggacactggattgaggccactgggcacaccaatgaaatgaagcacacaacagacttctattttaatattgcaggccaccaagccatgcattattcaagaattctaccaaatatctggctgggtagctgccctcgtcaggtggaacatgtaaccatcaaactgaagcatgaattggggattacagctgtaatgaatttccagactgaatgggatattgtacagaattcctcaggctgtaaccgctacccagagcccatgactccagacactatgattaaactatatagggaagaaggcttggcctacatctggatgccaacaccagatatgagcaccgaaggccgagtacagatgctgccccaggcggtgtgcctgctgcatgcgctgctggagaagggacacatcgtgtacgtgcactgcaacgctggggtgggccgctccaccgcggctgtctgcggctggctccagtatgtgatgggctggaatctgaggaaggtgcagtatttcctcatggccaagaggccggctgtctacattgacgaagaggccttggcccgggcacaagaagattttttccagaaatttgggaaggttcgttcttctgtgtgtagcctgtagctggtcagcctgcttctgccccctcctgatttccctaaggagcctgggatgatgttggtcaaatgacctagaaacaaggattctacctgaactgaaaggactgtgtgacctcccccaagccaaccactttcacctgggatgactttcgattatgctttgttttggggctgtatttttgaaatactctacaagaaagctgtggctcaacacatgagaagaagcacgaagcagttaggctgtacatcagacagaagggtaatgcgtgcagttcctgctgcctgcaggcagacgaggcctttgctttacagcactgtatgtgttgcacgatggatccgtgacagcactttcctgttgcactgaaactcttggccatgtagaggaaaagatatggagttatgtggatttcatcactagtatgtgtgcgtgagctggtcagttgccaaaggaggaaataaggttagaagcctgaaccgttacaaaagaagagctcactatggtcaaaaagtgatggctttcaggacttgttttttatcctgcctcacagttgttaaagtctgttccaaggcatcaccttccttctctacccaacaaccctgtgtaacaactaaagtagaattatctctcatttgttgttgtttttcctcaaaattaccaaacaaagcaaaaaatacccttgttttttatagttgagatgtcaagaagttaaattgaggcttaatgagcataggtagcttgtccaaggtctcatgaccagtcaagggcaagctggagttaataatctatatttatttgactcagcactgttttcatcacaacttgttttcccagcatcatgtagtgcatttagttttgtctttctcagggtatagtcaatatgcctgcaggagtttctatagcgagacatagaatagtattctgatcagttgccaaagaatctaggaaattagttgtattttgtgcaagctaatttaaaaacatgatgggctgttttaagaccagagtggaaattcatgagaggaactatactaccaaaagagcccaaatgaccaaatccatggataattgcttcacagccttggccatcctggctcagctctcaatttagtataatatgcagttcctgtgcctccagactatgcagctcatcaccctaggttctacaggaaatacagagatgaacaactttgccttcaaaaatgtgctgcctagaaacagacctgcattcaaccaactgtaatgcaggattggaccatgaatgatatgctagaatagaagaaagagaagtgtttttttaattgagagcctctatgtgcaaggtgatatataatcatatccagtttaatcttcacaatatccaatgaagaaggtctcattatctccatgataaagatggggaaactaaggtcagaagggttaactcaactgtctattgtcacatgatgaataaatagatgaagtgagatacaaagctgggtttgattcaaagcccttactttcctaattaaactatgatgcgtatttatttttctgcaccttcctttcttccacaaacacatattgatagatgcaagagactcttatttagaaggcgtgggggacaagaaggatacaaggtaagtttcagtggagctcagaggacggggagatagaactgtggcacttaggggagatgacatttgctttgggcagaggcagctagccaggacacatttccactataattttacaaagttaaatttataagctagcattaagtaaagtgaagtccagctcccttgctaaaaataactagaggtaataattggtattcaggtaactcatttacagtcataatgtgttgtgaaaatttaatcttaaaaattaaatttttaaactatgtgggtctgtgaatttctttaatgtctaagaaatccagcttcataatttccatgatacaaagatcttttttcaggtggatttttacctttgttccttttgctctgatagacaaaatcagtttaggactattaaagaatgttttggaataaactgtctttttcctcaatgaatgggatgtctaatgtatttcaaaatcacccaaaacttttggcaaataaaagcattt

SEQ ID NO: 130187 - DNA, 1694 bp, Homo sapiens
  Payload ID: 5474
  Gene Symbol: EPM2A
  Gene Name: epilepsy, progressive myoclonus type 2A, Lafora disease (laforin)
  Uniprot ID: O95278
  ENST ID: ENST00000618445
  CDS Start-End: 358-1311
gagaactggacgatcgcctggcttagaagttttcctccctccccgaaccccgttttctcttccatttcttccggtcgcgtgtccccagcgcccacaggtggaaatcaaccgcccgcggggttgcggggcacaaagaggcagctagcggctccgctgaccccttcccgccggcctggacgaagtctgggctcgggagccgcgtgatgcatcccaaagaaggcgcagaacagcacgtgttctccccggtgcccggggctcccacaccaccgcccaatcgctgcggccgcctagtgctcgggccgcgcctgccggccgcggggactccgggcccgggtattcgcgccgccgccgcccgccatgcgcttccgctttggggtggtggtgccacccgccgtggccggcgcccggccggagctgctggtggtggggtcgcggcccgagctggggcgttgggagccgcgcggtgccgtccgcctgaggccggccggcaccgcggcgggcgacggggccctggccctgcaggagccgggcctgtggctcggggaggtggagctggcggccgaggaggcggcgcaggacggggcggagccgggccgcgtggacacgttctggtacaagttcctgaagcgggagccgggaggagagctctcctgggaaggcaatggacctcatcatgaccgttgctgtacttacaatgaaaacaacttggtggatggtgtgtattgtctcccaataggacactggattgaggccactgggcacaccaatgaaatgaagcacacaacagacttctattttaatattgcaggccaccaagccatgcattattcaagaattctaccaaatatctggctgggtagctgccctcgtcaggtggaacatgtaaccatcaaactgaagcatgaattggggattacagctgtaatgaatttccagactgaatgggatattgtacagaattcctcaggctgtaaccgctacccagagcccatgactccagacactatgattaaactatatagggaagaaggcttggcctacatctggatgccaacaccagatatgagcaccgaaggccgagtacagatgctgccccaggcggtgtgcctgctgcatgcgctgctggagaagggacacatcgtgtacgtgcactgcaacgctggggtgggccgctccaccgcggctgtctgcggctggctccagtatgtgatgggctggaatctgaggaaggtgcagtatttcctcatggccaagaggccggctgtctacattgacgaagaggcagctagccaggacacatttccactataattttacaaagttaaatttataagctagcattaagtaaagtgaagtccagctcccttgctaaaaataactagaggtaataattggtattcaggtaactcatttacagtcataatgtgttgtgaaaatttaatcttaaaaattaaatttttaaactatgtgggtctgtgaatttctttaatgtctaagaaatccagcttcataatttccatgatacaaagatcttttttcaggtggatttttacctttgttccttttgctctgatagacaaaatcagtttaggactattaaagaatgttttggaataaactgtctttttcctcaatgaatgggatgtctaatgtatttcaaaatcacccaaaacttttggcaaataaaagcattt

SEQ ID NO: 130188 - DNA, 1539 bp, Homo sapiens
  Payload ID: 5475
  Gene Symbol: EPYC
  Gene Name: epiphycan
  Uniprot ID: Q99645
  ENST ID: ENST00000261172
  CDS Start-End: 94-1062
acagccattggtcaggggcaaataccactagctctgcatcctcagtcactttgtgccatttcatcaggtcagagccaaaggaaagcttgaaaaatgaagacattagcaggacttgttctgggacttgtcatctttgatgctgctgtgactgccccaactctagagtccatcaactatgactcagaaacctatgatgccaccttagaagacctggataatttgtacaactatgaaaacatacctgttgataaagttgagattgaaatagccacagtgatgccttcagggaacagagagctcctcactccacccccacagcctgagaaggcccaggaagaggaagaggaggaggaatctactcccaggctgattgatggctcttctccccaggagcctgaattcacaggggttctggggccacacacaaatgaagactttccaacctgtcttttgtgtacttgtataagtaccaccgtgtactgtgatgaccatgaacttgatgctattcctccgctgccaaagaacaccgcttatttctattcccgctttaacagaattaaaaagatcaacaaaaatgactttgcaagcctaagtgatttaaaaaggattgatctgacatcaaatttaatatctgagattgatgaagatgcattccgaaaactgcctcaacttcgagagcttgtcctgcgtgacaacaaaataaggcagctcccagaattgccaaccactttgacatttattgatattagcaacaatagacttggaaggaaagggataaagcaagaagcatttaaagacatgtatgatctccatcatctgtacctcactgataacaacttggaccacatccctctgccactcccagaaaatctacgagcccttcacctccagaataacaacattctggaaatgcacgaagatacgttctgcaatgttaaaaatttgacttatattcgtaaggcactagaggacattcgattggatggaaaccctattaatctcagcaaaactcctcaagcatacatgtgtctacctcgtctgcctgttgggagccttgtctaatttcagataatggttagcattacgatggctactataaataaaccattcttactgctctcttccaaaacaaaactcagcatgatactttgagattgtgttctgagagatgatatgactacataaaatacaattaaaaatgttataatgaaaatgtagtaatttaagaaaacaccagatgagttaggaataaacctataacatttacaaaaagagcaaaactaagtgatagaaaatatttcacacatgttcttatagatcatgtatcacttgcaagttttaggagttcatatcctatatcatttcaaattaagtacataataaagtaaaattttgaaatgaacactttaggtatttttgccaagatttagatgtttttaattaaacttttctcttcctttttttttcactaaagcatgtttattcccctaatccattaaagagcatgaaaaaaagaataaatgtatttgaaaattataa

SEQ ID NO: 130189 - DNA, 790 bp, Homo sapiens
  Payload ID: 5475
  Gene Symbol: EPYC
  Gene Name: epiphycan
  ENST ID: ENST00000551767
  CDS Start-End: 89-790
acagccattggtcaggggcaaataccactagctctgcatcctcagtcactttgtgccatttcatcaggtcagagccaaagcttgaaaaatgaagacattagcaggacttgttctgggacttgtcatctttgatgctgctgtgactgccccaactctagagtccatcaactatgactcagaaacctatgatgccaccttagaagacctggataatttgtacaactatgaaaacatacctgttgataaagttgagattgaaatagccacagtgatgccttcagggaacagagagctcctcactccacccccacagcctgagaaggcccaggaagaggaagaggaggaggaatctactcccaggctgattgatggctcttctccccaggagcctgaattcacaggggttctggggccacacacaaatgaagactttccaacctgtcttttgtgtacttgtataagtaccaccgtgtactgtgatgaccatgaacttgatgctattcctccgctgccaaagaacaccgcttatttctattcccgctttaacagaattaaaaagatcaacaaaaatgactttgcaagcctaagtgatttaaaaaggattgatctgacatcaaatttaatatctgagattgatgaagatgcattccgaaaactgcctcaacttcgagagcttgtcctgcgtgacaacaaaataaggcagctcccagaattgccaaccactttgacatttattgatattagcaacaatagacttggaaggaaagggataaagcaagaagcatttaaa

SEQ ID NO: 130190 - DNA, 15530 bp, Homo sapiens
  Payload ID: 5476
  Gene Symbol: EPPK1
  Gene Name: epiplakin 1
  ENST ID: ENST00000568225
  CDS Start-End: 89-15280
ccagccgtgtgtgatgagtggccacaccttgcctcctcttcccgtcccaggcaccaacagcacagagcaggccagtgtacccagagccatggcagccacgctgggagccggcacgccccccaggccccaggccaggagcatagctggggtgtatgtggaggcctcgggccaggcccagagtgtctacgccgccatggagcagggcctcctgcctgctgggctcgggcaggctctgctagaggcccaggcagccactgggggcctggtggacctcgcccggggccagctgctccctgtgtccaaggccctgcagcagggtctggtggggctggagctgaaggagaagctgctggccgctgagcgtgccactacgggctatcctgacccctacggcggtgagaagctggccctctttcaggccatcgggaaggaggttgtggacagggccctggggcagagctggctggaggtccaactggccactgggggcctggtggaccccgcccagggagtgctcgtggcccctgagccagcctgccaccagggcctcctggaccgggagacatggcacaagctgtcagagcttgagcctggcacaggtgacctgcgcttcctcgaccccaacacgctggagcggctgacataccaccagctgctggaaaggtgtgtgcgtgcccccggctcggggctagccttgctgcccctcaagatcaccttccgctccatgggcggggcggtgagtgcagctgagctgctggaggtgggcatcctggacgagcaggctgtgcagggtctgcgggagggcaggctggccgcagtggacgtgagtgcacgtgccgaggtgcggcgctacctggagggtaccggcagcgtggccggggttgtcctgctgcccgaaggccacaagaagagctttttccaggctgccaccgagcacctgctcccaatgggcaccgcgctgccactcctagaggcccaggctgccacccacaccctggtggaccccatcacaggccagcggctgtgggtagacgaggcagtcagggcgggcctggtcagcccagagctccatgagcagctcctggtggccgagcaggccgtgacagggcaccacgaccccttcagtggctcccaaatcccccttttccaggccatgaagaaggggctagtggacaggccactggcactgcggctcttggatgcccagctggccacaggcgggctggtctgtccagcacgcaggctccggctgcccctggaggccgccctgcgctgcggctgcctggatgaagacactcagcggcagctctcgcaggctggcagcttctcagacggcacgcacggcggcctgcgctatgaacagctgctggccctctgtgtcaccgacccagagaccgggcttgccttcctgccactctcagggggaccccggggaggggagccccagggacccccattcatcaagtacagcactcggcaggccctgagcacggccacagccaccgtctctgtggggaagttccggggccggcccgtgtccctctgggagctgctcttctctgaggccatctcctcagagcagagggcgatgctggcccagcagtaccaggaagggaccctctccgtggagaagctggccgctaagctgagcgccaccctcgagcaggctgcagccactgccagggtcaccttttctgggctgagggacaccgtgacaccaggagagctgctgaaagccgagatcatcgaccaggacctgtacgagcggctggagcatggacaggccacagccaaggatgtgggcagcctggcctcggtgcagaggtacctgcagggtacgggctgcattgctggcctgctgctccctggctcccaggaacgcctgagcatctatgaggcccgatgcaaggggctcctccggcccggcactgccctcatccttctggaggcacaagctgccacaggcttcatcatcgacccaaaagcaaacaaggggcactccgttgaggaggcactgagggctgctgtcattgggcctgatgtgttcgcgaagctgctgtcggctgagcgcgctgtcactggctacactgacccctacaccgggcagcagatctccctcttccaggccatgcagaagggcctcatcgtccgggagcacggcatccgcctgctggaggcccagatcgccacgggcggcgtcatcgaccccgtgcacagccaccgcgtgcccgtggacgtggcctaccggcgcggctacttcgatcagatgctgaacttgatcctgttggacccttctgacgacaccaagggcttcttcgaccccaacacgcacgagaacctcacgtacctgcagcttctggagcgctgtgtgcgtgaccccgagacgggcctgtacctcctgccactcagcagcacgcagtccccgctggtggacagtgccacccagcaggccttccagaacctgctgctctccgtgaagtatggacggtttcaggggcagagggtctccgcgtgggagctgatcaactctgagtacttcagcgagggccgcaggaggcagctgctgcgtcgctaccggcagcgcgaggtcacgctggggcaggtggcaaagctgctggaggcggagacgcagagacaggcggacatcatgctgcccgcactgcggagccgggtcaccgtccaccagctcctggaggccggtatcattgaccagcagctgttggaccaagtgctggccgggacaatcagcccggaggccctcctactcatggacggcgtccgcaggtacctgtgcggcctgggagctgtgggcggtgtgcggctgctgccctctggccagcggctcagcctctaccaggccatgaggcagaagctgctggggcccagggtggccctggccctgctggaggcccaggcggccaccggaaccatcatggaccctcacagcccagagagcctctcggtggatgaggccgtgcgcaggggtgtggtggggccggagctgtatggcaggctgaagcgggctgagggtgccattgctggcttcagagaccccttctctgggaagcaggtgtctgtgttccaggccatgaagaaaggtctcatcccttgggagcaagctgcccgcctcctggaggctcaagtggccacaggagggatcattgaccccaccagccaccaccacctccccatgccagtggccattcagcgtggctatgttgaccaggagatggagacagccttgtccagctcctccgaaaccttccccacaccggacggccaggggcgcacgagctatgcccagctcctggaggagtgccccagggatgagacttctggccttcacctcctgcccctgccagaaagtgctcctgccctccccaccgaggagcaggtccagaggagcctgcaggccgtgccgggggccaaggatggcacatccctctgggacctgctcagctcctgccacttcaccgaggagcaacggaggggcctgctggaggacgtgcaggaggggaggaccactgtgccacagctgctagcctctgtgcagaggtgggtacaggagaccaagctcctggcccaggcccgcgtcatggtgcccggcccacggggtgaggtacccgctgtctggctgctggatgctggcatcatcacccaggagacccttgaggccctggctcagggcacgcagtcgcccgcccaggtcgccgagcagccggcggtgaaggcctgcctgtggggcacaggctgcgtggccggtgtgctgctacagccctctggggccaaggccagcatcgcccaggccgtgagggatggcctcctgcccacaggcctgggccagaggctgctggaagcccaggtggcatctggcttccttgttgaccccctgaacaaccagagactgtcagtggaggacgcggttaaggtcggcctggtgggcagggagctgagtgagcagctcgggcaggccgagagggcggcggccgggtacccagatccctactctagggcctccctctctctgtggcaggccatggagaaggggctcgtgccacagaacgagggcttgcccctcctgcaggtgcagctggccacagggggtgtggtggaccctgtccacggggtgcacctgccccaggcggcagcctgcagactcggccttctggacacacagacgagccaggtgctgactgcagttgacaaggacaacaagttcttctttgaccccagtgcgcgggaccaggtgacctaccagcagctcagggagcgctgcgtgtgcgactccgagaccggattgttgctgttgccactgccctcagacacagtgcttgaggtggacgaccacaccgcggtggctctgagggccatgaaggtgcccgtcagcacagggaggtttaaggggtgtagcgtgtcactctgggacctgctgctctccgaatacgttggcgctgacaagcggcgggagctggtggcactctgtcggtctgggagggctgcggccctgcggcaggtggtcagcgcagtcaccaccctggtcgaggctgcagagaggcagcccctgcaggccaccttcagagggctccggaagcaggtgtcagccagggacctgttcagggcgcagctgatcagcaggaagacgctggacgagctgagccaggggacaacgactgtgaaggaggtggcggagatggacagcgtgaagcggtccctggagggaggcaacttcattgccggggtccttatccagggcacccaggagaggatgagcatcccagaggccctgaggaggcacatcctgcggcctggcacagccctggtgctgctggaggcacaggcagctaccggcttcatcatcgaccccgtggagaaccggaagctgaccgtggaggaggcgttcaaagcaggaatgttcgggaaagaaacctacgtgaagctgctgtcggccgagcgcgccgtcaccggctacaccgacccctataccgggcagcagatctccctcttccaggccatgcagaaggacctcatcgtccgggagcacggcatccgcctgctggaggcccagatcgccacgggcggcatcatcgaccccgtgcacagccaccgcgtgcccgtggacgtggcctaccgctgcggctacttcgacgaggagatgaaccgcatcctggcggaccccagcgacgacaccaagggcttcttcgaccccaacacgcacgagaacctcacgtacctgcagcttctggagcgctgtgtggaggaccccgagacgggcctgtacctgctacaaatcataaagaaaggagaaaactacgtgtacatcaatgaggccacgagacacgtgttgcaatccagaactgcaaaaatgcgcgtggggaggtttgctgaccaggtggtctctttctgggacctgctgtcctctccatacttcacagaggacaggaagcgggagctcatccaggagtatggagcccagagtgggggcctggagaaattgctggaaatcatcaccacgacaattgaagaaacagagacgcaaaaccaaggcatcaaagtggcggccatcagaggggaggtgacagctgcagacctgttcaactccagggtcatcgatcagaagaccctgcacacacttcgtgtggggaggactgggggacaggcactcagcacgctggagtgtgtgaagccctatctggaaggcagcggctgcattgcgggggtcacggtgccctccaccagggaggtcatgagcctccatgaggccagcaggaaggagctcatccctgcagcatttgcgacttggctgctggaggcgcaggccgccaccgggttcctcctggacccctgcacccgccagaagctctctgtggatgaggctgtggatgtgggcctggtgaacgaggagctgcgggagaggctcctgaaggctgaaagagctgccacgggctacagggatccggccacaggagacacgatcccgctgttccaggccatgcagaagcagctcatcgagaaggcggaggcactgaggctgctggaggtgcaggtggccacggggggtgtcatcgacccacagcaccaccaccggctcccactggaaacagcctacagacggggctgtctgcacaaggacatctatgcgctcatttccgaccagaagcacatgaggaaacggtttgtggacccgaacacgcaagagaaggtctcgtaccgagagctgcaggagaggtgccgcccacaagaggacacgggctggctgctgttcccagtgaacaaggctgcacgggactccgagcacatcgatgacgagacgagaagggccctggaggcagagcaagtggaaatcacagtgggaaggttcagaggccagaaaccaacactgtgggcactactgaattccgaatacgtgacagaggagaagaagctccagctggtgaggatgtatagaacacacaccagacgggcactgcagacggtagcgcagctcatcttagagttgatcgagaagcaggaaaccagcaacaaacacctgtggttccaaggaattagacgacagatcacagcttctgaactcctcagctcagccataatcacggaggaaatgctccaggacctggaaacgggacggagcacgacgcaagagctcatggaggacgaccgcgtcaagcgctacctggagggcaccagctgcatcgcgggcgtcctggtgcccgccaaggaccagcccggccgccaggagaagatgagcatctaccaggccatgtggaagggcgtgctgcggcccggcacggccctggtgctgctggaggcgcaggcggccaccggcttcgtcatcgaccccgtgcgcaacctgaggctgtcggtggaggaggccgtggccgcgggcgtggtgggcggcgagatccaggagaagctgctgtcggccgagcgcgccgtcaccggctacaccgacccctacaccgggcagcagatctccctcttccaggccatgcagaaggacctcatcgtccgggagcacggcatccgcctgctggaggcccagatcgccacgggcggcgtcatcgaccccgtgcacagccaccgcgtgcccgtggacgtggcctaccggcgcggctacttcgacgaggagatgaaccgtgtcctggccgaccccagcgacgacaccaagggcttcttcgaccccaacacgcacgagaacctcacgtacgtgcagctgctgcgccgctgcgtgcccgacccggacaccgggctctacatgctgcagctggcaggccggggctccgccgtgcaccagctgagcgaggagctgcgctgtgccctgcgcgacgcccgcgtgacgccaggctcgggcgccctccagggccagagcgtctccgtctgggagctcctcttctaccgcgaggtgtccgaggaccggcgccaggacctgctgagcagataccgggcgggcacgctgaccgtggaggagctgggcgccaccctcacctcgctgctggcccaggcccaggcccaggcccgggccgaggccgaggccgggagcccgcgcccagacccccgggaggccctgcgtgcggccaccatggaggtcaaggtgggccgcctccgggggcgcgcggtgcccgtgtgggacgtgctggcgtccggctacgtgagcagggccgcccgggaggagctgctggccgagtttggctcggggaccctggacttgcccgcgctgacccgccggctgaccgccatcatcgaggaggccgaggaggcccccggggcccggccgcagctccaggacgcctggcgcggcccgcgggagccagggccagccgggcgaggggacggcgactcggggcgctcccagcgagagggccagggggagggcgagacccaggaggccgccgccgccgccgccgccgccgccgcccgccgccaggagcagaccctgcgtgatgccaccatggaggtgcagcgcgggcagttccaggggcggccggtctccgtgtgggacgtcctcttctcctcgtacctgagcgaggcccgccgagacgagctcctggcccagcacgcggccggcgccctgggcctgcccgacctcgtcgccgtcctcacccgggtcatcgaggagaccgaggagcggctcagcaaggtgtccttccgcggcctgaggcgccaggtgtccgcctccgagctgcacacgtccgggatcctgggccccgagaccctgcgggacctggcccagggcactaagacgctgcaggaggtgacggagatggactcggtcaagcgctacctggagggcaccagctgcatcgcgggcgtcctggtgcccgccaaggaccagcccggccgccaggagaagatgagcatctaccaggccatgtggaagggcgtgctgcggcccggcacggccctggtgctgctggaggcgcaggcggccaccggcttcgtcatcgaccccgtgcgcaacctgaggctgtcggtggaggaggccgtggccgcgggcgtggtgggcggcgagatccaggagaagctgctgtcggccgagcgcgccgtcaccggctacaccgacccctacaccgggcagcagatctccctcttccaggccatgcagaaggacctcatcgtccgggagcacggcatccgcctgctggaggcccagatcgccacgggcggcgtcatcgaccccgtgcacagccaccgcgtgcccgtggacgtggcctaccagcgcggctacttcgacgaggagatgaaccgtgtcctggccgaccccagcgacgacaccaagggcttcttcgaccccaacacgcacgagaacctcacgtacgtgcagctgctgcgccgctgcgtgcccgacccggacaccgggctctacatgctgcagctggcaggccggggctccgccgtgcaccagctgagcgaggagctgcgctgtgccctgcgcgacgcccgcgtgacgccaggctcgggcgccctccagggccagagcgtctccgtctgggagctcctcttctaccgcgaggtgtccgaggaccggcgccaggacctgctgagcagataccgggcgggcacgctgaccgtggaagagctgggcgccaccctcacctcgctgctggcccaggcccaggcccaggcccgggccgaggccgaggccgggagcccgcgcccagacccccgggaggccctgcgtgcggccaccatggaggtcaaggtgggccgcctccgggggcgcgcggtgcccgtgtgggacgtgctggcgtccggctacgtgagcagggccgcccgggaggagctgctggccgagtttggctcggggaccctggacttgcccgcgctgacccgccggctgaccgccatcatcgaggaggccgaggaggcccccggggcccggccgcagctccaggacgcctggcgcggcccgcgggagccagggccagccgggcgaggggacggcgactcggggcgctcccagcgagagggccagggggagggcgagacccaggaggccgccgccgccgcccgccgccaggagcagaccctgcgtgatgccaccatggaggtgcagcgcgggcagttccaggggcggccggtctccgtgtgggacgtcctcttctcctcgtacctgagcgaggcccgccgagacgagctcctggcccagcacgcggccggcgccctgggcctgcccgacctcgtcgccgtcctcacccgggtcatcgaggagacggaggagcggctcagcaaggtgtccttccgcggcctgaggtgccaggtgtccgcctccgagctgcacacgtccgggatcctgggccccgagaccctgcgggacctggcccagggcactaagacgctgcaggaggtgacggagatggactcggtcaagcgctacctggagggcaccagctgcatcgcgggcgtcctggtgcccgccaaggaccagcccggccgccaggagaagatgagcatctaccaggccatgtggaagggcgtgctgcggcccggcacggccctggtgctgctggaggcgcaggcggccaccggcttcgtcatcgaccccgtgcgcaacctgaggctgtcggtggaggaggccgtggccgcgggcgtggtgggcggcgagatccaggagaagctgctgtcggccgagcgcgccgtcaccggctacaccgacccctacaccgggcagcagatctccctcttccaggccatgcagaaggacctcatcgtccgggagcacggcatccgcctgctggaggcccagatcgccacgggcggcgtcatcgaccccgtgcacagccaccgcgtgcccgtggacgtggcctaccggcgcggctacttcgacgaggagatgaaccgtgtcctggccgaccccagcgacgacaccaagggcttcttcgaccccaacacgcacgagaacctcacgtacgtgcagctgctgcgccgctgcgtgcccgacccggacaccgggctctacatgctgcagctggcaggccggggctccgccgtgcaccagctgagcgaggagctgcgctgtgccctgcgcgacgcccgcgtgacgccaggctcgggcgccctccagggccagagcgtctccgtctgggagctcctcttctaccgcgaggtgtccgaggaccggcgccaggacctgctgagcagataccgggcgggcacgctgaccgtggaggagctgggcgccaccctcacctcgctgctggcccaggcccaggcccaggcccgggccgaggccgaggccgggagcccgcgcccagacccccgggaggccctgcgtgcggccaccatggaggtcaaggtgggccgcctccgggggcgcgcggtgcccgtgtgggacgtgctggcgtccggctacgtgagcagggccgcccgggaggagctgctggccgagtttggctcggggaccctggacttgcccgcgctgacccgccggctgaccgccatcatcgaggaggccgaggaggcccccggggcccggccgcagctccaggacgcctggcgcggcccgcgggagccagggccagccgggcgaggggacggcgactcggggcgctcccagcgagagggccagggggagggcgagacccaggaggccgccgccgccaccgccgccgcccgccgccaggagcagaccctgcgtgatgccaccatggaggtgcagcgcgggcagttccaggggcggccggtctccgtgtgggacgtcctcttctcctcgtacctgagcgaggcccgccgagacgagctcctggcccagcacgcggccggcgccctgggcctgcccgacctcgtcgccgtcctcacccgggtcatcgaggagacggaggagcggctcagcaaggtgtccttccgcggcctgaggcgccaggtgtccgcctccgagctgcacacgtccgggatcctgggccccgagaccctgcgggacctggcccagggcactaagacgctgcaggaggtgacggagatggactcggtcaagcgctacctggagggcaccagctgcatcgcgggcgtcctggtgcccgccaaggaccagcccggccgccaggagaagatgagcatctaccaggccatgtggaagggcgtgctgcggcccggcacggccctggtgctgctggaggcgcaggcggccaccggcttcgtcatcgaccccgtgcgcaacctgaggctgtcggtggaggaggccgtggccgcgggcgtggtgggcggcgagatccaggagaagctgctgtcggccgagcgcgccgtcaccggctacaccgacccctacaccgggcagcagatctccctcttccaggccatgcagaaggacctcatcgtccgggagcacggcatccgcctgctggaggcccagatcgccacgggcggcgtcatcgaccccgtgcacagccaccgcgtgcccgtggacgtggcctaccggcgcggctacttcgacgaggagatgaaccgtgtcctggccgaccccagcgacgacaccaagggcttcttcgaccccaacacgcacgagaacctcacgtacgtgcagctgctgcgccgctgcgtgcccgacccggacaccgggctctacatgctgcagctggcaggccggggctccgccgtgcaccagctgagcgaggagctgcgctgtgccctgcgcgacgcccgcgtgacgccaggctcgggcgccctccagggccagagcgtctccgtctgggagctcctcttctaccgcgaggtgtccgaggaccggcgccaggacctgctgagcagataccgggcgggcacgctgaccgtggaggagctgggcgccaccctcacctcgctgctggcccaggcccaggcccaggcccgggccgaggccgaggccgggagcccgcgcccagacccccgggaggccctgcgtgcggccaccatggaggtcaaggtgggccgcctccgggggcgcgcggtgcccgtgtgggacgtgctggcgtccggctacgtgagcagggccgcccgggaggagctgctggccgagtttggctcggggaccctggacttgcccgcgctgacccgccggctgaccgccatcatcgaggaggccgaggaggcccccggggcccggccgcagctccaggacgcctggcgcggcccgcgggagccagggccagccgggcgaggggacggcgactcggggcgctcccagcgagagggccagggggagggcgagacccaggaggccgccgccgccaccgccgccgcccgccgccaggagcagaccctgcgtgatgccaccatggaggtgcagcgcgggcagttccaggggcggccggtctccgtgtgggacgtcctcttctcctcgtacctgagcgaggcccgccgagacgagctcctggcccagcacgcggccggcgccctgggcctgcccgacctcgtcgccgtcctcacccgggtcatcgaggagacggaggagcggctcagcaaggtgtccttccgcggcctgaggcgccaggtgtccgcctccgagctgcacacgtccgggatcctgggccccgagaccctgcgggacctggcccagggcactaagacgctgcaggaggtgacggagatggactcggtcaagcgctacctggagggcaccagctgcatcgcgggcgtcctggtgcccgccaaggaccagcccggccaccaggagaagatgagcatctaccaggccatgtggaagggcgtgctgcggcccggcacggccctggtgctgctggaggcgcaggcggccaccggcttcgtcatcgaccccgtgcgcaacctgaggctgtcggtggaggaggccgtggccgcgggcgtggtgggcggcgagatccaggagaagctgctgtcggccgagcgcgccgtcaccggctacaccgacccctacaccgggcagcagatctccctcttccaggccatgcagaaggacctcatcgtccgggagcacggcatccgcctgctggaggcccagatcgccacgggcggcgtcatcgaccccgtgcacagccaccgcgtgcccgtggacgtggcctaccggcgcggctacttcgacgaggagatgaaccgtgtcctggcccaccccagcgacgacaccaagggcttcttcgaccccaacacgcacgagaacctcacgtacgtgcagctgctgcgccgctgcgtgcccgacccggacaccgggctctacatgctgcagctggcaggccggggctccgccgtgcaccagctgagcgaggagctgcgctgtgccctgcgcgacgcccgcgtgatgccaggctcgggcgccctccagggccagagcgtctccgtctgggagctcctcttctaccgcgaggtgtccgaggaccggcgccaggacctgctgagcagataccgggcgggcacgctgaccgtggaggagctgggcgccaccctcacctcgctgctggcccaggcccaggcccaggcccgggccgaggccgaggccgaggccgggagcccgcgcccagacccccgggaggccctgcgtgcggccaccatggaggtcaaggtgggccgcctccgggggcgcgcggtgcccgtgtgggacgtgctggcgtccggctacgtgagcggggccgcccgggaggagctgctggccgagtttggctcggggaccctggacttgcccgcgctgacccgccggctgaccgccatcatcgaggaggccgaggaggcccccggggcccggccgcagctccaggacgcctggcgcggcccgcgggagccagggccagccgggcgaggggacggcgactcggggcgctcccagcgagagggccagggggagggcgagacccaggaggccgccgccgccgcccgccgccaggagcagaccctgcgtgatgccaccatggaggtgcagcgcgggcagttccaggggcggccggtctccgtgtgggacgtcctcttctcctcgtacctgagcgaggcccaccgagacgagctcctggcccagcacgcggccggcgccctgggcctgcccgacctcgtcgccgtcctcacccgggtcatcgaggagacggaggagcggctcagcaaggtgtccttccgcggcctgaggcgccaggtgtccgcctccgagctgcacacgtccgggatcctgggccccgagaccctgcgggacctggcccagggcactaagacgctgcaggaggtgacggagatggactcggtcaagcgctacctggagggcaccagctgcatcgcgggcgtcctggtgcccgccaaggaccagcccggccgccaggagaagatgagcatctaccaggccatgtggaagggcgtgctgcggcccggcacggccctggtgctgctggaggcgcaggcggccaccggcttcgtcatcgaccccgtgcgcaacctgaggctgtcggtggaggaggccgtggccgcgggcgtggtgggcggcgagatccaggagaagctgctgtcggccgagcgcgccgtcaccggctacaccgacccctacaccgggcagcagatctccctcttccaggccatgcagaaggacctcatcgtccgggagcacggcatccgcctgctggaggcccagatcgccacgggcggcgtcatcgaccccgtgcacagccaccgcgtgcccgtggacgtggcctaccggcgcggctacttcgacgaggagatgaaccgcgtcctggccgaccccagcgacgacaccaagggcttcttcgaccccaacacgcacgagaacctcacgtacctgcagcttctgcagagggccaccctggaccctgagacggggctcctatttctttctctctctctacagtgactgggcttcctccgtgcagttttctgcaactctggagaagtggaggcatacttgtgtgtctgggttgtttttttttttttttttttttttgtcattctttaattttgttgttttacccattcgttatctgtggaaaacgttttaagttgtcatgtgacagaaacttttcctttgtccatcgaggtgtttcataagttttttggtgtgttttctgggtcgtctatgtgtcatatggttttacttttctctc

SEQ ID NO: 130191 - DNA, 16002 bp, Homo sapiens
  Payload ID: 5476
  Gene Symbol: EPPK1
  Gene Name: epiplakin 1
  ENST ID: ENST00000615648
  CDS Start-End: 73-15339
actgcggaccgagcggcgagcgggcaggacagaggtggacctcagcaggctctgcataaccagccgtgtgtgatgagtggccacaccttgcctcctcttcccgtcccaggcaccaacagcacagagcaggccagtgtacccagagccatggcagccacgctgggagccggcacgccccccaggccccaggccaggagcatagctggggtgtatgtggaggcctcgggccaggcccagagtgtctacgccgccatggagcagggcctcctgcctgctgggctcgggcaggctctgctagaggcccaggcagccactgggggcctggtggacctcgcccggggccagctgctccctgtgtccaaggccctgcagcagggtctggtggggctggagctgaaggagaagctgctggccgctgagcgtgccactacgggctatcctgacccctacggcggtgagaagctggccctctttcaggccatcgggaaggaggttgtggacagggccctggggcagagctggctggaggtccaactggccactgggggcctggtggaccccgcccagggagtgctcgtggcccctgagccagcctgccaccagggcctcctggaccgggagacatggcacaagctgtcagagcttgagcctggcacaggtgacctgcgcttcctcgaccccaacacgctggagcggctgacataccaccagctgctggaaaggtgtgtgcgtgcccccggctcggggctagccttgctgcccctcaagatcaccttccgctccatgggcggggcggtgagtgcagctgagctgctggaggtgggcatcctggacgagcaggctgtgcagggtctgcgggagggcaggctggccgcagtggacgtgagtgcacgtgccgaggtgcggcgctacctggagggtaccggcagcgtggccggggttgtcctgctgcccgaaggccacaagaagagctttttccaggctgccaccgagcacctgctcccaatgggcaccgcgctgccactcctagaggcccaggctgccacccacaccctggtggaccccatcacaggccagcggctgtgggtagacgaggcagtcagggcgggcctggtcagcccagagctccatgagcagctcctggtggccgagcaggccgtgacagggcaccacgaccccttcagtggctcccaaatcccccttttccaggccatgaagaaggggctagtggacaggccactggcactgcggctcttggatgcccagctggccacaggcgggctggtctgtccagcacgcaggctccggctgcccctggaggccgccctgcgctgcggctgcctggatgaagacactcagcggcagctctcgcaggctggcagcttctcagacggcacgcacggcggcctgcgctatgaacagctgctggccctctgtgtcaccgacccagagaccgggcttgccttcctgccactctcagggggaccccggggaggggagccccagggacccccattcatcaagtacagcactcggcaggccctgagcacggccacagccaccgtctctgtggggaagttccggggccggcccgtgtccctctgggagctgctcttctctgaggccatctcctcagagcagagggcgatgctggcccagcagtaccaggaagggaccctctccgtggagaagctggccgctaagctgagcgccaccctcgagcaggctgcagccactgccagggtcaccttttctgggctgagggacaccgtgacaccaggagagctgctgaaagccgagatcatcgaccaggacctgtacgagcggctggagcatggacaggccacagccaaggatgtgggcagcctggcctcggtgcagaggtacctgcagggtacgggctgcattgctggcctgctgctccctggctcccaggaacgcctgagcatctatgaggcccgatgcaaggggctcctccggcccggcactgccctcatccttctggaggcacaagctgccacaggcttcatcatcgacccaaaagcaaacaaggggcactccgttgaggaggcactgagggctgctgtcattgggcctgatgtgttcgcgaagctgctgtcggctgagcgcgctgtcactggctacactgacccctacaccgggcagcagatctccctcttccaggccatgcagaagggcctcatcgtccgggagcacggcatccgcctgctggaggcccagatcgccacgggcggcgtcatcgaccccgtgcacagccaccgcgtgcccgtggacgtggcctaccggcgcggctacttcgatcagatgctgaacttgatcctgttggacccttctgacgacaccaagggcttcttcgaccccaacacgcacgagaacctcacgtacctgcagcttctggagcgctgtgtgcgtgaccccgagacgggcctgtacctcctgccactcagcagcacgcagtccccgctggtggacagtgccacccagcaggccttccagaacctgctgctctccgtgaagtatggacggtttcaggggcagagggtctccgcgtgggagctgatcaactctgagtacttcagcgagggccgcaggaggcagctgctgcgtcgctaccggcagcgcgaggtcacgctggggcaggtggcaaagctgctggaggcggagacgcagagacaggcggacatcatgctgcccgcactgcggagccgggtcaccgtccaccagctcctggaggccggtatcattgaccagcagctgttggaccaagtgctggccgggacaatcagcccggaggccctcctactcatggacggcgtccgcaggtacctgtgcggcctgggagctgtgggcggtgtgcggctgctgccctctggccagcggctcagcctctaccaggccatgaggcagaagctgctggggcccagggtggccctggccctgctggaggcccaggcggccaccggaaccatcatggaccctcacagcccagagagcctctcggtggatgaggccgtgcgcaggggtgtggtggggccggagctgtatggcaggctgaagcgggctgagggtgccattgctggcttcagagaccccttctctgggaagcaggtgtctgtgttccaggccatgaagaaaggtctcatcccttgggagcaagctgcccgcctcctggaggctcaagtggccacaggagggatcattgaccccaccagccaccaccacctccccatgccagtggccattcagcgtggctatgttgaccaggagatggagacagccttgtccagctcctccgaaaccttccccacaccggacggccaggggcgcacgagctatgcccagctcctggaggagtgccccagggatgagacttctggccttcacctcctgcccctgccagaaagtgctcctgccctccccaccgaggagcaggtccagaggagcctgcaggccgtgccgggggccaaggatggcacatccctctgggacctgctcagctcctgccacttcaccgaggagcaacggaggggcctgctggaggacgtgcaggaggggaggaccactgtgccacagctgctagcctctgtgcagaggtgggtacaggagaccaagctcctggcccaggcccgcgtcatggtgcccggcccacggggtgaggtacccgctgtctggctgctggatgctggcatcatcacccaggagacccttgaggccctggctcagggcacgcagtcgcccgcccaggtcgccgagcagccggcggtgaaggcctgcctgtggggcacaggctgcgtggccggtgtgctgctacagccctctggggccaaggccagcatcgcccaggccgtgagggatggcctcctgcccacaggcctgggccagaggctgctggaagcccaggtggcatctggcttccttgttgaccccctgaacaaccagagactgtcagtggaggacgcggttaaggtcggcctggtgggcagggagctgagtgagcagctcgggcaggccgagagggcggcggccgggtacccagatccctactctagggcctccctctctctgtggcaggccatggagaaggggctcgtgccacagaacgagggcttgcccctcctgcaggtgcagctggccacagggggtgtggtggaccctgtccacggggtgcacctgccccaggcggcagcctgcagactcggccttctggacacacagacgagccaggtgctgactgcagttgacaaggacaacaagttcttctttgaccccagtgcgcgggaccaggtgacctaccagcagctcagggagcgctgcgtgtgcgactccgagaccggattgttgctgttgccactgccctcagacacagtgcttgaggtggacgaccacaccgcggtggctctgagggccatgaaggtgcccgtcagcacagggaggtttaaggggtgtagcgtgtcactctgggacctgctgctctccgaatacgttggcgctgacaagcggcgggagctggtggcactctgtcggtctgggagggctgcggccctgcggcaggtggtcagcgcagtcaccaccctggtcgaggctgcagagaggcagcccctgcaggccaccttcagagggctccggaagcaggtgtcagccagggacctgttcagggcgcagctgatcagcaggaagacgctggacgagctgagccaggggacaacgactgtgaaggaggtggcggagatggacagcgtgaagcggtccctggagggaggcaacttcattgccggggtccttatccagggcacccaggagaggatgagcatcccagaggccctgaggaggcacatcctgcggcctggcacagccctggtgctgctggaggcacaggcagctaccggcttcatcatcgaccccgtggagaaccggaagctgaccgtggaggaggcgttcaaagcaggaatgttcgggaaagaaacctacgtgaagctgctgtcggccgagcgcgccgtcaccggctacaccgacccctataccgggcagcagatctccctcttccaggccatgcagaaggacctcatcgtccgggagcacggcatccgcctgctggaggcccagatcgccacgggcggcatcatcgaccccgtgcacagccaccgcgtgcccgtggacgtggcctaccgctgcggctacttcgacgaggagatgaaccgcatcctggcggaccccagcgacgacaccaagggcttcttcgaccccaacacgcacgagaacctcacgtacctgcagcttctggagcgctgtgtggaggaccccgagacgggcctgtacctgctacaaatcataaagaaaggagaaaactacgtgtacatcaatgaggccacgagacacgtgttgcaatccagaactgcaaaaatgcgcgtggggaggtttgctgaccaggtggtctctttctgggacctgctgtcctctccatacttcacagaggacaggaagcgggagctcatccaggagtatggagcccagagtgggggcctggagaaattgctggaaatcatcaccacgacaattgaagaaacagagacgcaaaaccaaggcatcaaagtggcggccatcagaggggaggtgacagctgcagacctgttcaactccagggtcatcgatcagaagaccctgcacacacttcgtgtggggaggactgggggacaggcactcagcacgctggagtgtgtgaagccctatctggaaggcagcggctgcattgcgggggtcacggtgccctccaccagggaggtcatgagcctccatgaggccagcaggaaggagctcatccctgcagcatttgcgacttggctgctggaggcgcaggccgccaccgggttcctcctggacccctgcacccgccagaagctctctgtggatgaggctgtggatgtgggcctggtgaacgaggagctgcgggagaggctcctgaaggctgaaagagctgccacgggctacagggatccggccacaggagacacgatcccgctgttccaggccatgcagaagcagctcatcgagaaggcggaggcactgaggctgctggaggtgcaggtggccacggggggtgtcatcgacccacagcaccaccaccggctcccactggaaacagcctacagacggggctgtctgcacaaggacatctatgcgctcatttccgaccagaagcacatgaggaaacggtttgtggacccgaacacgcaagagaaggtctcgtaccgagagctgcaggagaggtgccgcccacaagaggacacgggctggctgctgttcccagtgaacaaggctgcacgggactccgagcacatcgatgacgagacgagaagggccctggaggcagagcaagtggaaatcacagtgggaaggttcagaggccagaaaccaacactgtgggcactactgaattccgaatacgtgacagaggagaagaagctccagctggtgaggatgtatagaacacacaccagacgggcactgcagacggtagcgcagctcatcttagagttgatcgagaagcaggaaaccagcaacaaacacctgtggttccaaggaattagacgacagatcacagcttctgaactcctcagctcagccataatcacggaggaaatgctccaggacctggaaacgggacggagcacgacgcaagagctcatggaggacgaccgcgtcaagcgctacctggagggcaccagctgcatcgcgggcgtcctggtgcccgccaaggaccagcccggccgccaggagaagatgagcatctaccaggccatgtggaagggcgtgctgcggcccggcacggccctggtgctgctggaggcgcaggcggccaccggcttcgtcatcgaccccgtgcgcaacctgaggctgtcggtggaggaggccgtggccgcgggcgtggtgggcggcgagatccaggagaagctgctgtcggccgagcgcgccgtcaccggctacaccgacccctacaccgggcagcagatctccctcttccaggccatgcagaaggacctcatcgtccgggagcacggcatccgcctgctggaggcccagatcgccacgggcggcgtcatcgaccccgtgcacagccaccgcgtgcccgtggacgtggcctaccggcgcggctacttcgacgaggagatgaaccgtgtcctggccgaccccagcgacgacaccaagggcttcttcgaccccaacacgcacgagaacctcacgtacgtgcagctgctgcgccgctgcgtgcccgacccggacaccgggctctacatgctgcagctggcaggccggggctccgccgtgcaccagctgagcgaggagctgcgctgtgccctgcgcgacgcccgcgtgacgccaggctcgggcgccctccagggccagagcgtctccgtctgggagctcctcttctaccgcgaggtgtccgaggaccggcgccaggacctgctgagcagataccgggcgggcacgctgaccgtggaggagctgggcgccaccctcacctcgctgctggcccaggcccaggcccaggcccgggccgaggccgaggccgggagcccgcgcccagacccccgggaggccctgcgtgcggccaccatggaggtcaaggtgggccgcctccgggggcgcgcggtgcccgtgtgggacgtgctggcgtccggctacgtgagcagggccgcccgggaggagctgctggccgagtttggctcggggaccctggacttgcccgcgctgacccgccggctgaccgccatcatcgaggaggccgaggaggcccccggggcccggccgcagctccaggacgcctggcgcggcccgcgggagccagggccagccgggcgaggggacggcgactcggggcgctcccagcgagagggccagggggagggcgagacccaggaggccgccgccgccgccgccgccgccgccgcccgccgccaggagcagaccctgcgtgatgccaccatggaggtgcagcgcgggcagttccaggggcggccggtctccgtgtgggacgtcctcttctcctcgtacctgagcgaggcccgccgagacgagctcctggcccagcacgcggccggcgccctgggcctgcccgacctcgtcgccgtcctcacccgggtcatcgaggagaccgaggagcggctcagcaaggtgtccttccgcggcctgaggcgccaggtgtccgcctccgagctgcacacgtccgggatcctgggccccgagaccctgcgggacctggcccagggcactaagacgctgcaggaggtgacggagatggactcggtcaagcgctacctggagggcaccagctgcatcgcgggcgtcctggtgcccgccaaggaccagcccggccgccaggagaagatgagcatctaccaggccatgtggaagggcgtgctgcggcccggcacggccctggtgctgctggaggcgcaggcggccaccggcttcgtcatcgaccccgtgcgcaacctgaggctgtcggtggaggaggccgtggccgcgggcgtggtgggcggcgagatccaggagaagctgctgtcggccgagcgcgccgtcaccggctacaccgacccctacaccgggcagcagatctccctcttccaggccatgcagaaggacctcatcgtccgggagcacggcatccgcctgctggaggcccagatcgccacgggcggcgtcatcgaccccgtgcacagccaccgcgtgcccgtggacgtggcctaccagcgcggctacttcgacgaggagatgaaccgtgtcctggccgaccccagcgacgacaccaagggcttcttcgaccccaacacgcacgagaacctcacgtacgtgcagctgctgcgccgctgcgtgcccgacccggacaccgggctctacatgctgcagctggcaggccggggctccgccgtgcaccagctgagcgaggagctgcgctgtgccctgcgcgacgcccgcgtgacgccaggctcgggcgccctccagggccagagcgtctccgtctgggagctcctcttctaccgcgaggtgtccgaggaccggcgccaggacctgctgagcagataccgggcgggcacgctgaccgtggaagagctgggcgccaccctcacctcgctgctggcccaggcccaggcccaggcccgggccgaggccgaggccgggagcccgcgcccagacccccgggaggccctgcgtgcggccaccatggaggtcaaggtgggccgcctccgggggcgcgcggtgcccgtgtgggacgtgctggcgtccggctacgtgagcagggccgcccgggaggagctgctggccgagtttggctcggggaccctggacttgcccgcgctgacccgccggctgaccgccatcatcgaggaggccgaggaggcccccggggcccggccgcagctccaggacgcctggcgcggcccgcgggagccagggccagccgggcgaggggacggcgactcggggcgctcccagcgagagggccagggggagggcgagacccaggaggccgccgccgccgcccgccgccaggagcagaccctgcgtgatgccaccatggaggtgcagcgcgggcagttccaggggcggccggtctccgtgtgggacgtcctcttctcctcgtacctgagcgaggcccgccgagacgagctcctggcccagcacgcggccggcgccctgggcctgcccgacctcgtcgccgtcctcacccgggtcatcgaggagacggaggagcggctcagcaaggtgtccttccgcggcctgaggtgccaggtgtccgcctccgagctgcacacgtccgggatcctgggccccgagaccctgcgggacctggcccagggcactaagacgctgcaggaggtgacggagatggactcggtcaagcgctacctggagggcaccagctgcatcgcgggcgtcctggtgcccgccaaggaccagcccggccgccaggagaagatgagcatctaccaggccatgtggaagggcgtgctgcggcccggcacggccctggtgctgctggaggcgcaggcggccaccggcttcgtcatcgaccccgtgcgcaacctgaggctgtcggtggaggaggccgtggccgcgggcgtggtgggcggcgagatccaggagaagctgctgtcggccgagcgcgccgtcaccggctacaccgacccctacaccgggcagcagatctccctcttccaggccatgcagaaggacctcatcgtccgggagcacggcatccgcctgctggaggcccagatcgccacgggcggcgtcatcgaccccgtgcacagccaccgcgtgcccgtggacgtggcctaccggcgcggctacttcgacgaggagatgaaccgtgtcctggccgaccccagcgacgacaccaagggcttcttcgaccccaacacgcacgagaacctcacgtacgtgcagctgctgcgccgctgcgtgcccgacccggacaccgggctctacatgctgcagctggcaggccggggctccgccgtgcaccagctgagcgaggagctgcgctgtgccctgcgcgacgcccgcgtgacgccaggctcgggcgccctccagggccagagcgtctccgtctgggagctcctcttctaccgcgaggtgtccgaggaccggcgccaggacctgctgagcagataccgggcgggcacgctgaccgtggaggagctgggcgccaccctcacctcgctgctggcccaggcccaggcccaggcccgggccgaggccgaggccgggagcccgcgcccagacccccgggaggccctgcgtgcggccaccatggaggtcaaggtgggccgcctccgggggcgcgcggtgcccgtgtgggacgtgctggcgtccggctacgtgagcagggccgcccgggaggagctgctggccgagtttggctcggggaccctggacttgcccgcgctgacccgccggctgaccgccatcatcgaggaggccgaggaggcccccggggcccggccgcagctccaggacgcctggcgcggcccgcgggagccagggccagccgggcgaggggacggcgactcggggcgctcccagcgagagggccagggggagggcgagacccaggaggccgccgccgccaccgccgccgcccgccgccaggagcagaccctgcgtgatgccaccatggaggtgcagcgcgggcagttccaggggcggccggtctccgtgtgggacgtcctcttctcctcgtacctgagcgaggcccgccgagacgagctcctggcccagcacgcggccggcgccctgggcctgcccgacctcgtcgccgtcctcacccgggtcatcgaggagacggaggagcggctcagcaaggtgtccttccgcggcctgaggcgccaggtgtccgcctccgagctgcacacgtccgggatcctgggccccgagaccctgcgggacctggcccagggcactaagacgctgcaggaggtgacggagatggactcggtcaagcgctacctggagggcaccagctgcatcgcgggcgtcctggtgcccgccaaggaccagcccggccgccaggagaagatgagcatctaccaggccatgtggaagggcgtgctgcggcccggcacggccctggtgctgctggaggcgcaggcggccaccggcttcgtcatcgaccccgtgcgcaacctgaggctgtcggtggaggaggccgtggccgcgggcgtggtgggcggcgagatccaggagaagctgctgtcggccgagcgcgccgtcaccggctacaccgacccctacaccgggcagcagatctccctcttccaggccatgcagaaggacctcatcgtccgggagcacggcatccgcctgctggaggcccagatcgccacgggcggcgtcatcgaccccgtgcacagccaccgcgtgcccgtggacgtggcctaccggcgcggctacttcgacgaggagatgaaccgtgtcctggccgaccccagcgacgacaccaagggcttcttcgaccccaacacgcacgagaacctcacgtacgtgcagctgctgcgccgctgcgtgcccgacccggacaccgggctctacatgctgcagctggcaggccggggctccgccgtgcaccagctgagcgaggagctgcgctgtgccctgcgcgacgcccgcgtgacgccaggctcgggcgccctccagggccagagcgtctccgtctgggagctcctcttctaccgcgaggtgtccgaggaccggcgccaggacctgctgagcagataccgggcgggcacgctgaccgtggaggagctgggcgccaccctcacctcgctgctggcccaggcccaggcccaggcccgggccgaggccgaggccgggagcccgcgcccagacccccgggaggccctgcgtgcggccaccatggaggtcaaggtgggccgcctccgggggcgcgcggtgcccgtgtgggacgtgctggcgtccggctacgtgagcagggccgcccgggaggagctgctggccgagtttggctcggggaccctggacttgcccgcgctgacccgccggctgaccgccatcatcgaggaggccgaggaggcccccggggcccggccgcagctccaggacgcctggcgcggcccgcgggagccagggccagccgggcgaggggacggcgactcggggcgctcccagcgagagggccagggggagggcgagacccaggaggccgccgccgccaccgccgccgcccgccgccaggagcagaccctgcgtgatgccaccatggaggtgcagcgcgggcagttccaggggcggccggtctccgtgtgggacgtcctcttctcctcgtacctgagcgaggcccgccgagacgagctcctggcccagcacgcggccggcgccctgggcctgcccgacctcgtcgccgtcctcacccgggtcatcgaggagacggaggagcggctcagcaaggtgtccttccgcggcctgaggcgccaggtgtccgcctccgagctgcacacgtccgggatcctgggccccgagaccctgcgggacctggcccagggcactaagacgctgcaggaggtgacggagatggactcggtcaagcgctacctggagggcaccagctgcatcgcgggcgtcctggtgcccgccaaggaccagcccggccaccaggagaagatgagcatctaccaggccatgtggaagggcgtgctgcggcccggcacggccctggtgctgctggaggcgcaggcggccaccggcttcgtcatcgaccccgtgcgcaacctgaggctgtcggtggaggaggccgtggccgcgggcgtggtgggcggcgagatccaggagaagctgctgtcggccgagcgcgccgtcaccggctacaccgacccctacaccgggcagcagatctccctcttccaggccatgcagaaggacctcatcgtccgggagcacggcatccgcctgctggaggcccagatcgccacgggcggcgtcatcgaccccgtgcacagccaccgcgtgcccgtggacgtggcctaccggcgcggctacttcgacgaggagatgaaccgtgtcctggcccaccccagcgacgacaccaagggcttcttcgaccccaacacgcacgagaacctcacgtacgtgcagctgctgcgccgctgcgtgcccgacccggacaccgggctctacatgctgcagctggcaggccggggctccgccgtgcaccagctgagcgaggagctgcgctgtgccctgcgcgacgcccgcgtgatgccaggctcgggcgccctccagggccagagcgtctccgtctgggagctcctcttctaccgcgaggtgtccgaggaccggcgccaggacctgctgagcagataccgggcgggcacgctgaccgtggaggagctgggcgccaccctcacctcgctgctggcccaggcccaggcccaggcccgggccgaggccgaggccgaggccgggagcccgcgcccagacccccgggaggccctgcgtgcggccaccatggaggtcaaggtgggccgcctccgggggcgcgcggtgcccgtgtgggacgtgctggcgtccggctacgtgagcggggccgcccgggaggagctgctggccgagtttggctcggggaccctggacttgcccgcgctgacccgccggctgaccgccatcatcgaggaggccgaggaggcccccggggcccggccgcagctccaggacgcctggcgcggcccgcgggagccagggccagccgggcgaggggacggcgactcggggcgctcccagcgagagggccagggggagggcgagacccaggaggccgccgccgccgcccgccgccaggagcagaccctgcgtgatgccaccatggaggtgcagcgcgggcagttccaggggcggccggtctccgtgtgggacgtcctcttctcctcgtacctgagcgaggcccaccgagacgagctcctggcccagcacgcggccggcgccctgggcctgcccgacctcgtcgccgtcctcacccgggtcatcgaggagacggaggagcggctcagcaaggtgtccttccgcggcctgaggcgccaggtgtccgcctccgagctgcacacgtccgggatcctgggccccgagaccctgcgggacctggcccagggcactaagacgctgcaggaggtgacggagatggactcggtcaagcgctacctggagggcaccagctgcatcgcgggcgtcctggtgcccgccaaggaccagcccggccgccaggagaagatgagcatctaccaggccatgtggaagggcgtgctgcggcccggcacggccctggtgctgctggaggcgcaggcggccaccggcttcgtcatcgaccccgtgcgcaacctgaggctgtcggtggaggaggccgtggccgcgggcgtggtgggcggcgagatccaggagaagctgctgtcggccgagcgcgccgtcaccggctacaccgacccctacaccgggcagcagatctccctcttccaggccatgcagaaggacctcatcgtccgggagcacggcatccgcctgctggaggcccagatcgccacgggcggcgtcatcgaccccgtgcacagccaccgcgtgcccgtggacgtggcctaccggcgcggctacttcgacgaggagatgaaccgcgtcctggccgaccccagcgacgacaccaagggcttcttcgaccccaacacgcacgagaacctcacgtacctgcagcttctgcagagggccaccctggaccctgagacggggctcctatttctttctctctctctacagtgactgggcttcctccgtgcagttttctgcaactctggagaagtggaggcatacttgtgtgtctgggttgtttttttttttttttttttttttgtcattctttaattttgttgttttacccattcgttatctgtggaaaacgttttaagttgtcatgtgacagaaacttttcctttgtccatcgaggtgtttcataagttttttggtgtgttttctgggtcgtctatgtgtcatatggttttacttttctctcctttttcgttttcagaacatttttctgtctgttttggattcactgcttccattttacagaatgtcactctttagactctcagtccatcatgccatcgggtactcttgttgcagtgtaatttttattacatgcggttatttccctaacgatgtgctattcacgttcatcttcaaactcattttccatcagccagtgtctactatttagtgccctggctctatttcggtcctcctccccgggctttccctggctgctgtgctggccaaaagcatgggctttattctctccattggctgctgctccaccttagaggtgtgacctcactagcgttgactgagcgagtctgttgtggagaagaactttttgtagtaatttactaggaaaaattctgaacaagtaaaatatgaaggaaa

SEQ ID NO: 130192 - DNA, 4619 bp, Homo sapiens
  Payload ID: 5477
  Gene Symbol: EREG
  Gene Name: epiregulin
  Uniprot ID: O14944
  ENST ID: ENST00000244869
  CDS Start-End: 167-676
tcacttgcctgatatttccagtgtcagagggacacagccaacgtggggtcccttctaggctgacagccgctctccagccactgccgcgagcccgtctgctcccgccctgcccgtgcactctccgcagccgccctccgccaagccccagcgcccgctcccatcgccgatgaccgcggggaggaggatggagatgctctgtgccggcagggtccctgcgctgctgctctgcctgggtttccatcttctacaggcagtcctcagtacaactgtgattccatcatgtatcccaggagagtccagtgataactgcacagctttagttcagacagaagacaatccacgtgtggctcaagtgtcaataacaaagtgtagctctgacatgaatggctattgtttgcatggacagtgcatctatctggtggacatgagtcaaaactactgcaggtgtgaagtgggttatactggtgtccgatgtgaacacttctttttaaccgtccaccaacctttaagcaaagaatatgtggctttgaccgtgattcttattattttgtttcttatcacagtcgtcggttccacatattatttctgcagatggtacagaaatcgaaaaagtaaagaaccaaagaaggaatatgagagagttacctcaggggatccagagttgccgcaagtctgaatggcgccatcaaacttatgggcagggataacagtgtgcctggttaatattaatattcccattttattaataatatttatgttgggtcaagtgttaggtcaataacactgtattttaatgtacttgaaaaatgtttttatttttgttttatttttgacagactatttgctaatgtataatgtgcagaaaatatttaatatcaaaagaaaattgatatttttatacaagtaatttcctgagctaaatgcttcattgaaagcttcaaagtttatatgcctggtgcacagtgcttagaagtaagcaattcccaggtcatagctcaagaattgttagcaaatgacagatttctgtaagcctatatatatagtcaaatcgatttagtaagtatgttttttatgttcctcaaatcagtgataattggtttgactgtaccatggtttgatatgtagttggcaccatggtatcatatattaaaacaataatgcaattagaatttgggagaagcaaatataggtcctgtgttaaacactacacatttgaaacaagctaaccctggggagtctatggtctcttcactcaggtctcagctataattctgttatatgaggggcagtggacagttccctatgccaactcacgactcctacaggtactagtcactcatctaccagattctgcctatgtaaaatgaattgaaaaacaattttctgtaatcttttatttaagtagtgggcatttcatagcttcacaatgttccttttttgtatattacaacatttatgtgaggtaattattgctcaacagacaattagaaaaaagtccacacttgaagcctaaatttgtgctttttaagaatatttttagactatttctttttataggggctttgctgaattctaacattaaatcacagcccaaaatttgatggactaattattattttaaaatatatgaagacaataattctacatgttgtcttaagatggaaatacagttatttcatcttttattcaaggaagttttaactttaatacagctcagtaaatggcttcttctagaatgtaaagttatgtatttaaagttgtatcttgacacaggaaatgggaaaaaacttaaaaattaatatggtgtatttttccaaatgaaaaatctcaattgaaagcttttaaaatgtagaaacttaaacacaccttcctgtggaggctgagatgaaaactagggctcattttcctgacatttgtttattttttggaagagacaaagatttcttctgcactctgagcccataggtctcagagagttaataggagtatttttgggctattgcataaggagccactgctgccaccacttttggattttatgggaggctccttcatcgaatgctaaacctttgagtagagtctccctggatcacataccaggtcagggaggatctgttcttcctctacgtttatcctggcatgtgctagggtaaacgaaggcataataagccatggctgacctctggagcaccaggtgccaggacttgtctccatgtgtatccatgcattatataccctggtgcaatcacacgactgtcatctaaagtcctggccctggcccttactattaggaaaataaacagacaaaaacaagtaaatatatatggtcatatacatattgtatatatattcatatacaaacatgtatgtatacatgaccttaatggatcatagaattgcagtcatttggtgctctgctaaccatttatataaaacttaaaaacaagagaaaagaaaaatcaattagatctaaacagttatttctgtttcctatttaatacagctgaagtcaaaatatgtaagaacacattttaaatactctacttacagttggccctctgtggttagttccacatctgtggattcaaccaaccaaggacggaaaatgcttaaaaaataatacaacaacaacaaaaaatacattataacaactatttacttttttttttttctttttgagatggagtctcgctctgttgcccaggttggagtgcagtggcacgatctcggctcactgcaacctcacctcccgggttcaagagatcctcctgcctcagcctcctgagcagctgggactacaggcgcatgccaccatgcccagctaatttttgtatttttagtagaggcggggtttcaccatgttggccaggatggtctcaatctcctaaccttgagatccaccctccacagcctcccaaactgctgggattacaggtgtgagccaccgcacgtagcatttacattaggtattacaagtaatgtaaagatgatttaagtatacaggaggatgtgaataggttatatgcaagcactatgcccttttatataagtgacttgaacatctgtgcccgattttagtatgtgcaggggggcgatctgggaatcagtcccctgtggataccaaggtacaactgtatttattaacgcttactagatgtgaggagagtctgaatattttcagtgatcttggctgtttcaaaaaaatctattgacttttcaataaatcagctgcaatccatttatttcatttacaaaagatttattgtaagcatctcaatcttggtttgtcagtttatcttaagcatgtcaattcataaaaacaagtcatttttgtatttttcatctttaagaatgcttaaaaaagctaatccctaaaatagttagatctttgtaaatgcatattaaataataaagtatgacccacattactttttatgggtgaaaataagacaaaaataatagttttagtgaggatggtgctgagtaaacataaaaactgatttgctctcagctgatgtgtcctgtacacagtgggaagattttagttcacacttagtctaactcccccattttacagatttctcactatatatatttctagaaggggctatgcatattcaatgtattgagaaccaaagcaaccacaaatgcataaatgcataatttatggtcttcaaccaaggccacataataacccagttaacttactctttaaccaggaatattaagttctataactagtactcaaggtttaaccttaaaattaagatttccttaaccttaaccttaaaattgatattatattaaacatacataatacaatgtaactccactgttctcctgaatattttttgctctaatctctctgccgaaagtcaaagtgatgggagaattggtatactggtatgactacgtcttaagtcagatttttatttatgagtctttgagactaaattcaatcaccaccaggtatcaaatcaacttttatgcagcaaatatatgattctagtgtctgacttttgttaaattcagtaatgcagtttttaaaaacctgtatctgacccactttgtaatttttgctccaatatccattctgtagacttttgaaaaaaaagtttttaatttgatgcccaatatattctgaccgttaaaaaattcttgttcatatgggagaagggggagtaatgacttgtacaaacagtatttctggtgtatattttaatgtttttaaaaagagtaatttcatttaaatatctgttattcaaatttgatgatgttaaatgtaatataatgtattttctttttattttgcactctgtaattgcactttttaagtttgaagagccattttggtaaacggtttttattaaagatgctatggaacataaagttgtattgcatgcaatttgaagtaacttatttgactatgaatgttatcggattactgaattgtatcaatttgtttgtgttcaatatcagctttgataattgtgtaccttaagatattgaaggagaaaatagataatttacaagatattattaatttttatttatttttcttgggaattgaaaaaaattgaaataaataaaaatgcattgaacatcttgcattcaaaatc

SEQ ID NO: 130193 - DNA, 1724 bp, Homo sapiens
  Payload ID: 5478
  Gene Symbol: EPCAM
  Gene Name: epithelial cell adhesion molecule
  Uniprot ID: P16422
  ENST ID: ENST00000263735
  CDS Start-End: 359-1303
aactgcagcgccggggctgggggaggggagcctactcactcccccaactcccgggcggtgactcatcaacgagcaccagcggccagaggtgagcagtcccgggaaggggccgagaggcggggccgccaggtcgggcaggtgtgcgctccgccccgccgcgcgcacagagcgctagtccttcggcgagcgagcaccttcgacgcggtccggggaccccctcgtcgctgtcctcccgacgcggacccgcgtgccccaggcctcgcgctgcccggccggctcctcgtgtcccactcccggcgcacgccctcccgcgagtcccgggcccctcccgcgcccctcttctcggcgcgcgcgcagcatggcgcccccgcaggtcctcgcgttcgggcttctgcttgccgcggcgacggcgacttttgccgcagctcaggaagaatgtgtctgtgaaaactacaagctggccgtaaactgctttgtgaataataatcgtcaatgccagtgtacttcagttggtgcacaaaatactgtcatttgctcaaagctggctgccaaatgtttggtgatgaaggcagaaatgaatggctcaaaacttgggagaagagcaaaacctgaaggggccctccagaacaatgatgggctttatgatcctgactgcgatgagagcgggctctttaaggccaagcagtgcaacggcacctccatgtgctggtgtgtgaacactgctggggtcagaagaacagacaaggacactgaaataacctgctctgagcgagtgagaacctactggatcatcattgaactaaaacacaaagcaagagaaaaaccttatgatagtaaaagtttgcggactgcacttcagaaggagatcacaacgcgttatcaactggatccaaaatttatcacgagtattttgtatgagaataatgttatcactattgatctggttcaaaattcttctcaaaaaactcagaatgatgtggacatagctgatgtggcttattattttgaaaaagatgttaaaggtgaatccttgtttcattctaagaaaatggacctgacagtaaatggggaacaactggatctggatcctggtcaaactttaatttattatgttgatgaaaaagcacctgaattctcaatgcagggtctaaaagctggtgttattgctgttattgtggttgtggtgatagcagttgttgctggaattgttgtgctggttatttccagaaagaagagaatggcaaagtatgagaaggctgagataaaggagatgggtgagatgcatagggaactcaatgcataactatataatttgaagattatagaagaagggaaatagcaaatggacacaaattacaaatgtgtgtgcgtgggacgaagacatctttgaaggtcatgagtttgttagtttaacatcatatatttgtaatagtgaaacctgtactcaaaatataagcagcttgaaactggctttaccaatcttgaaatttgaccacaagtgtcttatatatgcagatctaatgtaaaatccagaacttggactccatcgttaaaattatttatgtgtaacattcaaatgtgtgcattaaatatgcttccacagtaaaatctgaaaaactgatttgtgattgaaagctgcctttctatttacttgagtcttgtacatacatacttttttatgagctatgaaataaaacattttaaactgaatttcttaactttga

SEQ ID NO: 130194 - DNA, 1530 bp, Homo sapiens
  Payload ID: 5478
  Gene Symbol: EPCAM
  Gene Name: epithelial cell adhesion molecule
  ENST ID: ENST00000405271
  CDS Start-End: 215-1243
cttggggacaaagagcaagagctgtagagtctagccctggggtgaggatgccacggctacccggctcctccacgttcctctatccagttcccgcacccttccccccaggccccattcttcaaggcttcagagcagcgctcctccggttaaaaggaagtctcagcacagaatcttcaaacctcctcggaggccaccaaagatccctaacgccgccatggagacgaagcacctggggcggggcggagcggggcgcgcgggcccacacctgtggagagggccgcgccccaactgcagcgccggggctgggggaggggagcctactcactcccccaactcccgggcggtgactcatcaacgagcaccagcggccagagaatgtgtctgtgaaaactacaagctggccgtaaactgctttgtgaataataatcgtcaatgccagtgtacttcagttggtgcacaaaatactgtcatttgctcaaagctggctgccaaatgtttggtgatgaaggcagaaatgaatggctcaaaacttgggagaagagcaaaacctgaaggggccctccagaacaatgatgggctttatgatcctgactgcgatgagagcgggctctttaaggccaagcagtgcaacggcacctccatgtgctggtgtgtgaacactgctggggtcagaagaacagacaaggacactgaaataacctgctctgagcgagtgagaacctactggatcatcattgaactaaaacacaaagcaagagaaaaaccttatgatagtaaaagtttgcggactgcacttcagaaggagatcacaacgcgttatcaactggatccaaaatttatcacgagtattttgtatgagaataatgttatcactattgatctggttcaaaattcttctcaaaaaactcagaatgatgtggacatagctgatgtggcttattattttgaaaaagatgttaaaggtgaatccttgtttcattctaagaaaatggacctgacagtaaatggggaacaactggatctggatcctggtcaaactttaatttattatgttgatgaaaaagcacctgaattctcaatgcagggtctaaaagctggtgttattgctgttattgtggttgtggtgatagcagttgttgctggaattgttgtgctggttatttccagaaagaagagaatggcaaagtatgagaaggctgagataaaggagatgggtgagatgcatagggaactcaatgcataactatataatttgaagattatagaagaagggaaatagcaaatggacacaaattacaaatgtgtgtgcgtgggacgaagacatctttgaaggtcatgagtttgttagtttaacatcatatatttgtaatagtgaaacctgtactcaaaatataagcagcttgaaactggctttaccaatcttgaaatttgaccacaagtgtcttatatatgcagatctaatgtaaaatccagaacttggactccatcgttaaaattatttatgtgtaacattcaaatgtgtgcattaaa

SEQ ID NO: 130195 - DNA, 609 bp, Homo sapiens
  Payload ID: 5478
  Gene Symbol: EPCAM
  Gene Name: epithelial cell adhesion molecule
  ENST ID: ENST00000419334
  CDS Start-End: 12-609
gcgcgcgcagcatggcgcccccgcaggtcctcgcgttcgggcttctgcttgccgcggcgacggcgacttttgccgcagctcaggaaggtgaggcgcggattggagcagagttgtggagctgggctgggctggggggcagcggcccccggccctcggcccccgaaacgggcataatagggaggggaccaagaggccgcgctttccagcgtggagaccggacggtgcggccgtgctccggctcaggccctccgcgcggtaggaaacggcgagggccgtcccggggagcagcctcacttcgcagctttgctcgccttgaatgtgtctgtgaaaactacaagctggccgtaaactgctttgtgaataataatcgtcaatgccagtgtacttcagttggtgcacaaaatactgtcatttgctcaaagctggctgccaaatgtttggtgatgaaggcagaaatgaatggctcaaaacttgggagaagagcaaaacctgaaggggccctccagaacaatgatgggctttatgatcctgactgcgatgagagcgggctctttaaggccaagcagtgcaacggcacctccatgtgctggtgtgtgaacactgctgggg

SEQ ID NO: 130196 - DNA, 1501 bp, Homo sapiens
  Payload ID: 5478
  Gene Symbol: EPCAM
  Gene Name: epithelial cell adhesion molecule
  ENST ID: ENST00000456133
  CDS Start-End: 210-1238
ggacaaagagcaagagctgtagagtctagccctggggtgaggatgccacggctacccggctcctccacgttcctctatccagttcccgcacccttccccccaggccccattcttcaaggcttcagagcagcgctcctccggttaaaaggaagtctcagcacagaatcttcaaacctcctcggaggccaccaaagatccctaacgccgccatggagacgaagcacctggggcggggcggagcggggcgcgcgggcccacacctgtggagagggccgcgccccaactgcagcgccggggctgggggaggggagcctactcactcccccaactcccgggcggtgactcatcaacgagcaccagcggccagagaatgtgtctgtgaaaactacaagctggccgtaaactgctttgtgaataataatcgtcaatgccagtgtacttcagttggtgcacaaaatactgtcatttgctcaaagctggctgccaaatgtttggtgatgaaggcagaaatgaatggctcaaaacttgggagaagagcaaaacctgaaggggccctccagaacaatgatgggctttatgatcctgactgcgatgagagcgggctctttaaggccaagcagtgcaacggcacctccatgtgctggtgtgtgaacactgctggggtcagaagaacagacaaggacactgaaataacctgctctgagcgagtgagaacctactggatcatcattgaactaaaacacaaagcaagagaaaaaccttatgatagtaaaagtttgcggactgcacttcagaaggagatcacaacgcgttatcaactggatccaaaatttatcacgagtattttgtatgagaataatgttatcactattgatctggttcaaaattcttctcaaaaaactcagaatgatgtggacatagctgatgtggcttattattttgaaaaagatgttaaaggtgaatccttgtttcattctaagaaaatggacctgacagtaaatggggaacaactggatctggatcctggtcaaactttaatttattatgttgatgaaaaagcacctgaattctcaatgcagggtctaaaagctggtgttattgctgttattgtggttgtggtgatagcagttgttgctggaattgttgtgctggttatttccagaaagaagagaatggcaaagtatgagaaggctgagataaaggagatgggtgagatgcatagggaactcaatgcataactatataatttgaagattatagaagaagggaaatagcaaatggacacaaattacaaatgtgtgtgcgtgggacgaagacatctttgaaggtcatgagtttgttagtttaacatcatatatttgtaatagtgaaacctgtactcaaaatataagcagcttgaaactggctttaccaatcttgaaatttgaccacaagtgtcttatatatgcagatctaatgtttctttttcttttttcttttctttttttcttttttttttttt

SEQ ID NO: 130197 - DNA, 4087 bp, Homo sapiens
  Payload ID: 5479
  Gene Symbol: ECT2
  Gene Name: epithelial cell transforming 2
  Uniprot ID: Q9H8V3
  ENST ID: ENST00000232458
  CDS Start-End: 199-2850
tctggagactcctgcctatgggaaagaggttgacatcacgcgccaatcggcatggctcttagagagagcagcttagtttttgaatcggttgtggcggccgccggcgaggaatggcggtatttgtgagaggagtcggcgtttgaagaggtggaactcctagggcttttttgagagtgctgatttagaagaatacaaatcatggctgaaaatagtgtattaacatccactactgggaggactagcttggcagactcttccatttttgattctaaagttactgagatttccaaggaaaacttacttattggatctacttcatatgtagaagaagagatgcctcagattgaaacaagagtgatattggttcaagaagctggaaaacaagaagaacttataaaagccttaaaggacattaaagtgggctttgtaaagatggagtcagtggaagaatttgaaggtttggattctccggaatttgaaaatgtatttgtagtcacggactttcaggattctgtctttaatgacctctacaaggctgattgtagagttattggaccaccagttgtattaaattgttcacaaaaaggagagcctttgccattttcatgtcgcccgttgtattgtacaagtatgatgaatctagtactatgctttactggatttaggaaaaaagaagaactagtcaggttggtgacattggtccatcacatgggtggagttattcgaaaagactttaattcaaaagttacacatttggtggcaaattgtacacaaggagaaaaattcagggttgctgtgagtctaggtactccaattatgaagccagaatggatttataaagcttgggaaaggcggaatgaacaggatttctatgcagcagttgatgactttagaaatgaatttaaagttcctccatttcaagattgtattttaagtttcctgggattttcagatgaagagaaaaccaatatggaagaaatgactgaaatgcaaggaggtaaatatttaccgcttggagatgaaagatgcactcaccttgtagttgaagagaatatagtaaaagatcttccctttgaaccttcaaagaaactttatgttgtcaagcaagagtggttctggggaagcattcaaatggatgcccgagctggagaaactatgtatttatatgaaaaggcaaatactcctgagctcaagaaatcagtgtcaatgctttctctaaatacccctaacagcaatcgcaaacgacgtcgtttaaaagaaacacttgctcagctttcaagagagacagacgtgtcaccatttccaccccgtaagcgcccatcagctgagcattccctttccatagggtcactcctagatatctccaacacaccagagtctagcattaactatggagacaccccaaagtcttgtactaagtcttctaaaagctccactccagttccttcaaagcagtcagcaaggtggcaagttgcaaaagagctttatcaaactgaaagtaattatgttaatatattggcaacaattattcagttatttcaagtaccattggaagaggaaggacaacgtggtggacctatccttgcaccagaggagattaagactatttttggtagcatcccagatatctttgatgtacacactaagataaaggatgatcttgaagaccttatagttaattgggatgagagcaaaagcattggtgacatttttctgaaatattcaaaagatttggtaaaaacctaccctccctttgtaaacttctttgaaatgagcaaggaaacaattattaaatgtgaaaaacagaaaccaagatttcatgcttttctcaagataaaccaagcaaaaccagaatgtggacggcagagccttgttgaacttcttatccgaccagtacagaggttacccagtgttgcattacttttaaatgatcttaagaagcatacagctgatgaaaatccagacaaaagcactttagaaaaagctattggatcactgaaggaagtaatgacgcatattaatgaggataagagaaaaacagaagctcaaaagcaaatttttgatgttgtttatgaagtagatggatgcccagctaatcttttatcttctcaccgaagcttagtacagcgggttgaaacaatttctctaggtgagcacccctgtgacagaggagaacaagtaactctcttcctcttcaatgattgcctagagatagcaagaaaacggcacaaggttattggcacttttaggagtcctcatggccaaacccgacccccagcttctcttaagcatattcacctaatgcctctttctcagattaagaaggtattggacataagagagacagaagattgccataatgcttttgccttgcttgtgaggccaccaacagagcaggcaaatgtgctactcagtttccagatgacatcagatgaacttccaaaagaaaactggctaaagatgctgtgtcgacatgtagctaacaccatttgtaaagcagatgctgagaatcttatttatactgctgatccagaatcctttgaagtaaatacaaaagatatggacagtacattgagtagagcatcaagagcaataaaaaagacttcaaaaaaggttacaagagcattctctttctccaaaactccaaaaagagctcttcgaagggctcttatgacatcccacggctcagtggagggaagaagtccttccagcaatgataagcatgtaatgagtcgtctttctagcacatcatcattagcaggtatcccttctccctcccttgtcagccttccttccttctttgaaaggagaagtcatacgttaagtagatctacaactcatttgatatgaagcgttaccaaaatcttaaattatagaaatgtatagacacctcatactcaaataagaaactgacttaaatggtacttgtaattagcacttggtgaaagctggaaggaagataaataacactaaactatgctatttgatttttcttcttgaaagagtaaggtttacctgttacattttcaagttaattcatgtaaaaaatgatagtgattttgatgtaatttatctcttgtttgaatctgtcattcaaaggccaataatttaagttgctatcagctgatattagtagctttgcaaccctgatagagtaaataaattttatgggcgggtgccaaatactgctgtgaatctatttgtatagtatccatgaatgaatttatggaaatagatatttgtgcagctcaatttatgcagagattaaatgacatcataatactggatgaaaacttgcatagaattctgattaaatagtgggtctgtttcacatgtgcagtttgaagtatttaaataaccactcctttcacagtttattttcttctcaagcgttttcaagatctagcatgtggattttaaaagatttgccctcattaacaagaataacatttaaaggagattgtttcaaaatatttttgcaaattgagataaggacagaaagattgagaaacattgtatattttgcaaaaacaagatgtttgtagctgtttcagagagagtacggtatatttatggtaattttatccactagcaaatcttgatttagtttgatagtgtgtggaattttattttgaaggataagaccatgggaaaattgtggtaaagactgtttgtacccttcatgaaataattctgaagttgccatcagttttactaatcttctgtgaaatgcatagatatgcgcatgttcaactttttattgtggtcttataattaaatgtaaaattgaaaattcatttgctgtttcaaagtgtgatatctttcacaatagcctttttatagtcagtaattcagaataatcaagttcatatggataaatgcatttttatttcctatttctttagggagtgctacaaatgtttgtcacttaaatttcaagtttctgttttaatagttaactgactatagattgttttctatgccatgtatgtgccacttctgagagtagtaaatgactctttgctacattttaaaagcaattgtattagtaagaactttgtaaataaatacctaaaacccaagtgta

SEQ ID NO: 130198 - DNA, 4158 bp, Homo sapiens
  Payload ID: 5479
  Gene Symbol: ECT2
  Gene Name: epithelial cell transforming 2
  Uniprot ID: Q9H8V3
  ENST ID: ENST00000392692
  CDS Start-End: 177-2921
aaagaggttgacatcacgcgccaatcggcatggctcttagagagagcagcttagtttttgaatcggttgtggcggccgccggcgaggaatggcggtatttgtgagaggagtcggcgtttgaagaggtggaactcctagggcttttttgagagtgctgatttagaagaatacaaatcatggctgaaaatagtgtattaacatccactactgggaggactagcttggcagactcttccatttttgattctaaagttactgagatttccaaggaaaacttacttattggatctacttcatatgtagaagaagagatgcctcagattgaaacaagagtgatattggttcaagaagctggaaaacaagaagaacttataaaagccttaaagactattaaaataatggaagtccctgttataaagataaaagaaagttgtcctggaaaatcggatgaaaaattaataaaaagtgttattaatatggacattaaagtgggctttgtaaagatggagtcagtggaagaatttgaaggtttggattctccggaatttgaaaatgtatttgtagtcacggactttcaggattctgtctttaatgacctctacaaggctgattgtagagttattggaccaccagttgtattaaattgttcacaaaaaggagagcctttgccattttcatgtcgcccgttgtattgtacaagtatgatgaatctagtactatgctttactggatttaggaaaaaagaagaactagtcaggttggtgacattggtccatcacatgggtggagttattcgaaaagactttaattcaaaagttacacatttggtggcaaattgtacacaaggagaaaaattcagggttgctgtgagtctaggtactccaattatgaagccagaatggatttataaagcttgggaaaggcggaatgaacaggatttctatgcagcagttgatgactttagaaatgaatttaaagttcctccatttcaagattgtattttaagtttcctgggattttcagatgaagagaaaaccaatatggaagaaatgactgaaatgcaaggaggtaaatatttaccgcttggagatgaaagatgcactcaccttgtagttgaagagaatatagtaaaagatcttccctttgaaccttcaaagaaactttatgttgtcaagcaagagtggttctggggaagcattcaaatggatgcccgagctggagaaactatgtatttatatgaaaaggcaaatactcctgagctcaagaaatcagtgtcaatgctttctctaaatacccctaacagcaatcgcaaacgacgtcgtttaaaagaaacacttgctcagctttcaagagagacagacgtgtcaccatttccaccccgtaagcgcccatcagctgagcattccctttccatagggtcactcctagatatctccaacacaccagagtctagcattaactatggagacaccccaaagtcttgtactaagtcttctaaaagctccactccagttccttcaaagcagtcagcaaggtggcaagttgcaaaagagctttatcaaactgaaagtaattatgttaatatattggcaacaattattcagttatttcaagtaccattggaagaggaaggacaacgtggtggacctatccttgcaccagaggagattaagactatttttggtagcatcccagatatctttgatgtacacactaagataaaggatgatcttgaagaccttatagttaattgggatgagagcaaaagcattggtgacatttttctgaaatattcaaaagatttggtaaaaacctaccctccctttgtaaacttctttgaaatgagcaaggaaacaattattaaatgtgaaaaacagaaaccaagatttcatgcttttctcaagataaaccaagcaaaaccagaatgtggacggcagagccttgttgaacttcttatccgaccagtacagaggttacccagtgttgcattacttttaaatgatcttaagaagcatacagctgatgaaaatccagacaaaagcactttagaaaaagctattggatcactgaaggaagtaatgacgcatattaatgaggataagagaaaaacagaagctcaaaagcaaatttttgatgttgtttatgaagtagatggatgcccagctaatcttttatcttctcaccgaagcttagtacagcgggttgaaacaatttctctaggtgagcacccctgtgacagaggagaacaagtaactctcttcctcttcaatgattgcctagagatagcaagaaaacggcacaaggttattggcacttttaggagtcctcatggccaaacccgacccccagcttctcttaagcatattcacctaatgcctctttctcagattaagaaggtattggacataagagagacagaagattgccataatgcttttgccttgcttgtgaggccaccaacagagcaggcaaatgtgctactcagtttccagatgacatcagatgaacttccaaaagaaaactggctaaagatgctgtgtcgacatgtagctaacaccatttgtaaagcagatgctgagaatcttatttatactgctgatccagaatcctttgaagtaaatacaaaagatatggacagtacattgagtagagcatcaagagcaataaaaaagacttcaaaaaaggttacaagagcattctctttctccaaaactccaaaaagagctcttcgaagggctcttatgacatcccacggctcagtggagggaagaagtccttccagcaatgataagcatgtaatgagtcgtctttctagcacatcatcattagcaggtatcccttctccctcccttgtcagccttccttccttctttgaaaggagaagtcatacgttaagtagatctacaactcatttgatatgaagcgttaccaaaatcttaaattatagaaatgtatagacacctcatactcaaataagaaactgacttaaatggtacttgtaattagcacttggtgaaagctggaaggaagataaataacactaaactatgctatttgatttttcttcttgaaagagtaaggtttacctgttacattttcaagttaattcatgtaaaaaatgatagtgattttgatgtaatttatctcttgtttgaatctgtcattcaaaggccaataatttaagttgctatcagctgatattagtagctttgcaaccctgatagagtaaataaattttatgggcgggtgccaaatactgctgtgaatctatttgtatagtatccatgaatgaatttatggaaatagatatttgtgcagctcaatttatgcagagattaaatgacatcataatactggatgaaaacttgcatagaattctgattaaatagtgggtctgtttcacatgtgcagtttgaagtatttaaataaccactcctttcacagtttattttcttctcaagcgttttcaagatctagcatgtggattttaaaagatttgccctcattaacaagaataacatttaaaggagattgtttcaaaatatttttgcaaattgagataaggacagaaagattgagaaacattgtatattttgcaaaaacaagatgtttgtagctgtttcagagagagtacggtatatttatggtaattttatccactagcaaatcttgatttagtttgatagtgtgtggaattttattttgaaggataagaccatgggaaaattgtggtaaagactgtttgtacccttcatgaaataattctgaagttgccatcagttttactaatcttctgtgaaatgcatagatatgcgcatgttcaactttttattgtggtcttataattaaatgtaaaattgaaaattcatttgctgtttcaaagtgtgatatctttcacaatagcctttttatagtcagtaattcagaataatcaagttcatatggataaatgcatttttatttcctatttctttagggagtgctacaaatgtttgtcacttaaatttcaagtttctgttttaatagttaactgactatagattgttttctatgccatgtatgtgccacttctgagagtagtaaatgactctttgctacattttaaaagcaattgtattagtaagaactttgtaaataaatacctaaaacccaagtgta

SEQ ID NO: 130199 - DNA, 573 bp, Homo sapiens
  Payload ID: 5479
  Gene Symbol: ECT2
  Gene Name: epithelial cell transforming 2
  ENST ID: ENST00000438041
  CDS Start-End: 123-573
acccccagcagccgggccctgacgcggagtgggagaccgaagcccccagtattgctgggcatcttcgccctcacctgttggctcttttggacagaagagtctgatttagaagaatacaaatcatggctgaaaatagtgtattaacatccactactgggaggactagcttggcagactcttccatttttgattctaaagttactgagatttccaaggaaaacttacttattggatctacttcatatgtagaagaagagatgcctcagattgaaacaagagtgatattggttcaagaagctggaaaacaagaagaacttataaaagccttaaagactattaaaataatggaagtccctgttataaagataaaagaaagttgtcctggaaaatcggatgaaaaattaataaaaagtgttattaatatggacattaaagtgggctttgtaaagatggagtcagtggaagaatttgaaggtttggattctccggaatttgaaaatgtatttgtagtcacggactttcaggattctgtctttaatgacctctacaaggctgattgtagagttattggac

SEQ ID NO: 130200 - DNA, 558 bp, Homo sapiens
  Payload ID: 5479
  Gene Symbol: ECT2
  Gene Name: epithelial cell transforming 2
  ENST ID: ENST00000366254
  CDS Start-End: 504-558
aattccggagcgccccagctcaggcttcccggatccgggaactccctcgccgcaccccacccccagcagccgggccctgacgcggagtgggagaccgaagcccccagtattgctgggcatcttcgccctcacctgttggctcttttggacagaagagtacggagtctacctcttgttacctagactggagtgcagtggcacgatctcggctcactgcaacctctgcctcccgggttcaagcgattctcctgcctcagcctcctgagtagctgggattacaggtgcctgccaccaagcccagctaatttttgtatttttagtagagacggggtttcattgtgttggccaggctggtctcgaactcctgacctcgtgatccgcccgccttggcctcccaaagtgctaggattacaagtgtgagccaccgcgtccggcctttcaaatggtatttttgattttcctcttccagtccttaaagcagctgatttagaagaatacaaatcatggctgaaaatagtgtattaacatccactactgggaggactagcttggcagact

SEQ ID NO: 130201 - DNA, 2266 bp, Homo sapiens
  Payload ID: 5479
  Gene Symbol: ECT2
  Gene Name: epithelial cell transforming 2
  ENST ID: ENST00000437296
  CDS Start-End: 1-895
cccagctaatcttttatcttctcaccgaagcttagtacagcgggttgaaacaatttctctaggtgagcacccctgtgacagaggagaacaagtaactctcttcctcttcaatgattgcctagagatagcaagaaaacggcacaaggttattggcacttttaggagtcctcatggccaaacccgacccccagcttctcttaagcatattcacctaatgcctctttctcagattaagaaggtattggacataagagagacagaagattgccataatgcttttgccttgcttgtgaggccaccaacagagcaggcaaatgtgctactcagtttccagatgacatcagatgaacttccaaaagaaaactggctaaagatgctgtgtcgacatgtagctaacaccatttgtaaagcagatgctgagaatcttatttatactgctgatccagaatcctttgaagtaaatacaaaagatatggacagtacattgagtagagcatcaagagcaataaaaaagacttcaaaaaaggttacaagagcattctctttctccaaaactccaaaaagagctcttcgaagggctcttatgacatcccacggctcagtggagggaagaagtccttccagcaatgataagcatgtaatgagtcgtctttctagcacatcatcattagcaattacccattctgtttccacaagcaatgtaattggatttactaagcatgtttatgttcagcgcctaaactctactggtgggcgctctcagtactcctggtttcaatctgtacgtcattctgctttccgagctagtttttcagagatactagaaggaaatactgatttttcaaatttcaaaaaagttctttccaagtcatctttgacatttgtgaagaattaggagatttgccaaccactaatggaaacaagcctcatgaagtttaatggtatcccttctccctcccttgtcagccttccttccttctttgaaaggagaagtcatacgttaagtagatctacaactcatttgatatgaagcgttaccaaaatcttaaattatagaaatgtatagacacctcatactcaaataagaaactgacttaaatggtacttgtaattagcacttggtgaaagctggaaggaagataaataacactaaactatgctatttgatttttcttcttgaaagagtaaggtttacctgttacattttcaagttaattcatgtaaaaaatgatagtgattttgatgtaatttatctcttgtttgaatctgtcattcaaaggccaataatttaagttgctatcagctgatattagtagctttgcaaccctgatagagtaaataaattttatgggcgggtgccaaatactgctgtgaatctatttgtatagtatccatgaatgaatttatggaaatagatatttgtgcagctcaatttatgcagagattaaatgacatcataatactggatgaaaacttgcatagaattctgattaaatagtgggtctgtttcacatgtgcagtttgaagtatttaaataaccactcctttcacagtttattttcttctcaagcgttttcaagatctagcatgtggattttaaaagatttgccctcattaacaagaataacatttaaaggagattgtttcaaaatatttttgcaaattgagataaggacagaaagattgagaaacattgtatattttgcaaaaacaagatgtttgtagctgtttcagagagagtacggtatatttatggtaattttatccactagcaaatcttgatttagtttgatagtgtgtggaattttattttgaaggataagaccatgggaaaattgtggtaaagactgtttgtacccttcatgaaataattctgaagttgccatcagttttactaatcttctgtgaaatgcatagatatgcgcatgttcaactttttattgtggtcttataattaaatgtaaaattgaaaattcatttgctgtttcaaagtgtgatatctttcacaatagcctttttatagtcagtaattcagaataatcaagttcatatggataaatgcatttttatttcctatttctttagggagtgctacaaatgtttgtcacttaaatttcaagtttctgttttaatagttaactgactatagattgttttctatgccatgtatgtgccacttctgagagtagtaaatgactctttgctacattttaaaagcaattgtattagtaagaactttgtaaataaatacctaaaacccaagtgt

SEQ ID NO: 130202 - DNA, 734 bp, Homo sapiens
  Payload ID: 5479
  Gene Symbol: ECT2
  Gene Name: epithelial cell transforming 2
  ENST ID: ENST00000366090
  CDS Start-End: 405-734
gaatcggttgtggcggccgccggcgaggaatggcggtatttgtgagaggagtcggcgtttgaagaggtggaactcctagggcttttttgagagtgacggagtctacctcttgttacctagactggagtgcagtggcacgatctcggctcactgcaacctctgcctcccgggttcaagcgattctcctgcctcagcctcctgagtagctgggattacaggtgcctgccaccaagcccagctaatttttgtatttttagtagagacggggtttcattgtgttggccaggctggtctcgaactcctgacctcgtgatccgcccgccttggcctcccaaagtgctaggattacaagtgtgagccaccgcgtccggcctttcaaatgctgatttagaagaatacaaatcatggctgaaaatagtgtattaacatccactactgggaggactagcttggcagactcttccatttttgattctaaagttactgagatttccaaggaaaacttacttattggatctacttcatatgtagaagaagagatgcctcagattgaaacaagagtgatattggttcaagaagctggaaaacaagaagaacttataaaagccttaaagactattaaaataatggaagtccctgttataaagataaaagaaagttgtcctggaaaatcggatgaaaaattaataaaaagtgttattaatatggacattaaagtgggctttgtaaagatg

SEQ ID NO: 130203 - DNA, 735 bp, Homo sapiens
  Payload ID: 5479
  Gene Symbol: ECT2
  Gene Name: epithelial cell transforming 2
  ENST ID: ENST00000428567
  CDS Start-End: 123-735
tttttgaatcggttgtggcggccgccggcgaggaatggcggtatttgtgagaggagtcggcgtttgaagaggtggaactcctagggcttttttgagagtgctgatttagaagaatacaaatcatggctgaaaatagtgtattaacatccactactgggaggactagcttggcagactcttccatttttgattctaaagttactgagatttccaaggaaaacttacttattggatctacttcatatgtagaagagatgcctcagattgaaacaagagtgatattggttcaagaagctggaaaacaagaagaacttataaaagccttaaaggacattaaagtgggctttgtaaagatggagtcagtggaagaatttgaaggtttggattctccggaatttgaaaatgtatttgtagtcacggactttcaggattctgtctttaatgacctctacaaggctgattgtagagttattggaccaccagttgtattaaattgttcacaaaaaggagagcctttgccattttcatgtcgcccgttgtattgtacaagtatgatgaatctagtactatgctttactggatttaggaaaaaagaagaactagtcaggttggtgacattggtccatcacatgggtggagttattcgaaaagactttaattcaaaagttacacatttggtggcaaattgtacacaaggagaaaaattcagggttgctgtgagtctaggtactccaa

SEQ ID NO: 130204 - DNA, 627 bp, Homo sapiens
  Payload ID: 5479
  Gene Symbol: ECT2
  Gene Name: epithelial cell transforming 2
  ENST ID: ENST00000444250
  CDS Start-End: 1-627
tttatgttgtcaagcaagagtggttctggggaagcattcaaatggatgcccgagctggagaaactatgtatttatatgaaaaggcaaatactcctgagctcaagaaatcagtgtcaatgctttctctaaatacccctaacagcaatcgcaaacgacgtcgtttaaaagaaacacttgctcagctttcaagagagacagacgtgtcaccatttccaccccacaccccaaagtcttgtactaagtcttctaaaagctccactccagttccttcaaagcagtcagcaaggtggcaagttgcaaaagagctttatcaaactgaaagtaattatgttaatatattggcaacaattattcagttatttcaagtaccattggaagaggaaggacaacgtggtggacctatccttgcaccagaggagattaagactatttttggtagcatcccagatatctttgatgtacacactaagataaaggatgatcttgaagaccttatagttaattgggatgagagcaaaagcattggtgacatttttctgaaatattcaaaagatttggtaaaaacctaccctccctttgtaaacttctttgaaatgagcaaggaaacaattattaaatgtgaaaaac

SEQ ID NO: 130205 - DNA, 637 bp, Homo sapiens
  Payload ID: 5479
  Gene Symbol: ECT2
  Gene Name: epithelial cell transforming 2
  ENST ID: ENST00000415665
  CDS Start-End: 160-637
aggcttcccggatccgggaactccctcgccgcaccccacccccagcagccgggccctgacgcggagtgggagaccgaagcccccagtattgctgggcatcttcgccctcacctgttggctcttttggacagaagagtctgatttagaagaatacaaatcatggctgaaaatagtgtattaacatccactactgggaggactagcttggcagactcttccatttttgattctaaagttactgagatttccaaggaaaacttacttattggatctacttcatatgtagaagaagagatgcctcagattgaaacaagagtgatattggttcaagaagctggaaaacaagaagaacttataaaagccttaaaggacattaaagtgggctttgtaaagatggagtcagtggaagaatttgaaggtttggattctccggaatttgaaaatgtatttgtagtcacggactttcaggattctgtctttaatgacctctacaaggctgattgtagagttattggaccaccagttgtattaaattgttcacaaaaaggagagcctttgccattttcatgtcgcccgttgtattgtacaagtatgatgaatctagtactatgctttactggatttaggaaaaaagaag

SEQ ID NO: 130206 - DNA, 2825 bp, Homo sapiens
  Payload ID: 5479
  Gene Symbol: ECT2
  Gene Name: epithelial cell transforming 2
  Uniprot ID: Q9H8V3
  ENST ID: ENST00000441497
  CDS Start-End: 75-2726
ttttgcccaatgaccatgtttatgtatttttattcaaattttattttttcagctgatttagaagaatacaaatcatggctgaaaatagtgtattaacatccactactgggaggactagcttggcagactcttccatttttgattctaaagttactgagatttccaaggaaaacttacttattggatctacttcatatgtagaagaagagatgcctcagattgaaacaagagtgatattggttcaagaagctggaaaacaagaagaacttataaaagccttaaaggacattaaagtgggctttgtaaagatggagtcagtggaagaatttgaaggtttggattctccggaatttgaaaatgtatttgtagtcacggactttcaggattctgtctttaatgacctctacaaggctgattgtagagttattggaccaccagttgtattaaattgttcacaaaaaggagagcctttgccattttcatgtcgcccgttgtattgtacaagtatgatgaatctagtactatgctttactggatttaggaaaaaagaagaactagtcaggttggtgacattggtccatcacatgggtggagttattcgaaaagactttaattcaaaagttacacatttggtggcaaattgtacacaaggagaaaaattcagggttgctgtgagtctaggtactccaattatgaagccagaatggatttataaagcttgggaaaggcggaatgaacaggatttctatgcagcagttgatgactttagaaatgaatttaaagttcctccatttcaagattgtattttaagtttcctgggattttcagatgaagagaaaaccaatatggaagaaatgactgaaatgcaaggaggtaaatatttaccgcttggagatgaaagatgcactcaccttgtagttgaagagaatatagtaaaagatcttccctttgaaccttcaaagaaactttatgttgtcaagcaagagtggttctggggaagcattcaaatggatgcccgagctggagaaactatgtatttatatgaaaaggcaaatactcctgagctcaagaaatcagtgtcaatgctttctctaaatacccctaacagcaatcgcaaacgacgtcgtttaaaagaaacacttgctcagctttcaagagagacagacgtgtcaccatttccaccccgtaagcgcccatcagctgagcattccctttccatagggtcactcctagatatctccaacacaccagagtctagcattaactatggagacaccccaaagtcttgtactaagtcttctaaaagctccactccagttccttcaaagcagtcagcaaggtggcaagttgcaaaagagctttatcaaactgaaagtaattatgttaatatattggcaacaattattcagttatttcaagtaccattggaagaggaaggacaacgtggtggacctatccttgcaccagaggagattaagactatttttggtagcatcccagatatctttgatgtacacactaagataaaggatgatcttgaagaccttatagttaattgggatgagagcaaaagcattggtgacatttttctgaaatattcaaaagatttggtaaaaacctaccctccctttgtaaacttctttgaaatgagcaaggaaacaattattaaatgtgaaaaacagaaaccaagatttcatgcttttctcaagataaaccaagcaaaaccagaatgtggacggcagagccttgttgaacttcttatccgaccagtacagaggttacccagtgttgcattacttttaaatgatcttaagaagcatacagctgatgaaaatccagacaaaagcactttagaaaaagctattggatcactgaaggaagtaatgacgcatattaatgaggataagagaaaaacagaagctcaaaagcaaatttttgatgttgtttatgaagtagatggatgcccagctaatcttttatcttctcaccgaagcttagtacagcgggttgaaacaatttctctaggtgagcacccctgtgacagaggagaacaagtaactctcttcctcttcaatgattgcctagagatagcaagaaaacggcacaaggttattggcacttttaggagtcctcatggccaaacccgacccccagcttctcttaagcatattcacctaatgcctctttctcagattaagaaggtattggacataagagagacagaagattgccataatgcttttgccttgcttgtgaggccaccaacagagcaggcaaatgtgctactcagtttccagatgacatcagatgaacttccaaaagaaaactggctaaagatgctgtgtcgacatgtagctaacaccatttgtaaagcagatgctgagaatcttatttatactgctgatccagaatcctttgaagtaaatacaaaagatatggacagtacattgagtagagcatcaagagcaataaaaaagacttcaaaaaaggttacaagagcattctctttctccaaaactccaaaaagagctcttcgaagggctcttatgacatcccacggctcagtggagggaagaagtccttccagcaatgataagcatgtaatgagtcgtctttctagcacatcatcattagcaggtatcccttctccctcccttgtcagccttccttccttctttgaaaggagaagtcatacgttaagtagatctacaactcatttgatatgaagcgttaccaaaatcttaaattatagaaatgtatagacacctcatactcaaataagaaactgacttaaatggtacttgtaattagcacttggtgaaagc

SEQ ID NO: 130207 - DNA, 560 bp, Homo sapiens
  Payload ID: 5479
  Gene Symbol: ECT2
  Gene Name: epithelial cell transforming 2
  ENST ID: ENST00000426894
  CDS Start-End: 241-560
gaatcggttgtggcggccgccggcgaggaatggcggtatttgtgagaggagtcggcgtttgaagaggtggaactcctagggcttttttgagagtgacggagtctacctcttgttacctagactggagtgcagtggcacgatctcggctcactgcaacctctgcctcccgggttcaagcgattctcctgcctcagcctcctgagtagctgggattacagctgatttagaagaatacaaatcatggctgaaaatagtgtattaacatccactactgggaggactagcttggcagactcttccatttttgattctaaagttactgagatttccaaggaaaacttacttattggatctacttcatatgtagaagaagagatgcctcagattgaaacaagagtgatattggttcaagaagctggaaaacaagaagaacttataaaagccttaaaggacattaaagtgggctttgtaaagatggagtcagtggaagaatttgaaggtttggattctccggaatttgaaaatgtatttgtagtcacggactttcaggattctgtctt

SEQ ID NO: 130208 - DNA, 4363 bp, Homo sapiens
  Payload ID: 5479
  Gene Symbol: ECT2
  Gene Name: epithelial cell transforming 2
  Uniprot ID: Q9H8V3
  ENST ID: ENST00000417960
  CDS Start-End: 478-3126
aatcggcatggctcttagagagagcagcttagtttttgaatcggttgtggcggccgccggcgaggaatggcggtatttgtgagaggagtcggcgtttgaagaggtggaactcctagggcttttttgagagtgacggagtctacctcttgttacctagactggagtgcagtggcacgatctcggctcactgcaacctctgcctcccgggttcaagcgattctcctgcctcagcctcctgagtagctgggattacaggtgcctgccaccaagcccagctaatttttgtatttttagtagagacggggtttcattgtgttggccaggctggtctcgaactcctgacctcgtgatccgcccgccttggcctcccaaagtgctaggattacaagtgtgagccaccgcgtccggcctttcaaatggtatttttgattttcctcttccagtccttaaagcagctgatttagaagaatacaaatcatggctgaaaatagtgtattaacatccactactgggaggactagcttggcagactcttccatttttgattctaaagttactgagatttccaaggaaaacttacttattggatctacttcatatgtagaagagatgcctcagattgaaacaagagtgatattggttcaagaagctggaaaacaagaagaacttataaaagccttaaaggacattaaagtgggctttgtaaagatggagtcagtggaagaatttgaaggtttggattctccggaatttgaaaatgtatttgtagtcacggactttcaggattctgtctttaatgacctctacaaggctgattgtagagttattggaccaccagttgtattaaattgttcacaaaaaggagagcctttgccattttcatgtcgcccgttgtattgtacaagtatgatgaatctagtactatgctttactggatttaggaaaaaagaagaactagtcaggttggtgacattggtccatcacatgggtggagttattcgaaaagactttaattcaaaagttacacatttggtggcaaattgtacacaaggagaaaaattcagggttgctgtgagtctaggtactccaattatgaagccagaatggatttataaagcttgggaaaggcggaatgaacaggatttctatgcagcagttgatgactttagaaatgaatttaaagttcctccatttcaagattgtattttaagtttcctgggattttcagatgaagagaaaaccaatatggaagaaatgactgaaatgcaaggaggtaaatatttaccgcttggagatgaaagatgcactcaccttgtagttgaagagaatatagtaaaagatcttccctttgaaccttcaaagaaactttatgttgtcaagcaagagtggttctggggaagcattcaaatggatgcccgagctggagaaactatgtatttatatgaaaaggcaaatactcctgagctcaagaaatcagtgtcaatgctttctctaaatacccctaacagcaatcgcaaacgacgtcgtttaaaagaaacacttgctcagctttcaagagagacagacgtgtcaccatttccaccccgtaagcgcccatcagctgagcattccctttccatagggtcactcctagatatctccaacacaccagagtctagcattaactatggagacaccccaaagtcttgtactaagtcttctaaaagctccactccagttccttcaaagcagtcagcaaggtggcaagttgcaaaagagctttatcaaactgaaagtaattatgttaatatattggcaacaattattcagttatttcaagtaccattggaagaggaaggacaacgtggtggacctatccttgcaccagaggagattaagactatttttggtagcatcccagatatctttgatgtacacactaagataaaggatgatcttgaagaccttatagttaattgggatgagagcaaaagcattggtgacatttttctgaaatattcaaaagatttggtaaaaacctaccctccctttgtaaacttctttgaaatgagcaaggaaacaattattaaatgtgaaaaacagaaaccaagatttcatgcttttctcaagataaaccaagcaaaaccagaatgtggacggcagagccttgttgaacttcttatccgaccagtacagaggttacccagtgttgcattacttttaaatgatcttaagaagcatacagctgatgaaaatccagacaaaagcactttagaaaaagctattggatcactgaaggaagtaatgacgcatattaatgaggataagagaaaaacagaagctcaaaagcaaatttttgatgttgtttatgaagtagatggatgcccagctaatcttttatcttctcaccgaagcttagtacagcgggttgaaacaatttctctaggtgagcacccctgtgacagaggagaacaagtaactctcttcctcttcaatgattgcctagagatagcaagaaaacggcacaaggttattggcacttttaggagtcctcatggccaaacccgacccccagcttctcttaagcatattcacctaatgcctctttctcagattaagaaggtattggacataagagagacagaagattgccataatgcttttgccttgcttgtgaggccaccaacagagcaggcaaatgtgctactcagtttccagatgacatcagatgaacttccaaaagaaaactggctaaagatgctgtgtcgacatgtagctaacaccatttgtaaagcagatgctgagaatcttatttatactgctgatccagaatcctttgaagtaaatacaaaagatatggacagtacattgagtagagcatcaagagcaataaaaaagacttcaaaaaaggttacaagagcattctctttctccaaaactccaaaaagagctcttcgaagggctcttatgacatcccacggctcagtggagggaagaagtccttccagcaatgataagcatgtaatgagtcgtctttctagcacatcatcattagcaggtatcccttctccctcccttgtcagccttccttccttctttgaaaggagaagtcatacgttaagtagatctacaactcatttgatatgaagcgttaccaaaatcttaaattatagaaatgtatagacacctcatactcaaataagaaactgacttaaatggtacttgtaattagcacttggtgaaagctggaaggaagataaataacactaaactatgctatttgatttttcttcttgaaagagtaaggtttacctgttacattttcaagttaattcatgtaaaaaatgatagtgattttgatgtaatttatctcttgtttgaatctgtcattcaaaggccaataatttaagttgctatcagctgatattagtagctttgcaaccctgatagagtaaataaattttatgggcgggtgccaaatactgctgtgaatctatttgtatagtatccatgaatgaatttatggaaatagatatttgtgcagctcaatttatgcagagattaaatgacatcataatactggatgaaaacttgcatagaattctgattaaatagtgggtctgtttcacatgtgcagtttgaagtatttaaataaccactcctttcacagtttattttcttctcaagcgttttcaagatctagcatgtggattttaaaagatttgccctcattaacaagaataacatttaaaggagattgtttcaaaatatttttgcaaattgagataaggacagaaagattgagaaacattgtatattttgcaaaaacaagatgtttgtagctgtttcagagagagtacggtatatttatggtaattttatccactagcaaatcttgatttagtttgatagtgtgtggaattttattttgaaggataagaccatgggaaaattgtggtaaagactgtttgtacccttcatgaaataattctgaagttgccatcagttttactaatcttctgtgaaatgcatagatatgcgcatgttcaactttttattgtggtcttataattaaatgtaaaattgaaaattcatttgctgtttcaaagtgtgatatctttcacaatagcctttttatagtcagtaattcagaataatcaagttcatatggataaatgcatttttatttcctatttctttagggagtgctacaaatgtttgtcacttaaatttcaagtttctgttttaatagttaactgactatagattgttttctatgccatgtatgtgccacttctgagagtagtaaatgactctttgctacattttaaaagcaattgtattagtaagaactttgtaaataaatacctaaaacccaagtgta

SEQ ID NO: 130209 - DNA, 4406 bp, Homo sapiens
  Payload ID: 5479
  Gene Symbol: ECT2
  Gene Name: epithelial cell transforming 2
  Uniprot ID: Q9H8V3
  ENST ID: ENST00000540509
  CDS Start-End: 519-3170
ggagactcctgcctatgggaaagaggttgacatcacgcgccaatcggcatggctcttagagagagcagcttagtttttgaatcggttgtggcggccgccggcgaggaatggcggtatttgtgagaggagtcggcgtttgaagaggtggaactcctagggcttttttgagagtgacggagtctacctcttgttacctagactggagtgcagtggcacgatctcggctcactgcaacctctgcctcccgggttcaagcgattctcctgcctcagcctcctgagtagctgggattacaggtgcctgccaccaagcccagctaatttttgtatttttagtagagacggggtttcattgtgttggccaggctggtctcgaactcctgacctcgtgatccgcccgccttggcctcccaaagtgctaggattacaagtgtgagccaccgcgtccggcctttcaaatggtatttttgattttcctcttccagtccttaaagcagctgatttagaagaatacaaatcatggctgaaaatagtgtattaacatccactactgggaggactagcttggcagactcttccatttttgattctaaagttactgagatttccaaggaaaacttacttattggatctacttcatatgtagaagaagagatgcctcagattgaaacaagagtgatattggttcaagaagctggaaaacaagaagaacttataaaagccttaaaggacattaaagtgggctttgtaaagatggagtcagtggaagaatttgaaggtttggattctccggaatttgaaaatgtatttgtagtcacggactttcaggattctgtctttaatgacctctacaaggctgattgtagagttattggaccaccagttgtattaaattgttcacaaaaaggagagcctttgccattttcatgtcgcccgttgtattgtacaagtatgatgaatctagtactatgctttactggatttaggaaaaaagaagaactagtcaggttggtgacattggtccatcacatgggtggagttattcgaaaagactttaattcaaaagttacacatttggtggcaaattgtacacaaggagaaaaattcagggttgctgtgagtctaggtactccaattatgaagccagaatggatttataaagcttgggaaaggcggaatgaacaggatttctatgcagcagttgatgactttagaaatgaatttaaagttcctccatttcaagattgtattttaagtttcctgggattttcagatgaagagaaaaccaatatggaagaaatgactgaaatgcaaggaggtaaatatttaccgcttggagatgaaagatgcactcaccttgtagttgaagagaatatagtaaaagatcttccctttgaaccttcaaagaaactttatgttgtcaagcaagagtggttctggggaagcattcaaatggatgcccgagctggagaaactatgtatttatatgaaaaggcaaatactcctgagctcaagaaatcagtgtcaatgctttctctaaatacccctaacagcaatcgcaaacgacgtcgtttaaaagaaacacttgctcagctttcaagagagacagacgtgtcaccatttccaccccgtaagcgcccatcagctgagcattccctttccatagggtcactcctagatatctccaacacaccagagtctagcattaactatggagacaccccaaagtcttgtactaagtcttctaaaagctccactccagttccttcaaagcagtcagcaaggtggcaagttgcaaaagagctttatcaaactgaaagtaattatgttaatatattggcaacaattattcagttatttcaagtaccattggaagaggaaggacaacgtggtggacctatccttgcaccagaggagattaagactatttttggtagcatcccagatatctttgatgtacacactaagataaaggatgatcttgaagaccttatagttaattgggatgagagcaaaagcattggtgacatttttctgaaatattcaaaagatttggtaaaaacctaccctccctttgtaaacttctttgaaatgagcaaggaaacaattattaaatgtgaaaaacagaaaccaagatttcatgcttttctcaagataaaccaagcaaaaccagaatgtggacggcagagccttgttgaacttcttatccgaccagtacagaggttacccagtgttgcattacttttaaatgatcttaagaagcatacagctgatgaaaatccagacaaaagcactttagaaaaagctattggatcactgaaggaagtaatgacgcatattaatgaggataagagaaaaacagaagctcaaaagcaaatttttgatgttgtttatgaagtagatggatgcccagctaatcttttatcttctcaccgaagcttagtacagcgggttgaaacaatttctctaggtgagcacccctgtgacagaggagaacaagtaactctcttcctcttcaatgattgcctagagatagcaagaaaacggcacaaggttattggcacttttaggagtcctcatggccaaacccgacccccagcttctcttaagcatattcacctaatgcctctttctcagattaagaaggtattggacataagagagacagaagattgccataatgcttttgccttgcttgtgaggccaccaacagagcaggcaaatgtgctactcagtttccagatgacatcagatgaacttccaaaagaaaactggctaaagatgctgtgtcgacatgtagctaacaccatttgtaaagcagatgctgagaatcttatttatactgctgatccagaatcctttgaagtaaatacaaaagatatggacagtacattgagtagagcatcaagagcaataaaaaagacttcaaaaaaggttacaagagcattctctttctccaaaactccaaaaagagctcttcgaagggctcttatgacatcccacggctcagtggagggaagaagtccttccagcaatgataagcatgtaatgagtcgtctttctagcacatcatcattagcaggtatcccttctccctcccttgtcagccttccttccttctttgaaaggagaagtcatacgttaagtagatctacaactcatttgatatgaagcgttaccaaaatcttaaattatagaaatgtatagacacctcatactcaaataagaaactgacttaaatggtacttgtaattagcacttggtgaaagctggaaggaagataaataacactaaactatgctatttgatttttcttcttgaaagagtaaggtttacctgttacattttcaagttaattcatgtaaaaaatgatagtgattttgatgtaatttatctcttgtttgaatctgtcattcaaaggccaataatttaagttgctatcagctgatattagtagctttgcaaccctgatagagtaaataaattttatgggcgggtgccaaatactgctgtgaatctatttgtatagtatccatgaatgaatttatggaaatagatatttgtgcagctcaatttatgcagagattaaatgacatcataatactggatgaaaacttgcatagaattctgattaaatagtgggtctgtttcacatgtgcagtttgaagtatttaaataaccactcctttcacagtttattttcttctcaagcgttttcaagatctagcatgtggattttaaaagatttgccctcattaacaagaataacatttaaaggagattgtttcaaaatatttttgcaaattgagataaggacagaaagattgagaaacattgtatattttgcaaaaacaagatgtttgtagctgtttcagagagagtacggtatatttatggtaattttatccactagcaaatcttgatttagtttgatagtgtgtggaattttattttgaaggataagaccatgggaaaattgtggtaaagactgtttgtacccttcatgaaataattctgaagttgccatcagttttactaatcttctgtgaaatgcatagatatgcgcatgttcaactttttattgtggtcttataattaaatgtaaaattgaaaattcatttgctgtttcaaagtgtgatatctttcacaatagcctttttatagtcagtaattcagaataatcaagttcatatggataaatgcatttttatttcctatttctttagggagtgctacaaatgtttgtcacttaaatttcaagtttctgttttaatagttaactgactatagattgttttctatgccatgtatgtgccacttctgagagtagtaaatgactctttgctacattttaaaagcaattgtattagtaagaactttgtaaataaatacctaaaacccaagtgt

SEQ ID NO: 130210 - DNA, 4343 bp, Homo sapiens
  Payload ID: 5480
  Gene Symbol: ECT2L
  Gene Name: epithelial cell transforming 2 like
  Uniprot ID: Q008S8
  ENST ID: ENST00000367682
  CDS Start-End: 186-2900
agttggcgcactcgattttcactgcgcggttccaagaggagacagccgccactgtaccgggcctcatagccacttcctagaggtgatcttaattgcacacctattgaaataaacctgtagtttctagaagtggaagaaaatttgctgagacgtcagctggggattcttcctggagaactccagaaatggagagcttccacaccagatttagtgcctggacaccttttagcaacaagtcattaaatagacagctctttcaggaaagagtggctcttataagtcattggtttgacctctggactaacaagcaacgtcaagaattcttattcgcaatttttttaagatgcactaaatcacaattaaggtttgtccaagactggttttcagaaaggatgcaagtggccaaagtggacttctctacagtgttaccacgcttcatttctctatatatcttttcctttttgagtccgaaagatttgtgtgccgctgcccaagtcagctggccctggaagtttttaactgaacaggattgcttatggatgcccaaatgcgttaagttcggatggtttctgccctatactccaacagataatgagtatggtgcttggaagcgccattacattgcttgtgtgtcccacttagactggctgacacctagggaggctgctgctacttatgggacgctgaatgaacccaaaacagaagatgaggaactactggagagacaaagagaaaagtgcctgaggaaaagaatttgggagaaaattgcactacgtaagaaggagttattcaaagttcgacccccttgggtgagtggaacttgctgctctagcgtgctaaagcccagatgccaaccacgcctctcccagactgtaagggagcgagtgggattacatgaagctttggagaaacagcttgttttgacatcgttagaaaccttgcccaagcgaagcaatatttctggaagccattcctaccctttattatcaaagaaaaattggcatggagttcataaaaatgatgacagatcttcatatgctctccggccacacttcatgttaatatcatcccggattcctgcgtatgagatggtgatggagagtgtgaaggctggtgttgtttctgtggtatatgaacacagcgtaaccttggaaagccttctgtatcttatagaaaaagctctggatgggcagaaggcacagagcatcggaatatttagcgatggagacagcagagaaatcaatttactccaaggctataaaattggtgttaaaaatttactgaggcctgaagtgagagatttctgggagaaattaggaagctatgtggccactgaagaagaagggggtcacgtggacttcttcgtgccccttggagcatcagaggcaggaattgaagttctttcccagctgtctcaactaactggcacgttctttacggcccccactgggattgcaactggctcttaccagcacattcttagtgattggctgggatcccaatggggaaaggccccctcttccatctacttctgcgaatcgaagctacagacgtggtccagcttcacagacttcctagaagaaaccttgaaaacagtaaggaagcagctgtatcctttcttcaaggaactgcagaagagcatcagtggcaggatgatagggcagtttatgtttgacaccatgggtatgaccaacattctaaacaaccaagatactgcgcaagctctggcagatggattgatggagttgtcaaaagaagattctgaaagaaatgttgtagaagacaattcttgggacacaaagtccaggctcagcaaaaatgatttaaattttgaagcactgattaatctggagagaatactccagaaggactcagcagaaaagcgagctagagttgtcagagaactcttacagagtgagagaaaatacgtgcagatactggaaattgtgagagatgtttatgtcgcaccactgaaagcagcattgtcatcaaacagagcgattctgagtgctgccaatatccagatcattttctgtgacattctacagattttaagtctcaacaggcagtttctagataacctgagagacagactgcaggaatggggcccagctcactgtgtgggagaaatagtcacgaagtttggaagccagttaaacacatataccaatttcttcaacaattaccctgtcattctgaaaactattgagaagtgcagagaaatgataccagcattccgaactttcctgaagaggcatgataagaccattgttaccaaaatgctgagcctgccagagctgctgctgtacccatcccgaagatttgaagaataccttaatcttctctacgctgtcaggcttcatacccctgcagagcatgttgaccgtggggacttgaccactgcaattgaccaaatcaaaaaatataaaggttatatagatcagatgaagcaaaacatcactatgaaggatcatctgtcagatatacagagaatcatctggggatgccctactctatcagaagtaaacagatatctgattagggtacaagatgtagcccaacttcattgctgtgatgaagaaataagtttctctttaaggctctatgaacacatccatgatctcagccttttcctcttcaatgatgccctgctcgtttctagtcggggcacatctcacactccatttgagaggacttcaaaaacaacctaccagttcattgcatcagtggcccttcatcggttactcatagaaaatattccagattccaagtatgtcaagaatgcatttattcttcagggtccaaaatataaatggatttgtgctacagaaatagaggatgataagttcctatggctgtcagtacttcgaaatgcaatcaaaagcagtatggagaagtgagaccgaacttgaaaacttcaggggtgccaattctccccagcaaagacagacaacatgtattttctgttccaaaatatccagtaagaaacagaataactgtcatggatgatgagataaactaagatgacccataggatctttccaacttttaaactttatcacttgtgctcacttatgtagaatgtataagtacattttgagtccaaaattttgaactacttcttttggtagctgtatttcatggataatattatttagagtaatttgatgtgatgaaacctaagacagagcaagcacattgtgtaaagctttgttttatgatctaatgaaaaaagcagaatgaaagtgtttcttaagtgatcagtctagaaagatattttaatttgttggtgatttaccatttttaacattttcatgaaacaattattgatttaaaatatggataagagggctgggcatgatgactcacgcctgtaatcccagcactttgggaggctgaggtggcagattacctgaggtcaggagtttgagaccagcctcaccaacatggagaaaccccgtctctactaaaaatacaaaattagccaggcatggtggcacacgcctgtagtccctgctacttgcgacgctgaggcaggagaagaatcacttgtacccgggagtcggaggttgtagtaagctgagatggctccattgcacttcagcctgggtgacaagagcgaacctctgtctcaaaaaaaaaagaaaaaaaaaaggacaagaaatacaaatggcaatttactcaaaaacttgtcacacttatccttagtatgaatgtactcctctagagagcattaaagatataccactacaaagtactaaaaagttttctataatttttaagtgttatttattggaaggctaaattctaagaagctttaacaaatatttttgacattgttaaattagaaggctatttttaaaaagcatattttaaaaaacaaaactaaatggaaacagcaaaacttgcttgtaatgaaatacagctgagtaaaaatgtttctttgaaaacaaagacactcagaaaaacaggtgttgagtagtttcctgggcctttaatgctttaaatttattatttaacaactaaagccatactgaaagccacttggaaacttcagctgatgtatatttttacctagatattgtcaggtaaaaattgtattaatcttggaagcttgaggttgtcagtttcccttgttcttcaaattcttgtttacagtaacaaagtctatcggtgcagtttaggactgtgaatctatagtatttaaacattttttctttcagaaatgaaaatacaaaatcttctatttcttaaaactttaaatcttgttaaaaagatgaacaaaagttaaaatattatgctgttttattggtgtaaaaccacacttctgattctgccaagat

SEQ ID NO: 130211 - DNA, 548 bp, Homo sapiens
  Payload ID: 5480
  Gene Symbol: ECT2L
  Gene Name: epithelial cell transforming 2 like
  ENST ID: ENST00000401414
  CDS Start-End: 317-548
actcgattttcactgcgcggttccaagaggagacagccgccactgtaccgggcctcatagccacttcctagaggtaaagaaaaagtcaacctccttggctgatgaatcacggcagtttctaagtagcatttcctggaacgttcttaatgcttcccattttcccagcaaagtaaaaaacaacttttgtttaaattcagatttgggtgaaagcaggtgatcttaattgcacacctattgaaataaacctgtagtttctagaagtggaagaaaatttgctgagacgtcagctggggattcttcctggagaactccagaaatggagagcttccacaccagatttagtgcctggacaccttttagcaacaagtcattaaatagacagctctttcaggaaagagtggctcttataagtcattggtttgacctctggactaacaagcaacgtcaagaattcttattcgcaatttttttaagatgcactaaatcacaattaaggtttgtccaagactggttttcagaaaggatgcaagtggccaaagtggacttct

SEQ ID NO: 130212 - DNA, 4319 bp, Homo sapiens
  Payload ID: 5480
  Gene Symbol: ECT2L
  Gene Name: epithelial cell transforming 2 like
  Uniprot ID: Q008S8
  ENST ID: ENST00000423192
  CDS Start-End: 162-2876
aagggcggtggctcgcacggcgcgggcggctttgctcactgcagctggggagatgcaggtgatcttaattgcacacctattgaaataaacctgtagtttctagaagtggaagaaaatttgctgagacgtcagctggggattcttcctggagaactccagaaatggagagcttccacaccagatttagtgcctggacaccttttagcaacaagtcattaaatagacagctctttcaggaaagagtggctcttataagtcattggtttgacctctggactaacaagcaacgtcaagaattcttattcgcaatttttttaagatgcactaaatcacaattaaggtttgtccaagactggttttcagaaaggatgcaagtggccaaagtggacttctctacagtgttaccacgcttcatttctctatatatcttttcctttttgagtccgaaagatttgtgtgccgctgcccaagtcagctggccctggaagtttttaactgaacaggattgcttatggatgcccaaatgcgttaagttcggatggtttctgccctatactccaacagataatgagtatggtgcttggaagcgccattacattgcttgtgtgtcccacttagactggctgacacctagggaggctgctgctacttatgggacgctgaatgaacccaaaacagaagatgaggaactactggagagacaaagagaaaagtgcctgaggaaaagaatttgggagaaaattgcactacgtaagaaggagttattcaaagttcgacccccttgggtgagtggaacttgctgctctagcgtgctaaagcccagatgccaaccacgcctctcccagactgtaagggagcgagtgggattacatgaagctttggagaaacagcttgttttgacatcgttagaaaccttgcccaagcgaagcaatatttctggaagccattcctaccctttattatcaaagaaaaattggcatggagttcataaaaatgatgacagatcttcatatgctctccggccacacttcatgttaatatcatcccggattcctgcgtatgagatggtgatggagagtgtgaaggctggtgttgtttctgtggtatatgaacacagcgtaaccttggaaagccttctgtatcttatagaaaaagctctggatgggcagaaggcacagagcatcggaatatttagcgatggagacagcagagaaatcaatttactccaaggctataaaattggtgttaaaaatttactgaggcctgaagtgagagatttctgggagaaattaggaagctatgtggccactgaagaagaagggggtcacgtggacttcttcgtgccccttggagcatcagaggcaggaattgaagttctttcccagctgtctcaactaactggcacgttctttacggcccccactgggattgcaactggctcttaccagcacattcttagtgattggctgggatcccaatggggaaaggccccctcttccatctacttctgcgaatcgaagctacagacgtggtccagcttcacagacttcctagaagaaaccttgaaaacagtaaggaagcagctgtatcctttcttcaaggaactgcagaagagcatcagtggcaggatgatagggcagtttatgtttgacaccatgggtatgaccaacattctaaacaaccaagatactgcgcaagctctggcagatggattgatggagttgtcaaaagaagattctgaaagaaatgttgtagaagacaattcttgggacacaaagtccaggctcagcaaaaatgatttaaattttgaagcactgattaatctggagagaatactccagaaggactcagcagaaaagcgagctagagttgtcagagaactcttacagagtgagagaaaatacgtgcagatactggaaattgtgagagatgtttatgtcgcaccactgaaagcagcattgtcatcaaacagagcgattctgagtgctgccaatatccagatcattttctgtgacattctacagattttaagtctcaacaggcagtttctagataacctgagagacagactgcaggaatggggcccagctcactgtgtgggagaaatagtcacgaagtttggaagccagttaaacacatataccaatttcttcaacaattaccctgtcattctgaaaactattgagaagtgcagagaaatgataccagcattccgaactttcctgaagaggcatgataagaccattgttaccaaaatgctgagcctgccagagctgctgctgtacccatcccgaagatttgaagaataccttaatcttctctacgctgtcaggcttcatacccctgcagagcatgttgaccgtggggacttgaccactgcaattgaccaaatcaaaaaatataaaggttatatagatcagatgaagcaaaacatcactatgaaggatcatctgtcagatatacagagaatcatctggggatgccctactctatcagaagtaaacagatatctgattagggtacaagatgtagcccaacttcattgctgtgatgaagaaataagtttctctttaaggctctatgaacacatccatgatctcagccttttcctcttcaatgatgccctgctcgtttctagtcggggcacatctcacactccatttgagaggacttcaaaaacaacctaccagttcattgcatcagtggcccttcatcggttactcatagaaaatattccagattccaagtatgtcaagaatgcatttattcttcagggtccaaaatataaatggatttgtgctacagaaatagaggatgataagttcctatggctgtcagtacttcgaaatgcaatcaaaagcagtatggagaagtgagaccgaacttgaaaacttcaggggtgccaattctccccagcaaagacagacaacatgtattttctgttccaaaatatccagtaagaaacagaataactgtcatggatgatgagataaactaagatgacccataggatctttccaacttttaaactttatcacttgtgctcacttatgtagaatgtataagtacattttgagtccaaaattttgaactacttcttttggtagctgtatttcatggataatattatttagagtaatttgatgtgatgaaacctaagacagagcaagcacattgtgtaaagctttgttttatgatctaatgaaaaaagcagaatgaaagtgtttcttaagtgatcagtctagaaagatattttaatttgttggtgatttaccatttttaacattttcatgaaacaattattgatttaaaatatggataagagggctgggcatgatgactcacgcctgtaatcccagcactttgggaggctgaggtggcagattacctgaggtcaggagtttgagaccagcctcaccaacatggagaaaccccgtctctactaaaaatacaaaattagccaggcatggtggcacacgcctgtagtccctgctacttgcgacgctgaggcaggagaagaatcacttgtacccgggagtcggaggttgtagtaagctgagatggctccattgcacttcagcctgggtgacaagagcgaacctctgtctcaaaaaaaaaagaaaaaaaaaaggacaagaaatacaaatggcaatttactcaaaaacttgtcacacttatccttagtatgaatgtactcctctagagagcattaaagatataccactacaaagtactaaaaagttttctataatttttaagtgttatttattggaaggctaaattctaagaagctttaacaaatatttttgacattgttaaattagaaggctatttttaaaaagcatattttaaaaaacaaaactaaatggaaacagcaaaacttgcttgtaatgaaatacagctgagtaaaaatgtttctttgaaaacaaagacactcagaaaaacaggtgttgagtagtttcctgggcctttaatgctttaaatttattatttaacaactaaagccatactgaaagccacttggaaacttcagctgatgtatatttttacctagatattgtcaggtaaaaattgtattaatcttggaagcttgaggttgtcagtttcccttgttcttcaaattcttgtttacagtaacaaagtctatcggtgcagtttaggactgtgaatctatagtatttaaacattttttctttcagaaatgaaaatacaaaatcttctatttcttaaaactttaaatcttgttaaaaagatgaacaaaagttaaaatattatgctgttttattggtgtaaaaccacacttctgattctgccaagat

SEQ ID NO: 130213 - DNA, 4483 bp, Homo sapiens
  Payload ID: 5480
  Gene Symbol: ECT2L
  Gene Name:: epithelial cell transforming 2 like
  Uniprot ID: Q008S8
  ENST ID: ENST00000541398
  CDS Start-End: 326-3040
agttggcgcactcgattttcactgcgcggttccaagaggagacagccgccactgtaccgggcctcatagccacttcctagaggtaaagaaaaagtcaacctccttggctgatgaatcacggcagtttctaagtagcatttcctggaacgttcttaatgcttcccattttcccagcaaagtaaaaaacaacttttgtttaaattcagatttgggtgaaagcaggtgatcttaattgcacacctattgaaataaacctgtagtttctagaagtggaagaaaatttgctgagacgtcagctggggattcttcctggagaactccagaaatggagagcttccacaccagatttagtgcctggacaccttttagcaacaagtcattaaatagacagctctttcaggaaagagtggctcttataagtcattggtttgacctctggactaacaagcaacgtcaagaattcttattcgcaatttttttaagatgcactaaatcacaattaaggtttgtccaagactggttttcagaaaggatgcaagtggccaaagtggacttctctacagtgttaccacgcttcatttctctatatatcttttcctttttgagtccgaaagatttgtgtgccgctgcccaagtcagctggccctggaagtttttaactgaacaggattgcttatggatgcccaaatgcgttaagttcggatggtttctgccctatactccaacagataatgagtatggtgcttggaagcgccattacattgcttgtgtgtcccacttagactggctgacacctagggaggctgctgctacttatgggacgctgaatgaacccaaaacagaagatgaggaactactggagagacaaagagaaaagtgcctgaggaaaagaatttgggagaaaattgcactacgtaagaaggagttattcaaagttcgacccccttgggtgagtggaacttgctgctctagcgtgctaaagcccagatgccaaccacgcctctcccagactgtaagggagcgagtgggattacatgaagctttggagaaacagcttgttttgacatcgttagaaaccttgcccaagcgaagcaatatttctggaagccattcctaccctttattatcaaagaaaaattggcatggagttcataaaaatgatgacagatcttcatatgctctccggccacacttcatgttaatatcatcccggattcctgcgtatgagatggtgatggagagtgtgaaggctggtgttgtttctgtggtatatgaacacagcgtaaccttggaaagccttctgtatcttatagaaaaagctctggatgggcagaaggcacagagcatcggaatatttagcgatggagacagcagagaaatcaatttactccaaggctataaaattggtgttaaaaatttactgaggcctgaagtgagagatttctgggagaaattaggaagctatgtggccactgaagaagaagggggtcacgtggacttcttcgtgccccttggagcatcagaggcaggaattgaagttctttcccagctgtctcaactaactggcacgttctttacggcccccactgggattgcaactggctcttaccagcacattcttagtgattggctgggatcccaatggggaaaggccccctcttccatctacttctgcgaatcgaagctacagacgtggtccagcttcacagacttcctagaagaaaccttgaaaacagtaaggaagcagctgtatcctttcttcaaggaactgcagaagagcatcagtggcaggatgatagggcagtttatgtttgacaccatgggtatgaccaacattctaaacaaccaagatactgcgcaagctctggcagatggattgatggagttgtcaaaagaagattctgaaagaaatgttgtagaagacaattcttgggacacaaagtccaggctcagcaaaaatgatttaaattttgaagcactgattaatctggagagaatactccagaaggactcagcagaaaagcgagctagagttgtcagagaactcttacagagtgagagaaaatacgtgcagatactggaaattgtgagagatgtttatgtcgcaccactgaaagcagcattgtcatcaaacagagcgattctgagtgctgccaatatccagatcattttctgtgacattctacagattttaagtctcaacaggcagtttctagataacctgagagacagactgcaggaatggggcccagctcactgtgtgggagaaatagtcacgaagtttggaagccagttaaacacatataccaatttcttcaacaattaccctgtcattctgaaaactattgagaagtgcagagaaatgataccagcattccgaactttcctgaagaggcatgataagaccattgttaccaaaatgctgagcctgccagagctgctgctgtacccatcccgaagatttgaagaataccttaatcttctctacgctgtcaggcttcatacccctgcagagcatgttgaccgtggggacttgaccactgcaattgaccaaatcaaaaaatataaaggttatatagatcagatgaagcaaaacatcactatgaaggatcatctgtcagatatacagagaatcatctggggatgccctactctatcagaagtaaacagatatctgattagggtacaagatgtagcccaacttcattgctgtgatgaagaaataagtttctctttaaggctctatgaacacatccatgatctcagccttttcctcttcaatgatgccctgctcgtttctagtcggggcacatctcacactccatttgagaggacttcaaaaacaacctaccagttcattgcatcagtggcccttcatcggttactcatagaaaatattccagattccaagtatgtcaagaatgcatttattcttcagggtccaaaatataaatggatttgtgctacagaaatagaggatgataagttcctatggctgtcagtacttcgaaatgcaatcaaaagcagtatggagaagtgagaccgaacttgaaaacttcaggggtgccaattctccccagcaaagacagacaacatgtattttctgttccaaaatatccagtaagaaacagaataactgtcatggatgatgagataaactaagatgacccataggatctttccaacttttaaactttatcacttgtgctcacttatgtagaatgtataagtacattttgagtccaaaattttgaactacttcttttggtagctgtatttcatggataatattatttagagtaatttgatgtgatgaaacctaagacagagcaagcacattgtgtaaagctttgttttatgatctaatgaaaaaagcagaatgaaagtgtttcttaagtgatcagtctagaaagatattttaatttgttggtgatttaccatttttaacattttcatgaaacaattattgatttaaaatatggataagagggctgggcatgatgactcacgcctgtaatcccagcactttgggaggctgaggtggcagattacctgaggtcaggagtttgagaccagcctcaccaacatggagaaaccccgtctctactaaaaatacaaaattagccaggcatggtggcacacgcctgtagtccctgctacttgcgacgctgaggcaggagaagaatcacttgtacccgggagtcggaggttgtagtaagctgagatggctccattgcacttcagcctgggtgacaagagcgaacctctgtctcaaaaaaaaaagaaaaaaaaaaggacaagaaatacaaatggcaatttactcaaaaacttgtcacacttatccttagtatgaatgtactcctctagagagcattaaagatataccactacaaagtactaaaaagttttctataatttttaagtgttatttattggaaggctaaattctaagaagctttaacaaatatttttgacattgttaaattagaaggctatttttaaaaagcatattttaaaaaacaaaactaaatggaaacagcaaaacttgcttgtaatgaaatacagctgagtaaaaatgtttctttgaaaacaaagacactcagaaaaacaggtgttgagtagtttcctgggcctttaatgctttaaatttattatttaacaactaaagccatactgaaagccacttggaaacttcagctgatgtatatttttacctagatattgtcaggtaaaaattgtattaatcttggaagcttgaggttgtcagtttcccttgttcttcaaattcttgtttacagtaacaaagtctatcggtgcagtttaggactgtgaatctatagtatttaaacattttttctttcagaaatgaaaatacaaaatcttctatttcttaaaactttaaatcttgttaaaaagatgaacaaaagttaaaatattatgctgttttattggtgtaaaaccacacttctgattctgccaagat

SEQ ID NO: 130214 - DNA, 5921 bp, Homo sapiens
  Payload ID: 5481
  Gene Symbol: EMP1
  Gene Name: epithelial membrane protein 1
  Uniprot ID: P54849
  ENST ID: ENST00000256951
  CDS Start-End: 200-673
accgcccattacacaccccagtacaccagcagaggaaacttataacctcgggaggcaggtccttcccctcagtgcggtcacatacttccagaagagcggaccagggctgctgccagcacctgccactcagagcgcctctgtcgctgggacccttcagaactctctttgctcacaagttaccaaaaaaaaaagagccaacatgttggtattgctggctggtatctttgtggtccacatcgctactgttattatgctatttgttagcaccattgccaatgtctggttggtttccaatacggtagatgcatcagtaggtctttggaaaaactgtaccaacattagctgcagtgacagcctgtcatatgccagtgaagatgccctcaagacagtgcaggccttcatgattctctctatcatcttctgtgtcattgccctcctggtcttcgtgttccagctcttcaccatggagaagggaaaccggttcttcctctcaggggccaccacactggtgtgctggctgtgcattcttgtgggggtgtccatctacactagtcattatgcgaatcgtgatggaacgcagtatcaccacggctattcctacatcctgggctggatctgcttctgcttcagcttcatcatcggcgttctctatctggtcctgagaaagaaataaggccggacgagttcatggggatctggggggtggggaggaggaagccgttgaatctgggagggaagtggaggttgctgtacaggaaaaaccgagataggggaggggggagggggaagcaaaggggggaggtcaaatcccaaaccattactgaggggattctctactgccaagcccctgccctggggagaaagtagttggctagtactttgatgctcccttgatggggtccagagagcctccctgcagccaccagacttggcctccagctgttcttagtgacacacactgtctggggccccatcagctgccacaacaccagccccacttctgggtcatgcactgaggtccacagacctactgcactgagttaaaatagcggtacaagttctggcaagagcagatactgtctttgtgctgaatacgctaagcctggaagccatcctgcccttctgacccaaagcaaaacatcacattccagtctgaagtgcctactggggggctttggcctgtgagccattgtccctctttggaacagatatttagctctgtggaattcagtgacaaaatgggaggaggaaagagagtttgtaaggtcatgctggtgggttagctaaaccaagaaggagaccttttcacaatggaaaacctgggggatggtcagagcccagtcgagacctcacacacggctgtccctcatggagacctcatgccatggtctttgctaggcctcttgctgaaagccaaggcagctcttctggagtttctctaaagtcactagtgaacaattcggtggtaaaagtaccacacaaactatgggatccaaggggcagtcttgcaacagtgccatgttagggttatgtttttaggattcccctcaatgcagtcagtgtttcttttaagtatacaacaggagagagatggacatggctcattgtagcacaatcctattactcttcctctaacatttttgaggaagttttgtctaattatcaatattgaggatcagggctcctaggctcagtggtagctctggcttagacaccacctggagtgatcacctcttggggaccctgcctatcccacttcacaggtgaggcatggcaattctggaagctgattaaaacacacataaaccaaaaccaaacaacaggcccttgggtgaaaggtgctatataattgtgaagtattaagcctaccgtatttcagccatgataagaacagagtgcctgcattcccaggaaaatacgaaaatcccatgagataaataaaaatataggtgatgggcagatcttttctttaaaataaaaaagcaaaaactcttgtggtacctagtcagatggtagacgagctgtctgctgccgcaggagcacctctatacaggacttagaagtagtatgttattcctggttaagcaggcattgctttgccctggagcagctattttaagccatctcagattctgtctaaaggggttttttgggaagacgttttctttatcgccctgagaagatctaccccagggagaatctgagacatcttgcctacttttctttattagctttctcctcatccatttcttttatacctttcctttttggggagttgttatgccatgatttttggtatttatgtaaaaggattattactaattctatttctctatgtttattctagttaaggaaatgttgagggcaagccaccaaattacctaggctgaggttagagagattggccagcaaaaactgtgggaagatgaactttgtcattatgatttcattatcacatgattatagaaggctgtcttagtgcaaaaaacatacttacatttcagacatatccaaagggaatactcacattttgttaagaagttgaactatgactggagtaaaccatgtattcccttatcttttactttttttctgtgacatttatgtctcatgtaatttgcattactctggtggattgttctagtactgtattgggcttcttcgttaatagattatttcatatactataattgtaaatattttgatacaaatgtttataactctagggatataaaaacagattctgattcccttcattgtgtgaatgtttttttctaaaaaaaatgtggagaaatatggataattatgacatttatccctcattaagctgcctatcagtttgatttggacaacttgacatttatttgagacattaagctactttctggtaatatattaggcatttctgcaatagctctttcaggtaactgaatattattaagcatagttttatcttgctttgattaaacctcttaggcaaaaaatggaacttcataagctaatacattagaaaggggttatgattataaatcagaaatgcttgtgacattaagaaatgaggcacttgtgaaatttctttgaaatagccagctcctctaatgtgtcttcaaaatataaagtgattcacaaaggcatgcatcacacctatttgtagcagcccattcattacataaaccagggcatacctgtgtgggctctgtgagtgaagggaggcttcactactttctgtgagcagtaaggactggtatctttctgtgagcaataaggactggataaagactgcatatccttgtgtcgtgtcagcaccaatacaataaggagggttttaatgtgaagcaggcaatcttccagccccttctggtcttggatgaaatagttgcacagagtattgcaccaaaaatacacaatggaggctgaaaagttcaacatattttaagtcaattaatcaaattgcattgattcttgatgctttcttagaggcctacatgatttcttagattgctctgataaactatcataaggggtccacctcccctcatttagctcccccagggatttcttttcccccatgtcatacacccagtcctaaatcaacccccaaggctatccttccatcccttctgcagagggaacttttgtcagactctgcaacaaactcctagctctatccagagtgtcctctgctgctaagattggtatctttctcctcaaaagcctggatggtgaatgggggtgcattagtcagaattctccagagaaacagaaaaaataagattcgcgtgtgtgtgcaaacatatatataaataaataaaaatatatttattttaaggaattgactcacatgattttgaaggcaggcaagcccaaagtctgcaaggggtgggccagcagagagctggtgctacagtgcgggtctgaaagttgccagagtcccttttatagagaagcttaaaaaatatttgttgaattaaatgtcttaggtagagacaaattgaattaaagtggttaagtaaatactcttaggtgaaatttgtgcaaattatgagtataaagagggtgagctacagaactctccatgaccactcaagaatgggacccaaaggcaaatgataacttattcattcatcaagggataaacttgagttatcaaatggttaatagataaagatcccactctgccttggatttagccatcgcagtccctgtgtaaaaccccaccggctttcaggcatggaaaaaaatttcacaaaggccttgaaagaaggcatatgaagaccaaaaggatattgagcagggttccatacttgaataaaggaagaaactcccttcaatgtttactaagaaatagttagaatatagcatatcctgtatagatgaaatgtcctagcgaaaatgtttaaatgtatttaaagaagagctagattttgtggggggagagaagggaataggataggctggtgggaggaagaatgaaaagaagaaaacttgttggaaattttggagtagattgtgaggaggggtgactcactttaaagatgtatcatttggaggtagacacgattttcagagcacaaaacagataaggaaagatgtatgctgattgtgtggagcccaagggaaggcggggttttggagtcttacgtggctttgtttctgaaagggagacatgtgaagcctactcctgaggcgggaggctggggacatgaccatcaagacctataattgataaacaactaggggctgggtgctgcacctacatgctggggaaatagaaaatgaagcagacatgtgtcccatcttcttccagctttcagtctagcttggaaataaatctcatacctagagaaaatggaggatctgtgggatgtagatgaggtgggagcatgaatgcctagggagggaagaagaaagattttcagttcttcagcttttcctcatgaccctatctcatgccatgagcaattgtctggcatctcctgtgggttggaccactgctgcatttcttacttgccaacatcactttgtcccaaatgccattcctttgttccagggcctccttgtcttccatctggggaactggaggtgagaagcattataatagcctctctgcctttatctacaatctctccaacctgtgctttatgctgatgtcaggatgggcgttgatggatgcttctatcactgtcggggcagggagggccagaacactagcataagatgtcaatatgtctatccatatgtcaggtccatactcaactcaagcttctggttaactgctgatctattggcaactccagttcccaataagttcctcatctccttctgagaccacctcagtgtggacttaatcgtccacatcactgtcagcattttggttaaaaccattcaacaagtctccaggaagctccaaactttccttcatcttcctgtcttcttctgagccctccaaactcttccaacctctacccgttacccagttccaaaggtgcttccacactttcaagtatctttatagcaatgccccactcctggtaccaaattcctgtattagtctgttttcacactgctatgaagacatacttgagactcggtaatttatatagaaaagaggtttaattgacaaaaaagctaacaaagtgagccctgattcaaaaatgactgtctacacttggcacatgagggactttatgatattaagagattaattaaacaacagtggatggggaggaagaacagacttttgagctcttcccaatataggaatgtgttagttctaaaaattttcttaagttgtttgcttggaactcagagtatatttttccatacgaaaaattcagaactattttatttatgatatgggctaaaaagacttctgtaatctagcttggaaacttaataatcattaaacttattttcaatga

SEQ ID NO: 130215 - DNA, 675 bp, Homo sapiens
  Payload ID: 5481
  Gene Symbol: EMP1
  Gene Name: epithelial membrane protein 1
  Uniprot ID: P54849
  ENST ID: ENST00000396301
  CDS Start-End: 130-555
agtgcggtcacatacttccagaagagcggaccagggctgctgccagcacctgccactcagagcgcctctgtcgctgggacccttcagaactctctttgctcacaagttaccaaaaaaaaaagagccaacatgttggtattgctggctggtatctttgtggtccacatcgctactgttattatgctatttgttagcaccattgccaatgtctggttggtttccaatacggtagatgcatcagtaggtctttggaaaaactgtaccaacattagctgcagtgacagcctgtcatatgccagtgaagatgccctcaagacagtgcaggccttcatgattctctctatcatcttctgtgtcattgccctcctggtcttcgtgttccagctcttcaccatggagaagggaaaccggttcttcctctcaggggccaccacactggtgtgcttcattatgcgaatcgtgatggaacgcagtatcaccacggctattcctacatcctgggctggatctgcttctgcttcagcttcatcatcggcgttctctatctggtcctgagaaagaaataaggccggacgagttcatggggatctggggggtggggaggaggaagccgttgaatctgggagggaagtggaggttgctgtacaggaaaaaccgagataggggaggggggag

SEQ ID NO: 130216 - DNA, 1039 bp, Homo sapiens
  Payload ID: 5481
  Gene Symbol: EMP1
  Gene Name: epithelial membrane protein 1
  ENST ID: ENST00000431267
  CDS Start-End: 177-449
attacacaccccagtacaccagcagaggaaacttataacctcgggaggcaggtccttcccctcagtgcggtcacatacttccagaagagcggaccagggctgctgccagcacctgccactcagagcgcctctgtcgctgggacccttcagatgccctcaagacagtgcaggccttcatgattctctctatcatcttctgtgtcattgccctcctggtcttcgtgttccagctcttcaccatggagaagggaaaccggttcttcctctcaggggccaccacactggtgtgctggctgtgcattcttgtgggggtgtccatctacactagtcattatgcgaatcgtgatggaacgcagtatcaccacggctattcctacatcctgggctggatctgcttctgcttcagcttcatcatcggcgttctctatctggtcctgagaaagaaataaggccggacgagttcatggggatctggggggtggggaggaggaagccgttgaatctgggagggaagtggaggttgctgtacaggaaaaaccgagataggggaggggggagggggaagcaaaggggggaggtcaaatcccaaaccattactgaggggattctctactgccaagcccctgccctggggagaaagtagttggctagtactttgatgctcccttgatggggtccagagagcctccctgcagccaccagacttggcctccagctgttcttagtgacacacactgtctggggccccatcagctgccacaacaccagccccacttctgggtcatgcactgaggtccacagacctactgcactgagttaaaatagcggtacaagttctggcaagagcagatactgtctttgtgctgaatacgctaagcctggaagccatcctgcccttctgacccaaagcaaaacatcacattccagtctgaagtgcctactggggggctttggcctgtgagccattgtccctctttggaacagatatttagctctgtggaattcagtgacaaaatgggaggaggaaagagagtttgta

SEQ ID NO: 130217 - DNA, 571 bp, Homo sapiens
  Payload ID: 5481
  Gene Symbol: EMP1
  Gene Name: epithelial membrane protein 1
  ENST ID: ENST00000538364
  CDS Start-End: 133-571
ctcagtgcggtcacatacttccagaagagcggaccagggctgctgccagcacctgccactcagagcgcctctgtcgctgggacccttcagaactctctttgctcacaagttaccaaaaaaaaaagagccaacatgttggtattgctggctggtatctttgtggtccacatcgctactgttattatgctatttgttagcaccattgccaatgtctggttggtttccaatacggtagatgcatcagtaggtctttggaaaaactgtaccaacattagctgcagtgacagcctgtcatatgccagtgaagatgccctcaagacagtgcaggccttcatgattctctctatcatcttctgtgtcattgccctcctggtcttcgtgttccagctcttcaccatggagaagggaaaccggttcttcctctcaggggccaccacactggtgtgctgtgagtatctcatgggtagactccagtttacacttttaagtccatcttaccatgggtgtttctggcaacttgaacagattagcacatggttcagtgaaacttccttgtgcaattttctcctct

SEQ ID NO: 130218 - DNA, 505 bp, Homo sapiens
  Payload ID: 5481
  Gene Symbol: EMP1
  Gene Name: epithelial membrane protein 1
  ENST ID: ENST00000537612
  CDS Start-End: 1-210
atgttggtattgctggctggtatctttgtggtccacatcgctactgttattatgctatttgttagcaccattgccaatgtctggttggtttccaatacggtagatgcatcagtaggtctttggaaaaactgtaccaacattagctgcagtgacagcctgtcatatgccagtgaagatgaactttgtcattatgatttcattatcacatgattatagaaggctgtcttagtgcaaaaaacatacttacatttcagacatatccaaagggaatactcacattttgttaagaagttgaactatgactggagtaaaccatgtattcccttatcttttactttttttctgtgacatttatgtctcatgtaatttgcattactctggtggattgttctagtactgtattgggcttcttcgttaatagattatttcatatactataattgtaaatattttgatacaaatgtttataactctagggatataaaaacagattctgattcccttc

SEQ ID NO: 130219 - DNA, 1436 bp, Homo sapiens
  Payload ID: 5481
  Gene Symbol: EMP1
  Gene Name: epithelial membrane protein 1
  ENST ID: ENST00000544053
  CDS Start-End: 271-555
acacaccccagtacaccagcagaggaaacttataacctcgggaggcaggtccttcccctcagtgcggtcacatacttccagaagagcggaccagggctgctgccagcacctgccactcagagcgcctctgtcgctgggacccttcaggtctggttggtttccaatacggtagatgcatcagtaggtctttggaaaaactgtaccaacattagctgcagtgacagcctgtcatatgccagtgaagatgccctcaagacagtgcaggccttcatgattctctctatcatcttctgtgtcattgccctcctggtcttcgtgttccagctcttcaccatggagaagggaaaccggttcttcctctcaggggccaccacactggtgtgctgtgagtatctcatgggtagactccagtttacacttttaagtccatcttaccatgggtgtttctggcaacttgaacagattagcacatggttcagtgaaacttccttgtgcaattttctcctctggttatttgttctcttgtggagaaccttggattgctgcttaggttaagaaccctcatctgcttcattgttcaaaaccagtgctcctgggtagctaccaagtggcagtgcatatctgttagtagcacgtgtgtacaagacacttcaagaaggcagaaaggtaggagttctcagaaagatgaaaccactgccacaatgcacatcattattgtgattctcacttaattgttgttctttcccaatatactcggtttggtggaaggacatgctcttttgcatccctgagtagctttcctagacccacaagggccagacaggacagctgggtggtaggcatgaggttctgtgttttacatcacagcgtggccacacaaaccagtgcagacatgagagcccagacacctctaatttatcaacataccgtcgagcttggcccaggggacatccatcagaactcctgtttagggacaaacaagcagaattcattttcctattgctaatgagggaaataggatcttcttaaaattagtaaaactttttctcgactttaatgtaagaaaacacaccgacaaatctccttttcccctgcagggctgtgcattcttgtgggggtgtccatctacactagtcattatgcgaatcgtgatggaacgcagtatcaccacggctattcctacatcctgggctggatctgcttctgcttcagcttcatcatcggcgttctctatctggtcctgagaaagaaataaggccggacgagttcatggggatctggggggtggggaggaggaagccgttgaatctgggagggaagtggaggttgctgtacaggaaaaaccgagataggggaggggggagggggaagcaaaggggggaggtcaaatcccaaaccattactgaggggattctctactgccaagcccctgccct

SEQ ID NO: 130220 - DNA, 555 bp, Homo sapiens
  Payload ID: 5481
  Gene Symbol: EMP1
  Gene Name: epithelial membrane protein 1
  ENST ID: ENST00000542474
  CDS Start-End: 546-555
acacaccccagtacaccagcagaggaaacttataacctcgggaggcaggtccttcccctcagtgcggtcacatacttccagaagagcggaccagggctgctgccagcacctgccactcagagcgcctctgtcgctgggacccttcaggactgctgggcagaccgctggggaaaggaaagagatcccttctgtggagagtggaaaggactcactgtgccttcctcagcccttcctgcttcctccagagaccagattaggcccatcaagttcccagccttgtcagtgggcttcatggagacccctcacccgggaatgtagaccctcttggcttgctctgggtggctctagggatttcaggtagtgccagacccacagggactactggagagagacacgttgaagaccggggaaaacttgtggatgaggcaagactgcttttctgtagactctatggagcctggtggggcacataactgaaacgtggacacaggaaagggcaggagaactctctttgctcacaagttaccaaaaaaaaaagagccaacatgttggtat

SEQ ID NO: 130221 - DNA, 5197 bp, Homo sapiens
  Payload ID: 5482
  Gene Symbol: EMP2
  Gene Name: epithelial membrane protein 2
  Uniprot ID: P54851
  ENST ID: ENST00000359543
  CDS Start-End: 211-714
ggcgggatcggggaaggaggggccccgccgcctagagggtggagggagggcgcgcagtcccagcccagagcttcaaaacagcccggcggcctcgcctcgcacccccagccagtccgtcgatccagctgccagcgcagccgccagcgccggcacatcccgctctgggctttaaacgtgacccctcgcctcgactcgccctgccctgtgaaaatgttggtgcttcttgctttcatcatcgccttccacatcacctctgcagccttgctgttcattgccaccgtcgacaatgcctggtgggtaggagatgagttttttgcagatgtctggagaatatgtaccaacaacacgaattgcacagtcatcaatgacagctttcaagagtactccacgctgcaggcggtccaggccaccatgatcctctccaccattctctgctgcatcgccttcttcatcttcgtgctccagctcttccgcctgaagcagggagagaggtttgtcctaacctccatcatccagctaatgtcatgtctgtgtgtcatgattgcggcctccatttatacagacaggcgtgaagacattcacgacaaaaacgcgaaattctatcccgtgaccagagaaggcagctacggctactcctacatcctggcgtgggtggccttcgcctgcaccttcatcagcggcatgatgtacctgatactgaggaagcgcaaatagagttccggagctgggttgcttctgctgcagtacagaatccacattcagataaccattttgtatataatcattattttttgaggtttttctagcaaacgtattgtttcctttaaaagccaaaaaaaaaaaaaaaaaaaaaaaaaaaagaaaaaagaaaaaaaaaatccaaaagagagaagagtttttgcattcttgagatcagagaatagactatgaaggctggtattcagaactgctgcccactcaaaagtctcaacaagacacaagcaaaaatccagcaatgctcaaatccaaaagcactcggcaggacatttcttaaccatggggctgtgatgggaggagaggagaggctgggaaagccgggtctctggggacgtgcttcctatgggtttcagctggcccaagcccctcccgaatctctctgctagtggtgggtggaagagggtgaggtggggtataggagaagaatgacagcttcctgagaggtttcacccaagttccaagtgagaagcaggtgtagtccctggcattctgtctgtatccaaaccagagcccagccatccctccggtatcggggtgggtcagaaaaagtctcacctcaatttgccgacagtgtcacctgcttgccttaggaatggtcatccttaacctgcgtgccagatttagactcgtctttaggcaaaacctacagcgccccccccctcaccccagacctacagaatcagagtcttcaagggatggggccagggaatctgcatttctaacgcgctccctgggcaacgcttcagatgcgttgaagttggggaccacggtgcctgggccaggtcagcagagctgcctcgtaaatgctggggtatcgtcatgtggagatggggaggtgaatgcaacccccacagcaggccaaaaccttggcctccatcgccacagctgtctacatctagggccccaaaactccattcctgagccatgtgaactcatagacaccttcagggtgtggggtacagcctccttcccatcttatcccagaaggcctctcccttcttgtccagcccttcatgctacacctggctggcctctcacccctatttctagagcctcagaggacccatccaccattcattcattcattcattcattcattcattcattcattcatcaacataaatcataacttgcatgcatgtgccaggcacaggggataccctctagagacaatctcctcctagggctcatggcctagtggaggagacagattaaaacttaattagaaaaactggctgggtacagtggctcatgcttgtaatcccagcactttgggaggctgaggcgggtggatcacctgaggtcaggagttcaagaccagcctggccaaaatggtaaaacctgtctctactaaaaatacaaaaatgagctgggcgtggtggtgcatgcctgtaatcccagctatcaggtggctgaggcaggagaatcacttgaaatgggaggtggaggttgcagtgagccgagaccgtgccactgcactccagcctgggtgacagagtgagactccatctcaaaaaaagaaaaaaaagaaaagaaactaattacacactgtgatggaggctgcaaagaacaccactaagaattcaaaatcagctgggtgcggtggctcacacctgtaatcccagcactttgggaggctgaggcaggtggatcacaaggtcaggagttcaagaccagcctggccaacatggtgaaaccccgtctctaccgaaaatacaacaaaattagcccggtgtggtggcaggtgcctgtaatcccagctacttaggaggctgaggcaggagaatcgcttgaaactgggaggcggaggtcgcagtgagccgagattcaccactgcactccagcccaggcgacagtctgagactccgtctcaaaaataaaacgattcaaaatcgaggcctgtggcatggtagggaggctgctttacgcgtgcctattattaaatgctcctggaggcatttaggtatttagatcagtctaaatatagctccattcagttcgtgcagatgacagttattgggcagtacctgtctgtgtaacacccagaaaacatgtctgtggaggggcccatggtcccgacagtaaatgcggtgagagggtcccatagagctggagttttcaagctttaggggttcccgtgctgcttgggacaggctgattcagagggtctgggtgaatgatttccaggtgattttaagactgtgctgagaaatagggcttttggggccttgtccttcaggatcaaagcatgatgctgtgtggcaatgcagaccacccaggaaccatcccaggagataagctctttgcacctcattgtctttttctgcttatgttggagcaggatgctgggggctgtcctgggatggggtgtgggacctcgtgctatttaaatacttttgcacttgaccttctgctgagtggagtggtggtttgccatcagctcagttccagtggagctgaagagacatctggtttgagtagttttagggccaccatggatatctcttcaatgcaggattggctctttccatctgctctttcattcatttgtttttgacagatagtattaaatgtttaccatgttccaggcactgtgtgaggctctgaaaatacaggggtgagcaaatccagatatcctccctgccatcatgaagtttggagtctatgagataggaccccctccctatggagaagccaccaatgcagtacagggtgacctggggccagagacaggacaaatgtcacctcctgcctccatgagatactctcactagtcatattgtgggcaagaatgtggcttacacccctagggttaacaggatgctacccaagctcatggaggaagttgaatcttaagttcccttgaaactttctaccttggtggcttttctataattttcttttttctttttcttttttttttttttttttgagactgagttttgctcttgttgcccaggctggagtgcagtggcaccatcttggctcaccgcaacctctgcctcctgggttcaagtgattctcctgcctcagcctcccgagtagctgggattacaggcatgtcccaccatgcccagctaatttttgtatttttagtagagatggggtttctccatgttggtcaggctggtttcgaactcccaacctcaggtgatccgcccacctcagccttccaaagtgctgggattacaggcatgagccactgcgtctggccttctataattttctggtagtcacgatggaaacaaacaaaacaccttagaaccagagatcgaccccctcaagcaatacatcaattcccttcacaagaaacgtcggggctacatgagtatctgtgttgaatgcggtctgaaatgatcctatggattttcccggctggttgccactgctgtacaacattcagtgcccacatccacctgtgccattaagcttttttgagacatgagagatgcctcttccctgctgtatgacatgcatttgggaagttggaaagaaatgacaaaatcagggagaaaacatccaagcttcttacctgtagatagaatcagccctcacttggtgcttattaccagttattcaagaacaataacaacaacaaaattagtagacatccaagaagcacatattaggaccaaagatagcatcaactgtatttgaaggaactgtagtttgcgcattttatgacatttttataaagtactgtaattctttcattgaggggctatgtgatggagacagactaactcattttgttatttgcattaaaattattttgggtctctgttcaaatgagtttggagaatgcttgacttgttggtctgtgtgaatgtgtatatatatatacctgaatacaggaacatcggagacctattcactcccacacactctgctatagtttgcgtgcttttgtggacacccctcatgaacaggctggcgctctaggacgctctgtgttcactgatgatgaagaaacctagaactccaagcctgtttgtaaacacactaaacacagtggcctagatagaaactgtatcgtagtttaaaatctgcctcgcgggatgttactaaactcgctaatagtttaaaggttacttacaatagagcaagttggacaattttgtggtgttggggaaatgttagggcaaggcctagaggttcattttgaatcttggtttgtgactttagggtagttagaaactttctacttaatgtacctttaaaatagtccattttctatgttttgtataatctgaaactgtacatggaaaataaagtttaaaaccagattgcccagagcaagactctaatgttcccaacggtgatgacatctagggcagaatgctgccattttgaggggcagggggtcagctgatttctcatcaagataataatgtatggtttttacactaagcaactgataaatggacaatttatcactgga

SEQ ID NO: 130222 - DNA, 781 bp, Homo sapiens
  Payload ID: 5482
  Gene Symbol: EMP2
  Gene Name: epithelial membrane protein 2
  Uniprot ID: P54851
  ENST ID: ENST00000536829
  CDS Start-End: 222-725
ggcctgggagtccttgcagggtggcctgggtgactgctcaccagcccggccctccccagggttctgggccagagcctccctggccgttggagcgggagctgtgggtggaacacttctgaattgggagattgcctcggacctccagacgccgaacatctcagcacatcccgctctgggctttaaacgtgacccctcgcctcgactcgccctgccctgtgaaaatgttggtgcttcttgctttcatcatcgccttccacatcacctctgcagccttgctgttcattgccaccgtcgacaatgcctggtgggtaggagatgagttttttgcagatgtctggagaatatgtaccaacaacacgaattgcacagtcatcaatgacagctttcaagagtactccacgctgcaggcggtccaggccaccatgatcctctccaccattctctgctgcatcgccttcttcatcttcgtgctccagctcttccgcctgaagcagggagagaggtttgtcctaacctccatcatccagctaatgtcatgtctgtgtgtcatgattgcggcctccatttatacagacaggcgtgaagacattcacgacaaaaacgcgaaattctatcccgtgaccagagaaggcagctacggctactcctacatcctggcgtgggtggccttcgcctgcaccttcatcagcggcatgatgtacctgatactgaggaagcgcaaatagagttccggagctgggttgcttctgctgcagtacagaatccacattcagataaccat

SEQ ID NO: 130223 - DNA, 876 bp, Homo sapiens
  Payload ID: 5483
  Gene Symbol: EMP3
  Gene Name: epithelial membrane protein 3
  Uniprot ID: P54852
  ENST ID: ENST00000270221
  CDS Start-End: 302-793
gtttataaaagggtcagtatatattgagaggaggagagaaagagaaacgggagcaagagagaaggaggcccagacagtgagggcaggagggagagaagagacgcagaaggagagcgagcgagagagaaagggttctggattggaggggagagcaagggagggaggaaggcggtgagagaggcgggggcctcgggagggtgaaaggagggaggagaagggcggggcacggaggcccgagcgagggacaagactccgactccagctctgacttttttcgcggctctcggcttccactgcagccatgtcactcctcttgctggtggtctcagcccttcacatcctcattcttatactgcttttcgtggccactttggacaagtcctggtggactctccctgggaaagagtccctgaatctctggtacgactgcacgtggaacaacgacaccaaaacatgggcctgcagtaatgtcagcgagaatggctggctgaaggcggtgcaggtcctcatggtgctctccctcattctctgctgtctctccttcatcctgttcatgttccagctctacaccatgcgacgaggaggtctcttctatgccaccggcctctgccagctttgcaccagcgtggcggtgtttactggcgccttgatctatgccattcacgccgaggagatcctggagaagcacccgcgagggggcagcttcggatactgcttcgccctggcctgggtggccttccccctcgccctggtcagcggcatcatctacatccacctacggaagcgggagtgagcgccccgcctcgctcggctgcccccgccccttcccggcccccctcgccgcgcgtcctccaaaaaataaaaccttaaccgcgg

SEQ ID NO: 130224 - DNA, 683 bp, Homo sapiens
  Payload ID: 5483
  Gene Symbol: EMP3
  Gene Name: epithelial membrane protein 3
  Uniprot ID: P54852
  ENST ID: ENST00000597279
  CDS Start-End: 109-600
ctccagctctgacttttttcgcggctctcgcgcgaatcctatccatttcctccagaagatgtccaacagtcaccagtctggcagcagggtggggcttccactgcagccatgtcactcctcttgctggtggtctcagcccttcacatcctcattcttatactgcttttcgtggccactttggacaagtcctggtggactctccctgggaaagagtccctgaatctctggtacgactgcacgtggaacaacgacaccaaaacatgggcctgcagtaatgtcagcgagaatggctggctgaaggcggtgcaggtcctcatggtgctctccctcattctctgctgtctctccttcatcctgttcatgttccagctctacaccatgcgacgaggaggtctcttctatgccaccggcctctgccagctttgcaccagcgtggcggtgtttactggcgccttgatctatgccattcacgccgaggagatcctggagaagcacccgcgagggggcagcttcggatactgcttcgccctggcctgggtggccttccccctcgccctggtcagcggcatcatctacatccacctacggaagcgggagtgagcgccccgcctcgctcggctgcccccgccccttcccggcccccctcgccgcgcgtcctccaaaaaataaaaccttaaccgcgg

SEQ ID NO: 130225 - DNA, 502 bp, Homo sapiens
  Payload ID: 5483
  Gene Symbol: EMP3
  Gene Name: epithelial membrane protein 3
  ENST ID: ENST00000593437
  CDS Start-End: 19-502
tcggcttccactgcagccatgtcactcctcttgctggtggtctcagcccttcacatcctcattcttatactgcttttcgtggccactttggacaagtcctggtggactctccctgggaaagagtccctgaatctctggctggctgaaggcggtgcaggtcctcatggtgctctccctcattctctgctgtctctccttcatcctgttcatgttccagctctacaccatgcgacgaggaggtctcttctatgccaccggcctctgccagctttgcaccagcgtggcggtgtttactggcgccttgatctatgccattcacgccgaggagatcctggagaagcacccgcgagggggcagcttcggatactgcttcgccctggcctgggtggccttccccctcgccctggtcagcggcatcatctacatccacctacggaagcgggagtgagcgccccgcctcgctcggctgcccccgccccttcccggcccccctcgccgcgcg

SEQ ID NO: 130226 - DNA, 761 bp, Homo sapiens
  Payload ID: 5483
  Gene Symbol: EMP3
  Gene Name: epithelial membrane protein 3
  ENST ID: ENST00000596315
  CDS Start-End: 394-678
attgagaggaggagagaaagagaaacgggagcaagagagaaggaggcccagacagtgagggcaggagggagagaagagacgcagaaggagagcgagcgagagagaaagggttctggattggaggggagagcaagggagggaggaaggcggtgagagaggcgggggcctcgggagggtgaaaggagggaggagaagggcggggcacggaggcccgagcgagggacaagactccgactccagctctgacttttttcgcggctctcgtcctggtggactctccctgggaaagagtccctgaatctctggtacgactgcacgtggaacaacgacaccaaaacatgggcctgcagtaatgtcagcgagaatggctggctgaaggcggtgcaggtcctcatggtgctctccctcattctctgctgtctctccttcatcctgttcatgttccagctctacaccatgcgacgaggaggtctcttctatgccaccggcctctgccagctttgcaccagcgtggcggtgtttactggcgccttgatctatgccattcacgccgaggagatcctggagaagcacccgcgagggggcagcttcggatactgcttcgccctggcctgggtggccttccccctcgccctggtcagcggcatcatctacatccacctacggaagcgggagtgagcgccccgcctcgctcggctgcccccgccccttcccggcccccctcgccgcgcgtcctccaaaaaataaaaccttaaccgcgg

SEQ ID NO: 130227 - DNA, 753 bp, Homo sapiens
  Payload ID: 5483
  Gene Symbol: EMP3
  Gene Name: epithelial membrane protein 3
  ENST ID: ENST00000599704
  CDS Start-End: 485-753
ggggcttccccgtaaggggcgggcttcgagggtcgcgtttggaaggccttacgaggggcccggtggaagggcggtgaagggcgggctaatcgggaggcgctcaggccttgaaggcctgcgggaggtcgaaatggtcctggggaggtcgaggctgaggtctcactagtaccgcgggcctggaagcggcgggagttgaaagagcctgcggtgacctgtatggaagccctcgaagccaggccgaggtcctacaagacggagcccgagaggtgccggtcttaagctgactgtgaccacgttaaattaaggattcataggaaggaaggcggtgtcgaagccgggagttgcgcggagaaggagcgctcaacacagcctcagcggttcactacgcaagcgcgaccaacggcttcccgggaagcagccaaaaacgcttggccgcctaccacgtccgcgcgctggagggcggaagtgggcttccactgcagccatgtcactcctcttgctggtggtctcagcccttcacatcctcattcttatactgcttttcgtggccactttggacaagtcctggtggactctccctgggaaagagtccctgaatctctggtacgactgcacgtggaacaacgacaccaaaacatgggcctgcagtaatgtcagcgagaatggctggctgaaggcggtgcaggtcctcatggtgctctccctcattctctgctgtctctccttcatcctgttcatgttccagctctacac

SEQ ID NO: 130228 - DNA, 667 bp, Homo sapiens
  Payload ID: 5483
  Gene Symbol: EMP3
  Gene Name: epithelial membrane protein 3
  ENST ID: ENST00000599255
  CDS Start-End: 66-257
agcgagggacaagactccgactccagctctgacttttttcgcggctctcggcttccactgcagccatgtcactcctcttgctggtggtctcagcccttcacatcctcattcttatactgcttttcgtggccactttggacaagtcctggtggactctccctgggaaagagtccctgaatctctggtacgactgcacgtggaacaacgacaccaaaacatgggcctgcagtaatgtcagcgagaatggtgaggggtgagggcggcgggactggtcttcaaaggggaaggctggctgaaggcggtgcaggtcctcatggtgctctccctcattctctgctgtctctccttcatcctgttcatgttccagctctacaccatgcgacgaggaggtctcttctatgccaccggcctctgccagctttgcaccagcgtggcggtgtttactggcgccttgatctatgccattcacgccgaggagatcctggagaagcacccgcgagggggcagcttcggatactgcttcgccctggcctgggtggccttccccctcgccctggtcagcggcatcatctacatccacctacggaagcgggagtgagcgccccgcctcgctcggctgcccccgccccttcccggcccccctcgccgcgcgtcctccaaaaaataa

SEQ ID NO: 130229 - DNA, 263 bp, Homo sapiens
  Payload ID: 5483
  Gene Symbol: EMP3
  Gene Name: epithelial membrane protein 3
  ENST ID: ENST00000594198
  CDS Start-End: 94-263
cggggcacggaggcccgagcgagggacaagactccgactccagctctgacttttttcgcggctctcggctggctgaaggcggtgcaggtcctcatggtgctctccctcattctctgctgtctctccttcatcctgttcatgttccagctctacaccatgcgacgaggaggtctcttctatgccaccggcctctgccagctttgcaccagcgtggcggtgtttactggcgccttgatctatgccattcacgccgaggagatcct

SEQ ID NO: 130230 - DNA, 847 bp, Homo sapiens
  Payload ID: 5484
  Gene Symbol: EPGN
  Gene Name: epithelial mitogen
  Uniprot ID: Q6UW88
  ENST ID: ENST00000332112
  CDS Start-End: 48-449
cgtcagtctagaaggataagagaaagaaagttaagcaactacaggaaatggctttgggagttccaatatcagtctatcttttattcaacgcaatgacagcactgaccgaagaggcagccgtgactgtaacacctccaatcacagcccagcaagctgacaacatagaaggacccatagccttgaagttctcacacctttgcctggaagatcataacagttactgcatcaacggtgcttgtgcattccaccatgagctagagaaagccatctgcaggtgttttactggttatactggagaaaggtgtgagcacttgactttaacttcatatgctgtggattcttatgaaaaatacattgcaattgggattggtgttggattactattaagtggttttcttgttattttttactgctatataagaaagaggtatgaaaaagacaaaatatgaagtcacttcatatgcaatcgtttgacaaatagttattcaggccctataatgtgtcaggcactgacatgtaaaatttttttaattaaaaaagagctgtaatctggcaaaaagtttctatgtaatatttttcatgccttttctcataaacccagacgagtggtaaaaatttgccttcagttgtaataggagagttcaaacgtacagtctcccttcaacctatctctgtctgcccatatcaaaattataaatgaggaggacagcaggccccaagaaagtagggactaagtatgtcttgttcaaaattgtatattcagtgacttacactatgcctagcacacaacacacactgagtaaatatttgttgagtgaaataaaatcaagaaacaagtaaaaactga

SEQ ID NO: 130231 - DNA, 738 bp, Homo sapiens
  Payload ID: 5484
  Gene Symbol: EPGN
  Gene Name: epithelial mitogen
  ENST ID: ENST00000446430
  CDS Start-End: 1-391
gacagcactgaccgaagaggcagccgtgactgtaacacctccaatcacagcccagcaagctgacaacatagaaggacccatagccttgaagttctcacacctttgcctggaagatcataacagttactgcatcaacggtgcttgtgcattccaccatgagctagagaaagccatctgcaggtgttttactggttatactggagaaaggtgtgagcacttgactttaacttcatatgctgtggattcttatgaaaaatacattgcaattgggattggtgttggattactattaagtggttttcttgttattttttactgctatataagaaagaggtgtctaaaattgaaatcgccttacaatgtctgttctggagaaagacgaccactgtgaggcctttgtgaagaattttcatcaaggcatctgtagagatcagtgagcccaaaattaaagttttcagatgaaacaacaaaacttgtcaagctgactagactcgaaaataatgaaagttgggatcacaatgaaatgagaagataaaattcagcgttggcctttagactttgccatccttaaggagtgatggaagccaagtgaacaagcctcagtgacacaagtcaaattcatagtttcactctgggttttttgttgttgtgtggttattattctcactacagaaagactgagtttcatgctcctggctatgtcagatgtgaattttcatgggaataataatcaacctt

SEQ ID NO: 130232 - DNA, 1196 bp, Homo sapiens
  Payload ID: 5484
  Gene Symbol: EPGN
  Gene Name: epithelial mitogen
  Uniprot ID: Q6UW88
  ENST ID: ENST00000413830
  CDS Start-End: 62-526
aaaaaccttccacccgtcagtctagaaggataagagaaagaaagttaagcaactacaggaaatggctttgggagttccaatatcagtctatcttttattcaacgcaatgacagcactgaccgaagaggcagccgtgactgtaacacctccaatcacagcccagcaaggtaactggacagttaacaaaacagaagctgacaacatagaaggacccatagccttgaagttctcacacctttgcctggaagatcataacagttactgcatcaacggtgcttgtgcattccaccatgagctagagaaagccatctgcaggtgttttactggttatactggagaaaggtgtgagcacttgactttaacttcatatgctgtggattcttatgaaaaatacattgcaattgggattggtgttggattactattaagtggttttcttgttattttttactgctatataagaaagaggtgtctaaaattgaaatcgccttacaatgtctgttctggagaaagacgaccactgtgaggcctttgtgaagaattttcatcaaggcatctgtagagatcagtgagcccaaaattaaagttttcagatgaaacaacaaaacttgtcaagctgactagactcgaaaataatgaaagttgggatcacaatgaaatgagaagataaaattcagcgttggcctttagactttgccatccttaaggagtgatggaagccaagtgaacaagcctcagtgacacaagtcaaattcatagtttcactctgggttttttgttgttgtgtggttattattctcactacagaaagactgagtttcatgctcctggctatgtcagatgtgaattttcatgggaataataatcaaccttgcagcaagccaaagcaatgcctcgcttgggttcttcatgttcttactacccagcgttttttaccacctagatgggcctctctaagtctatttgctcaatgaaccttatcccaaacttgttgttttcatggtgtctgaaagaatgtgatgtcagcttttagaatgaaatcagtgttaaggtacctccagtgaaccaaacatgtgtcttaaatctaagccactgaaaacagaagggaatgtccaaggcaaatacaaatcatacacagcttgtaacaacatacagcctttctatgtgaaataatggaataaactaaagagtttctg

SEQ ID NO: 130233 - DNA, 630 bp, Homo sapiens
  Payload ID: 5484
  Gene Symbol: EPGN
  Gene Name: epithelial mitogen
  ENST ID: ENST00000502835
  CDS Start-End: 61-345
aaaaccttccacccgtcagtctagaaggataagagaaagaaagttaagcaactacaggaaatggctttgggagttccaatatcagtctatcttttattcaacgcaatgacagcactgaccgaagaggcagccgtgactgtaacacctccaatcacagcccagcaaggtaactggacagttaacaaaacagaagctgacaacatagaaggacccatagccttgaagttctcacacctttgcctggaagatcataacagttactgcatcaacggtgcttgtgcattccaccatgagctagagaaagccatctgcaggtgttttactggttatactggagaaaggtgaaacctgtaataaagtaaggaaagcagatggagcacaagaagaagctaagcaaagatgtggctttaactgaagtgtagccccagcctgattccacagggagatctagaatgtgaatagcagtgtagacctctcccaaggagatgaggcatctggatttcaatatcccatattattcaatcatggattcatgtggggtgtctaaaattgaaatcgccttacaatgtctgttctggagaaagacgaccactgtgaggcctttgtgaagaattttcatcaaggcatctg

SEQ ID NO: 130234 - DNA, 285 bp, Homo sapiens
  Payload ID: 5484
  Gene Symbol: EPGN
  Gene Name: epithelial mitogen
  Uniprot ID: Q6UW88
  ENST ID: ENST00000505212
  CDS Start-End: 1-285
atggctttgggagttccaatatcagtctatcttttattcaacgcaatgacagcactgaccgaagaggcagccgtgactgtaacacctccaatcacagcccagcaagctgacaacatagaaggacccatagccttgaagttctcacacctttgcctggaagatcataacagttactgcatcaacggtgcttgtgcattccaccatgagctagagaaagccatctgcaggtgtctaaaattgaaatcgccttacaatgtctgttctggagaaagacgaccactgtga

SEQ ID NO: 130235 - DNA, 339 bp, Homo sapiens
  Payload ID: 5484
  Gene Symbol: EPGN
  Gene Name: epithelial mitogen
  Uniprot ID: Q6UW88
  ENST ID: ENST00000503098
  CDS Start-End: 1-339
atggctttgggagttccaatatcagtctatcttttattcaacgcaatgacagcactgaccgaagaggcagccgtgactgtaacacctccaatcacagcccagcaaggtaactggacagttaacaaaacagaagctgacaacatagaaggacccatagccttgaagttctcacacctttgcctggaagatcataacagttactgcatcaacggtgcttgtgcattccaccatgagctagagaaagccatctgcaggtgttttactggttatactggagaaaggtgtctaaaattgaaatcgccttacaatgtctgttctggagaaagacgaccactgtga

SEQ ID NO: 130236 - DNA, 312 bp, Homo sapiens
  Payload ID: 5484
  Gene Symbol: EPGN
  Gene Name: epithelial mitogen
  Uniprot ID: Q6UW88
  ENST ID: ENST00000514968
  CDS Start-End: 1-312
atggctttgggagttccaatatcagtctatcttttattcaacgcaatgacagcactgaccgaagaggcagccgtgactgtaacacctccaatcacagcccagcaagctgacaacatagaaggacccatagccttgaagttctcacacctttgcctggaagatcataacagttactgcatcaacggtgcttgtgcattccaccatgagctagagaaagccatctgcaggtgttttactggttatactggagaaaggtgtctaaaattgaaatcgccttacaatgtctgttctggagaaagacgaccactgtga

SEQ ID NO: 130237 - DNA, 222 bp, Homo sapiens
  Payload ID: 5484
  Gene Symbol: EPGN
  Gene Name: epithelial mitogen
  Uniprot ID: Q6UW88
  ENST ID: ENST00000509145
  CDS Start-End: 1-222
atggctttgggagttccaatatcagtctatcttttattcaacgctgacaacatagaaggacccatagccttgaagttctcacacctttgcctggaagatcataacagttactgcatcaacggtgcttgtgcattccaccatgagctagagaaagccatctgcaggtgtctaaaattgaaatcgccttacaatgtctgttctggagaaagacgaccactgtga

SEQ ID NO: 130238 - DNA, 312 bp, Homo sapiens
  Payload ID: 5484
  Gene Symbol: EPGN
  Gene Name: epithelial mitogen
  Uniprot ID: Q6UW88
  ENST ID: ENST00000502358
  CDS Start-End: 1-312
atggctttgggagttccaatatcagtctatcttttattcaacgcaatgacagcactgaccgaagaggcagccgtgactgtaacacctccaatcacagcccagcaaggtaactggacagttaacaaaacagaagctgacaacatagaaggacccatagccttgaagttctcacacctttgcctggaagatcataacagttactgcatcaacggtgcttgtgcattccaccatgagctagagaaagccatctgcaggtgtctaaaattgaaatcgccttacaatgtctgttctggagaaagacgaccactgtga

SEQ ID NO: 130239 - DNA, 3756 bp, Homo sapiens
  Payload ID: 5485
  Gene Symbol: ESRP1
  Gene Name: epithelial splicing regulatory protein 1
  Uniprot ID: Q6NXG1
  ENST ID: ENST00000358397
  CDS Start-End: 146-2179
cttttgcactagcagtagcaaggaaggggggtgggcgctctttctttttctcttagaagagggtttagcacaggttttttcgttctcacttccacaccaccttaccgcctcccgaccccccctctccccctccccacctatcgtcatgacggcctctccggattacttggtggtgctttttgggatcactgctggggccaccggggccaagctaggctcggatgagaaggagttgatcctgctgttctggaaagtcgtggatctggccaacaagaaggtgggacagttgcacgaagtgctagttagaccggatcagttggaactgacggaggactgcaaagaagaaactaaaatagacgtcgaaagcctgtcctcggcgtcgcagctggaccaagccctccgacagtttaaccagtcagtgagcaatgaactgaatattggagtagggacttccttctgtctctgtactgatgggcagcttcatgtcaggcaaatcctgcatcctgaggcttccaagaagaatgtactattacctgaatgcttctattccttttttgatcttcgaaaagaattcaagaaatgttgccctggttcacctgatattgacaaactggacgttgccacaatgacagagtatttaaattttgagaagagtagttcagtctctcgatatggagcctctcaagttgaagatatggggaatataattttagcaatgatttcagagccttataatcacaggttttcagatccagagagagtgaattacaagtttgaaagtggaacttgcagcaagatggaacttattgatgataacaccgtagtcagggcacgaggtttaccatggcagtcttcagatcaagatattgcaagattcttcaaaggactcaatattgccaagggaggtgcagcactttgtctgaatgctcagggtcgaaggaacggagaagctctggttaggtttgtaagtgaggagcaccgagacctagcactacagaggcacaaacatcacatggggacccggtatattgaggtttacaaagcaacaggtgaagatttccttaaaattgctggtggtacttccaatgaggtagcccagtttctctccaaggaaaatcaagtcattgtccgcatgcgggggctccctttcacggccacagctgaagaagtggtggccttctttggacagcattgccctattactgggggaaaggaaggcatcctctttgtcacctacccagatggtaggccaacaggggacgcttttgtcctctttgcctgtgaggaatatgcacagaatgcgttgaggaagcataaagacttgttgggtaaaagatacattgaactcttcaggagcacagcagctgaagttcagcaggtgctgaatcgattctcctcggcccctctcattccacttccaacccctcccattattccagtactacctcagcaatttgtgccccctacaaatgttagagactgtatacgccttcgaggtcttccctatgcagccacaattgaggacatcctggatttcctgggggagttcgccacagatattcgtactcatggggttcacatggttttgaatcaccagggccgcccatcaggagatgcctttatccagatgaagtctgcggacagagcatttatggctgcacagaagtgtcataaaaaaaacatgaaggacagatatgttgaagtctttcagtgttcagctgaggagatgaactttgtgttaatggggggcactttaaatcgaaatggcttatccccaccgccatgcctgtctcctccctcctacacatttccagctcctgctgcagttattcctacagaagctgccatttaccagccctctgtgattttgaatccacgagcactgcagccctccacagcgtactacccagcaggcactcagctcttcatgaattacacagcgtactatcccagccccccaggttcgcctaatagtcttggctacttccctacagctgctaatcttagcggtgtccctccacagcctggcacggtggtcagaatgcagggcctggcctacaatactggagttaaggaaattcttaacttcttccaaggttaccagtatgcaaccgaggatggacttatacacacaaatgaccaggccaggactctacccaaagaatgggtttgtatttaagggccccagcagttagaacatcctcagaaaagaagtgtttgaaagatgtatggtgatcttgaaacctccagacacaagaaaacttctagcaaattcaggggaagtttgtctacactcaggctgcagtattttcagcaaacttgattggacaaacgggcctgtgccttatcttttggtggagtgaaaaaatttgagctagtgaagccaaatcgtaacttacagcaagcagcatgcagcatacctggctctttgctgattgcaaataggcatttaaaatgtgaatttggaatcagatgtctccattacttccagttaaagtggcatcataggtgtttcctaagttttaagtcttggataaaaactccaccagtgtctaccatctccaccatgaactctgttaaggaagcttcatttttgtatattcccgctcttttctcttcatttccctgtcttctgcataatcatgccttcttgctaagtaattcaagcataagatcttggaataataaaatcacaatcttaggagaaagaataaaattgttattttcccagtctcttggccatgatgatatcttatgattaaaaacaaattaaattttaaaacacctgaagataaattagaagaaattgtgcaccctccacaaaacatacaaagtttaaaagtttggatctttttctcagcaggtatcagttgtaaataatgaattaggggccaaaatgcaaaacgaaaaatgaagcagctacatgtagttagtaatttctagtttgaactgtaattgaatattgtggcttcatatgtattattttatattgtacttttttcattattgatggtttggactttaataagagaaattccatagtttttaatatcccagaagtgagacaatttgaacagtgtattctagaaaacaatacactaactgaacagaagtgaatgcttatatatattatgatagccttaaacctttttcctctaatgccttaactgtcaaataattataaccttttaaagcataggactatagtcagcatgctagactgagaggtaaacactgatgcaattagaacaggtactgatgctgtcagtgtttaacactatgtttagctgtgtttatgctataaaagtgcaatattagacactagctagtactgctgcctcatgtaactccaaagaaaacaggatttcattaagtgcattgaatgtggatatttctctaagttactcatattgtcctttgcttgaatgcaatgccgtgcagatttatgaggctgctatttttattttctgtgcattactttaacaccttaaagggagaagcaaacatttccttcttcagctgactggcaatggccctttaactgcaataggaagaaaaaaaaaaaggtttgtgtgaaaattggtgataactggcacttaagatcgaaaagaaatttctgtatacttgatgccttaagatgcccaaagctgcccaaagctctgaaagactttaagataggcagtaatgcttactacaatactactgagtttttgtagagttaacatttgataataaaacttgcctgtttaatctcaa

SEQ ID NO: 130240 - DNA, 3482 bp, Homo sapiens
  Payload ID: 5485
  Gene Symbol: ESRP1
  Gene Name: epithelial splicing regulatory protein 1
  Uniprot ID: Q6NXG1
  ENST ID: ENST00000454170
  CDS Start-End: 121-1947
ggggggtgggcgctctttctttttctcttagaagagggtttagcacaggttttttcgttctcacttccacaccaccttaccgcctcccgaccccccctctccccctccccacctatcgtcatgacggcctctccggattacttggtggtgctttttgggatcactgctggggccaccggggccaagctaggctcggatgagaaggagttgatcctgctgttctggaaagtcgtggatctggccaacaagaaggtgggacagttgcacgaagtgctagttagaccggatcagttggaactgacggaggactgcaaagaagaaactaaaatagacgtcgaaagcctgtcctcggcgtcgcagctggaccaagccctccgacagtttaaccagtcagtgagcaatgaactgaatattggagtagggacttccttctgtctctgtactgatgggcagcttcatgtcaggcaaatcctgcatcctgaggcttccaagaagaatgtactattacctgaatgcttctattccttttttgatcttcgaaaagaattcaagaaatgttgccctggttcacctgatattgacaaactggacgttgccacaatgacagagtatttaaattttgagaagagtagttcagtctctcgatatggagcctctcaagttgaagatatggggaatataattttagcaatgatttcagagccttataatcacaggttttcagatccagagagagtgaattacaagtttgaaagtggaacttgcagcaagatggaacttattgatgataacaccgtagtcagggcacgaggtttaccatggcagtcttcagatcaagatattgcaagattcttcaaaggactcaatattgccaagggaggtgcagcactttgtctgaatgctcagggtcgaaggaacggagaagctctggttaggtttgtaagtgaggagcaccgagacctagcactacagaggcacaaacatcacatggggacccggtatattgaggtttacaaagcaacaggtgaagatttccttaaaattgctggtggtacttccaatgaggtagcccagtttctctccaaggaaaatcaagtcattgtccgcatgcgggggctccctttcacggccacagctgaagaagtggtggccttctttggacagcattgccctattactgggggaaaggaaggcatcctctttgtcacctacccagatggtaggccaacaggggacgcttttgtcctctttgcctgtgaggaatatgcacagaatgcgttgaggaagcataaagacttgttgggtaaaagatacattgaactcttcaggagcacagcagctgaagttcagcaggtgctgaatcgattctcctcggcccctctcattccacttccaacccctcccattattccagtactacctcagcaatttgtgccccctacaaatgttagagactgtatacgccttcgaggtcttccctatgcagccacaattgaggacatcctggatttcctgggggagttcgccacagatattcgtactcatggggttcacatggttttgaatcaccagggccgcccatcaggagatgcctttatccagatgaagtctgcggacagagcatttatggctgcacagaagtgtcataaaaaaaacatgaaggacagatatgttgaagtctttcagtgttcagctgaggagatgaactttgtgttaatggggggcactttaaatcgaaatggcttatccccaccgccatgtaagttaccatgcctgtctcctccctcctacacatttccagctcctgctgcagttattcctacagaagctgccatttaccagccctctgtgattttgaatccacgagcactgcagccctccacagcgtactacccagcaggcactcagctcttcatgaattacacagcgtactatcccagtgtttgaaagatgtatggtgatcttgaaacctccagacacaagaaaacttctagcaaattcaggggaagtttgtctacactcaggctgcagtattttcagcaaacttgattggacaaacgggcctgtgccttatcttttggtggagtgaaaaaatttgagctagtgaagccaaatcgtaacttacagcaagcagcatgcagcatacctggctctttgctgattgcaaataggcatttaaaatgtgaatttggaatcagatgtctccattacttccagttaaagtggcatcataggtgtttcctaagttttaagtcttggataaaaactccaccagtgtctaccatctccaccatgaactctgttaaggaagcttcatttttgtatattcccgctcttttctcttcatttccctgtcttctgcataatcatgccttcttgctaagtaattcaagcataagatcttggaataataaaatcacaatcttaggagaaagaataaaattgttattttcccagtctcttggccatgatgatatcttatgattaaaaacaaattaaattttaaaacacctgaagataaattagaagaaattgtgcaccctccacaaaacatacaaagtttaaaagtttggatctttttctcagcaggtatcagttgtaaataatgaattaggggccaaaatgcaaaacgaaaaatgaagcagctacatgtagttagtaatttctagtttgaactgtaattgaatattgtggcttcatatgtattattttatattgtacttttttcattattgatggtttggactttaataagagaaattccatagtttttaatatcccagaagtgagacaatttgaacagtgtattctagaaaacaatacactaactgaacagaagtgaatgcttatatatattatgatagccttaaacctttttcctctaatgccttaactgtcaaataattataaccttttaaagcataggactatagtcagcatgctagactgagaggtaaacactgatgcaattagaacaggtactgatgctgtcagtgtttaacactatgtttagctgtgtttatgctataaaagtgcaatattagacactagctagtactgctgcctcatgtaactccaaagaaaacaggatttcattaagtgcattgaatgtggatatttctctaagttactcatattgtcctttgcttgaatgcaatgccgtgcagatttatgaggctgctatttttattttctgtgcattactttaacaccttaaagggagaagcaaacatttccttcttcagctgactggcaatggccctttaactgcaataggaagaaaaaaaaaaaggtttgtgtgaaaattggtgataactggcacttaagatcgaaaagaaatttctgtatacttgatgccttaagatgcccaaagctgcccaaagctctgaaagactttaagataggcagtaatgcttactacaatactactgagtttttgtagagttaacatttgataataaaacttgcctgtttaatctcaa

SEQ ID NO: 130241 - DNA, 3770 bp, Homo sapiens
  Payload ID: 5485
  Gene Symbol: ESRP1
  Gene Name: epithelial splicing regulatory protein 1
  Uniprot ID: Q6NXG1
  ENST ID: ENST00000433389
  CDS Start-End: 191-2236
gcgtggagcaccgaccaggtgtgggcttgggtggttggttaccgccttttgcactagcagtagcaaggaaggggggtgggcgctctttctttttctcttagaagagggtttagcacaggttttttcgttctcacttccacaccaccttaccgcctcccgaccccccctctccccctccccacctatcgtcatgacggcctctccggattacttggtggtgctttttgggatcactgctggggccaccggggccaagctaggctcggatgagaaggagttgatcctgctgttctggaaagtcgtggatctggccaacaagaaggtgggacagttgcacgaagtgctagttagaccggatcagttggaactgacggaggactgcaaagaagaaactaaaatagacgtcgaaagcctgtcctcggcgtcgcagctggaccaagccctccgacagtttaaccagtcagtgagcaatgaactgaatattggagtagggacttccttctgtctctgtactgatgggcagcttcatgtcaggcaaatcctgcatcctgaggcttccaagaagaatgtactattacctgaatgcttctattccttttttgatcttcgaaaagaattcaagaaatgttgccctggttcacctgatattgacaaactggacgttgccacaatgacagagtatttaaattttgagaagagtagttcagtctctcgatatggagcctctcaagttgaagatatggggaatataattttagcaatgatttcagagccttataatcacaggttttcagatccagagagagtgaattacaagtttgaaagtggaacttgcagcaagatggaacttattgatgataacaccgtagtcagggcacgaggtttaccatggcagtcttcagatcaagatattgcaagattcttcaaaggactcaatattgccaagggaggtgcagcactttgtctgaatgctcagggtcgaaggaacggagaagctctggttaggtttgtaagtgaggagcaccgagacctagcactacagaggcacaaacatcacatggggacccggtatattgaggtttacaaagcaacaggtgaagatttccttaaaattgctggtggtacttccaatgaggtagcccagtttctctccaaggaaaatcaagtcattgtccgcatgcgggggctccctttcacggccacagctgaagaagtggtggccttctttggacagcattgccctattactgggggaaaggaaggcatcctctttgtcacctacccagatggtaggccaacaggggacgcttttgtcctctttgcctgtgaggaatatgcacagaatgcgttgaggaagcataaagacttgttgggtaaaagatacattgaactcttcaggagcacagcagctgaagttcagcaggtgctgaatcgattctcctcggcccctctcattccacttccaacccctcccattattccagtactacctcagcaatttgtgccccctacaaatgttagagactgtatacgccttcgaggtcttccctatgcagccacaattgaggacatcctggatttcctgggggagttcgccacagatattcgtactcatggggttcacatggttttgaatcaccagggccgcccatcaggagatgcctttatccagatgaagtctgcggacagagcatttatggctgcacagaagtgtcataaaaaaaacatgaaggacagatatgttgaagtctttcagtgttcagctgaggagatgaactttgtgttaatggggggcactttaaatcgaaatggcttatccccaccgccatgtaagttaccatgcctgtctcctccctcctacacatttccagctcctgctgcagttattcctacagaagctgccatttaccagccctctgtgattttgaatccacgagcactgcagccctccacagcgtactacccagcaggcactcagctcttcatgaattacacagcgtactatcccagccccccaggttcgcctaatagtcttggctacttccctacagctgctaatcttagcggtgtccctccacagcctggcacggtggtcagaatgcagggcctggcctacaatactggagttaaggaaattcttaacttcttccaaggttaccagtatgcaaccgaggatggacttatacacacaaatgaccaggccaggactctacccaaagaatgggtttgtatttaagggccccagcagttagaacatcctcagaaaagaagtgtttgaaagatgtatggtgatcttgaaacctccagacacaagaaaacttctagcaaattcaggggaagtttgtctacactcaggctgcagtattttcagcaaacttgattggacaaacgggcctgtgccttatcttttggtggagtgaaaaaatttgagctagtgaagccaaatcgtaacttacagcaagcagcatgcagcatacctggctctttgctgattgcaaataggcatttaaaatgtgaatttggaatcagatgtctccattacttccagttaaagtggcatcataggtgtttcctaagttttaagtcttggataaaaactccaccagtgtctaccatctccaccatgaactctgttaaggaagcttcatttttgtatattcccgctcttttctcttcatttccctgtcttctgcataatcatgccttcttgctaagtaattcaagcataagatcttggaataataaaatcacaatcttaggagaaagaataaaattgttattttcccagtctcttggccatgatgatatcttatgattaaaaacaaattaaattttaaaacacctgaagataaattagaagaaattgtgcaccctccacaaaacatacaaagtttaaaagtttggatctttttctcagcaggtatcagttgtaaataatgaattaggggccaaaatgcaaaacgaaaaatgaagcagctacatgtagttagtaatttctagtttgaactgtaattgaatattgtggcttcatatgtattattttatattgtacttttttcattattgatggtttggactttaataagagaaattccatagtttttaatatcccagaagtgagacaatttgaacagtgtattctagaaaacaatacactaactgaacagaagtgaatgcttatatatattatgatagccttaaacctttttcctctaatgccttaactgtcaaataattataaccttttaaagcataggactatagtcagcatgctagactgagaggtaaacactgatgcaattagaacaggtactgatgctgtcagtgtttaacactatgtttagctgtgtttatgctataaaagtgcaatattagacactagctagtactgctgcctcatgtaactccaaagaaaacaggatttcattaagtgcattgaatgtggatatttctctaagttactcatattgtcctttgcttgaatgcaatgccgtgcagatttatgaggctgctatttttattttctgtgcattactttaacaccttaaagggagaagcaaacatttccttcttcagctgactggcaatggccctttaactgcaataggaagaaaaaaaaaaaggtttgtgtgaaaattggtgataactggcacttaagatcgaaaagaaatttctgtatacttgatgccttaagatgcccaaagctgcccaaagctctgaaagactttaagataggcagtaatgcttactacaatactactgagtttttg

SEQ ID NO: 130242 - DNA, 3746 bp, Homo sapiens
  Payload ID: 5485
  Gene Symbol: ESRP1
  Gene Name: epithelial splicing regulatory protein 1
  Uniprot ID: Q6NXG1
  ENST ID: ENST00000423620
  CDS Start-End: 246-2225
atacaaaaagggcaggcctcctgcgccctccttcccaccccccttcctgccctgggcgtggagcaccgaccaggtgtgggcttgggtggttggttaccgccttttgcactagcagtagcaaggaaggggggtgggcgctctttctttttctcttagaagagggtttagcacaggttttttcgttctcacttccacaccaccttaccgcctcccgaccccccctctccccctccccacctatcgtcatgacggcctctccggattacttggtggtgctttttgggatcactgctggggccaccggggccaagctaggctcggatgagaaggagttgatcctgctgttctggaaagtcgtggatctggccaacaagaaggtgggacagttgcacgaagtgctagttagaccggatcagttggaactgacggaggactgcaaagaagaaactaaaatagacgtcgaaagcctgtcctcggcgtcgcagctggaccaagccctccgacagtttaaccagtcagtgagcaatgaactgaatattggagtagggacttccttctgtctctgtactgatgggcagcttcatgtcaggcaaatcctgcatcctgaggcttccaagaagaatgtactattacctgaatgcttctattccttttttgatcttcgaaaagaattcaagaaatgttgccctggttcacctgatattgacaaactggacgttgccacaatgacagagtatttaaattttgagaagagtagttcagtctctcgatatggagcctctcaagttgaagatatggggaatataattttagcaatgatttcagagccttataatcacaggttttcagatccagagagagtgaattacaagtttgaaagtggaacttgcagcaagatggaacttattgatgataacaccgtagtcagggcacgaggtttaccatggcagtcttcagatcaagatattgcaagattcttcaaaggactcaatattgccaagggaggtgcagcactttgtctgaatgctcagggtcgaaggaacggagaagctctggttaggtttgtaagtgaggagcaccgagacctagcactacagaggcacaaacatcacatggggacccggtatattgaggtttacaaagcaacaggtgaagatttccttaaaattgctggtggtacttccaatgaggtagcccagtttctctccaaggaaaatcaagtcattgtccgcatgcgggggctccctttcacggccacagctgaagaagtggtggccttctttggacagcattgccctattactgggggaaaggaaggcatcctctttgtcacctacccagatggtaggccaacaggggacgcttttgtcctctttgcctgtgaggaatatgcacagaatgcgttgaggaagcataaagacttgttgggtaaaagatacattgaactcttcaggagcacagcagctgaagttcagcaggtgctgaatcgattctcctcggcccctctcattccacttccaacccctcccattattccagtactacctcagcaatttgtgccccctacaaatgttagagactgtatacgccttcgaggtcttccctatgcagccacaattgaggacatcctggatttcctgggggagttcgccacagatattcgtactcatggggttcacatggttttgaatcaccagggccgcccatcaggagatgcctttatccagatgaagtctgcggacagagcatttatggctgcacagaagtgtcataaaaaaaacatgaaggacagatatgttgaagtctttcagtgttcagctgaggagatgaactttgtgttaatggggggcactttaaatcgaaatggcttatccccaccgccatgcctgtctcctccctcctacacatttccagctcctgctgcagttattcctacagaagctgccatttaccagccctctgtgattttgaatccacgagcactgcagccctccacagcgtactacccagcaggcactcagctcttcatgaattacacagcgtactatcccagccccccaggttcgcctaatagtcttggctacttccctacagctgctaatcttagcggtgtccctccacagcctggcacggtggtcagaatgcagggcctggcctacaatactggagttaaggaaattcttaacttcttccaaggttaccagtgtttgaaagatgtatggtgatcttgaaacctccagacacaagaaaacttctagcaaattcaggggaagtttgtctacactcaggctgcagtattttcagcaaacttgattggacaaacgggcctgtgccttatcttttggtggagtgaaaaaatttgagctagtgaagccaaatcgtaacttacagcaagcagcatgcagcatacctggctctttgctgattgcaaataggcatttaaaatgtgaatttggaatcagatgtctccattacttccagttaaagtggcatcataggtgtttcctaagttttaagtcttggataaaaactccaccagtgtctaccatctccaccatgaactctgttaaggaagcttcatttttgtatattcccgctcttttctcttcatttccctgtcttctgcataatcatgccttcttgctaagtaattcaagcataagatcttggaataataaaatcacaatcttaggagaaagaataaaattgttattttcccagtctcttggccatgatgatatcttatgattaaaaacaaattaaattttaaaacacctgaagataaattagaagaaattgtgcaccctccacaaaacatacaaagtttaaaagtttggatctttttctcagcaggtatcagttgtaaataatgaattaggggccaaaatgcaaaacgaaaaatgaagcagctacatgtagttagtaatttctagtttgaactgtaattgaatattgtggcttcatatgtattattttatattgtacttttttcattattgatggtttggactttaataagagaaattccatagtttttaatatcccagaagtgagacaatttgaacagtgtattctagaaaacaatacactaactgaacagaagtgaatgcttatatatattatgatagccttaaacctttttcctctaatgccttaactgtcaaataattataaccttttaaagcataggactatagtcagcatgctagactgagaggtaaacactgatgcaattagaacaggtactgatgctgtcagtgtttaacactatgtttagctgtgtttatgctataaaagtgcaatattagacactagctagtactgctgcctcatgtaactccaaagaaaacaggatttcattaagtgcattgaatgtggatatttctctaagttactcatattgtcctttgcttgaatgcaatgccgtgcagatttatgaggctgctatttttattttctgtgcattactttaacaccttaaagggagaagcaaacatttccttcttcagctgactggcaatggccctttaactgcaataggaagaaaaaaaaaaaggtttgtgtgaaaattggtgataactggcacttaagatcgaaaagaaatttctgtatacttgatgccttaagatgcccaaagctgcccaaagctctgaaagactttaagataggcagtaatgcttactacaatactactgagtttttgtagagttaacatttgataataaaacttgcctgtttaatctcaa

SEQ ID NO: 130243 - DNA, 609 bp, Homo sapiens
  Payload ID: 5485
  Gene Symbol: ESRP1
  Gene Name: epithelial splicing regulatory protein 1
  ENST ID: ENST00000522756
  CDS Start-End: 328-609
actattacctgaatgcttctattccttttttgatcttcgaaaagaattcaagaaatgttgccctggttcacctgatattgacaaactggacgttgccacaatgacagagtgtatcctttaaatcattactcaagaatcatttgaaaagatagttccagaaaagagcctccctctgttacccaggctggagtgaaatggcgtgatctcggctcactgcaaccttcgcctcctgggttcaagcgattctcctgcctcagccgcccagatcacaggttttcagatccagagagagtgaattacaagtttgaaagtggaacttgcagcaagatggaacttattgatgataacaccgtagtcagggcacgaggtttaccatggcagtcttcagatcaagatattgcaagattcttcaaaggactcaatattgccaagggaggtgcagcactttgtctgaatgctcagggtcgaaggaacggagaagctctggttaggtttgtaagtgaggagcaccgagacctagcactacagaggcacaaacatcacatggggacccggtatattgaggtttacaaagcaacaggtgaagatttccttaaaattgctggtggt

SEQ ID NO: 130244 - DNA, 2139 bp, Homo sapiens
  Payload ID: 5485
  Gene Symbol: ESRP1
  Gene Name: epithelial splicing regulatory protein 1
  ENST ID: ENST00000517610
  CDS Start-End: 1-1569
gaattcaagaaatgttgccctggttcacctgatattgacaaactggacgttgccacaatgacagagtatttaaattttgagaagagtagttcagtctctcgatatggagcctctcaagttgaagatatggggaatataattttagcaatgatttcagagccttataatcacaggttttcagatccagagagagtgaattacaagtttgaaagtggaacttgcagcaagatggaacttattgatgataacaccgtagtcagggcacgaggtttaccatggcagtcttcagatcaagatattgcaagattcttcaaaggactcaatattgccaagggaggtgcagcactttgtctgaatgctcagggtcgaaggaacggagaagctctggttaggtttgtaagtgaggagcaccgagacctagcactacagaggcacaaacatcacatggggacccggtatattgaggtttacaaagcaacaggtgaagatttccttaaaattgctggtggtacttccaatgaggtagcccagtttctctccaaggaaaatcaagtcattgtccgcatgcgggggctccctttcacggccacagctgaagaagtggtggccttctttggacagcattgccctattactgggggaaaggaaggcatcctctttgtcacctacccagatggtaggccaacaggggacgcttttgtcctctttgcctgtgaggaatatgcacagaatgcgttgaggaagcataaagacttgttgggtaaaagatacattgaactcttcaggagcacagcagctgaagttcagcaggtgctgaatcgattctcctcggcccctctcattccacttccaacccctcccattattccagtactacctcagcaatttgtgccccctacaaatgttagagactgtatacgccttcgaggtcttccctatgcagccacaattgaggacatcctggatttcctgggggagttcgccacagatattcgtactcatggggttcacatggttttgaatcaccagggccgcccatcaggagatgcctttatccagatgaagtctgcggacagagcatttatggctgcacagaagtgtcataaaaaaaacatgaaggacagatatgttgaagtctttcagtgttcagctgaggagatgaactttgtgttaatggggggcactttaaatcgaaatggcttatccccaccgccatgtaagttaccatgcctgtctcctccctcctacacatttccagctcctgctgcagttattcctacagaagctgccatttaccagccctctgtgattttgaatccacgagcactgcagccctccacagcgtactacccagcaggcactcagctcttcatgaattacacagcgtactatcccagccccccaggttcgcctaatagtcttggctacttccctacagctgctaatcttagcggtgtccctccacagcctggcacggtggtcagaatgcagggcctggcctacaatactggagttaaggaaattcttaacttcttccaaggttaccagtgtttgaaagatgtatggtgatcttgaaacctccagacacaagaaaacttctagcaaattcaggggaagtttgtctacactcaggctgcagtattttcagcaaacttgattggacaaacgggcctgtgccttatcttttggtggagtgaaaaaatttgagctagtgaagccaaatcgtaacttacagcaagcagcatgcagcatacctggctctttgctgattgcaaataggcatttaaaatgtgaatttggaatcagatgtctccattacttccagttaaagtggcatcataggtgtttcctaagttttaagtcttggataaaaactccaccagtgtctaccatctccaccatgaactctgttaaggaagcttcatttttgtatattcccgctcttttctcttcatttccctgtcttctgcataatcatgccttcttgctaagtaattcaagcataagatcttggaataataaaatcacaatcttaggagaaagaataaaattgttattttcccagtctcttggccatgatgatatcttatgattaaaaacaaattaaattttaaaacacctgaagataaattagaagaa

SEQ ID NO: 130245 - DNA, 3068 bp, Homo sapiens
  Payload ID: 5485
  Gene Symbol: ESRP1
  Gene Name: epithelial splicing regulatory protein 1
  ENST ID: ENST00000519505
  CDS Start-End: 1-1507
cttttttgatcttcgaaaagaattcaagaaatgttgccctggttcacctgatattgacaaactggacgttgccacaatgacagagtatttaaattttgagaagagtagttcagtctctcgatatggagcctctcaagttgaagatatggggaatataattttagcaatgatttcagagccttataatcacaggttttcagatccagagagagtgaattacaagtttgaaagtggaacttgcagcaagatggaacttattgatgataacaccgtagtcagggcacgaggtttaccatggcagtcttcagatcaagatattgcaagattcttcaaaggactcaatattgccaagggaggtgcagcactttgtctgaatgctcagggtcgaaggaacggagaagctctggttaggtttgtaagtgaggagcaccgagacctagcactacagaggcacaaacatcacatggggacccggtatattgaggtttacaaagcaacaggtgaagatttccttaaaattgctggtggtacttccaatgaggtagcccagtttctctccaaggaaaatcaagtcattgtccgcatgcgggggctccctttcacggccacagctgaagaagtggtggccttctttggacagcattgccctattactgggggaaaggaaggcatcctctttgtcacctacccagatggtaggccaacaggggacgcttttgtcctctttgcctgtgaggaatatgcacagaatgcgttgaggaagcataaagacttgttgggtaaaagatacattgaactcttcaggagcacagcagctgaagttcagcaggtgctgaatcgattctcctcggcccctctcattccacttccaacccctcccattattccagtactacctcagcaatttgtgccccctacaaatgttagagactgtatacgccttcgaggtcttccctatgcagccacaattgaggacatcctggatttcctgggggagttcgccacagatattcgtactcatggggttcacatggttttgaatcaccagggccgcccatcaggagatgcctttatccagatgaagtctgcggacagagcatttatggctgcacagaagtgtcataaaaaaaacatgaaggacagatatgttgaagtctttcagtgttcagctgaggagatgaactttgtgttaatggggggcactttaaatcgaaatggcttatccccaccgccatgtaagttaccatgcctgtctcctccctcctacacatttccagctcctgctgcagttattcctacagaagctgccatttaccagccctctgtgattttgaatccacgagcactgcagccctccacagcgtactacccagcaggcactcagctcttcatgaattacacagcgtactatcccagtatgcaaccgaggatggacttatacacacaaatgaccaggccaggactctacccaaagaatgggtttgtatttaagggccccagcagttagaacatcctcagaaaagaagtgtttgaaagatgtatggtgatcttgaaacctccagacacaagaaaacttctagcaaattcaggggaagtttgtctacactcaggctgcagtattttcagcaaacttgattggacaaacgggcctgtgccttatcttttggtggagtgaaaaaatttgagctagtgaagccaaatcgtaacttacagcaagcagcatgcagcatacctggctctttgctgattgcaaataggcatttaaaatgtgaatttggaatcagatgtctccattacttccagttaaagtggcatcataggtgtttcctaagttttaagtcttggataaaaactccaccagtgtctaccatctccaccatgaactctgttaaggaagcttcatttttgtatattcccgctcttttctcttcatttccctgtcttctgcataatcatgccttcttgctaagtaattcaagcataagatcttggaataataaaatcacaatcttaggagaaagaataaaattgttattttcccagtctcttggccatgatgatatcttatgattaaaaacaaattaaattttaaaacacctgaagataaattagaagaaattgtgcaccctccacaaaacatacaaagtttaaaagtttggatctttttctcagcaggtatcagttgtaaataatgaattaggggccaaaatgcaaaacgaaaaatgaagcagctacatgtagttagtaatttctagtttgaactgtaattgaatattgtggcttcatatgtattattttatattgtacttttttcattattgatggtttggactttaataagagaaattccatagtttttaatatcccagaagtgagacaatttgaacagtgtattctagaaaacaatacactaactgaacagaagtgaatgcttatatatattatgatagccttaaacctttttcctctaatgccttaactgtcaaataattataaccttttaaagcataggactatagtcagcatgctagactgagaggtaaacactgatgcaattagaacaggtactgatgctgtcagtgtttaacactatgtttagctgtgtttatgctataaaagtgcaatattagacactagctagtactgctgcctcatgtaactccaaagaaaacaggatttcattaagtgcattgaatgtggatatttctctaagttactcatattgtcctttgcttgaatgcaatgccgtgcagatttatgaggctgctatttttattttctgtgcattactttaacaccttaaagggagaagcaaacatttccttcttcagctgactggcaatggccctttaactgcaataggaagaaaaaaaaaaaggtttgtgtgaaaattggtgataactggcacttaagatcgaaaagaaatttctgtatacttgatgccttaagatgcccaaagctgcccaaagctctgaaagactttaagataggcagtaatgcttactacaatactactgagtttttgtagagttaacatttgataataaaacttgcctgtttaatctcaa

SEQ ID NO: 130246 - DNA, 764 bp, Homo sapiens
  Payload ID: 5485
  Gene Symbol: ESRP1
  Gene Name: epithelial splicing regulatory protein 1
  ENST ID: ENST00000520385
  CDS Start-End: 693-764
attggccaactgccttggagccatttcagtcctccgcaacttagctcaggtggagaggccggcgctaccgagccgggttctttgcccgtcgggggacgctccgccgagacgaggtggggtctcggaggccccggggtccacttccagggcttttccgacctatcgggtggggggtggggcggggggcaggaacgcaccggaaccgatggcgagtcgagagctttgattctgcgtccggaccccaagagaggcgcgggccgccccagcaggggagcgagggaggagggtgcagaaagaggctccgaaattgggggaaactgacccgtgcttctctaccttcggaggtgggacagttgcacgaagtgctagttagaccggatcagttggaactgacggaggactgcaaagaagaaactaaaatagacgtcgaaagcctgtcctcggcgtcgcagctggaccaagccctccgacagtttaaccagtcagtgagcaatgaactgaatattggagtagggacttccttctgtctctgtactgatgggcagcttcatgtcaggcaaatcctgcatcctgaggcttccaagaagaatgtactattacctgaatgcttctattccttttttgatcttcgaaaagaattcaagaaatgttgccctggttcacctgatattgacaaactggacgttgccacaatgacagagtatttaaattttgagaagagtagttcagtctctcgatatggagcctctcaagttgaagatatg

SEQ ID NO: 130247 - DNA, 3793 bp, Homo sapiens
  Payload ID: 5486
  Gene Symbol: ESRP2
  Gene Name: epithelial splicing regulatory protein 2
  Uniprot ID: Q9H6T0
  ENST ID: ENST00000473183
  CDS Start-End: 540-2693
cctttgacttccatcaaccccagacctgccgtgttgacccccacagcccctagactgcctcctggtgacttccatactggagaaggcctctgtcttgcacgctcctttgcagaggcctgacgacccctggggaagagtggggggagagcggaagaatgggttagcccccaaaatcaggcaggaccagccctggaagtaggaatccggatcctaagcgtgcgcccaggccgggagcgtgagctcttgcgtcctgggttgagttctggcggccctcccccaaggttcccggagccgccccggtcacgtggccggcggggccggcaggtaactcgcctggagagggcgtgggccggtagccgccccgccccgcggggcgccacgggcgggtcttggcagcgcccactgagccagccgggccgcaggtgccgcccccgatacacggtgtcccgcccaagctgatccgcgtctgcggtcggtcggtgcgtgcgtgcgcctcgtcggtccgcgtgtctggccgagagcccccttcctctgcggccatgactccgccgccgccgccgccccctcccccgggccctgaccccgcggccgaccccgccgcggacccctgcccctggcccggatcactggtcgtcctcttcggggctacggcgggtgcgctgggacgggacctgggctcggacgagaccgacttaatcctcctagtttggcaagtggttgagccgcggagccgccaggtggggacgctgcacaaatcgctggttcgtgccgaggcggccgcactgagtacgcagtgccgcgaggcgagcggcctgagcgccgacagcctggcgcgggcagagccgctggacaaggtgctgcagcagttctcacagctggtgaacggggatgtggctttgctgggcgggggcccctacatgctctgcactgatgggcagcagctattgcgacaggtcctgcaccccgaggcctccaggaagaacctggtgctccccgacatgttcttctccttctatgacctccgaagagaattccatatgcagcatccaagcacctgccctgccagggacctcactgtggccaccatggcacagggtttaggactggagacagatgccacagaggatgactttggggtctgggaagtcaagacaatggtagctgttatcctccatctactcaaagagcccagcagtcaattgttttcgaagcccgaggtgataaagcagaaatacgagacggggccttgcagcaaggctgatgtggtggacagtgagactgtggtacgggctcgtgggttgccgtggcagtcatcagaccaggacgtggctcgcttcttcaaagggctcaacgtggccaggggtggtgtagcactctgcctcaacgcccagggccgcagaaatggcgaggccctcatccgctttgtggacagcgagcagcgggacctagcgctgcagagacacaagcaccacatgggcgtccgctatattgaggtgtataaagcgacaggggaggagtttgtaaagattgcagggggcacatcactagaggtggctcgtttcttgtcacgggaagaccaagtgatcctgcggctgcggggactgcccttctcggctgggccaacggacgtgcttggcttcctggggccagagtgcccagtgactgggggtaccgaggggctgctctttgtgcgccatcctgatggccggccgactggtgatgccttcgccctctttgcttgtgaggagctggcacaggctgcactgcgcaggcacaagggcatgctgggtaagcgatacattgaactcttccggagcactgcagccgaagtgcagcaggtcttgaaccgctatgcatccggcccactccttcctacactgactgccccactgctgcccatccccttcccactggcacctgggactgggagggactgtgtacgcctccgaggcctgccctacacggccaccattgaagacatcctgagctttctgggggaggcagcagctgacattcggccccacggtgtacacatggtgctcaaccagcagggccggccatcgggcgatgccttcattcagatgacatcagcagagcgagccctagctgctgctcagcgttgccataagaaggtgatgaaggagcgctacgtggaggtggtcccctgttccacagaggagatgagccgagtgctgatggggggcaccttgggccgcagtggcatgtcccctccaccctgcaagctgccctgcctctcaccacctacctacaccaccttccaagccaccccaacgctcattcccacggagacggcagctctatacccctcttcagcactgctcccagctgccagggtgcctgctgcccccacccctgttgcctactatccagggccagccactcaactctacctgaactacacagcctactacccaagccccccagtctcccccaccactgtgggctacctcactacacccactgctgccctggcctctgctcccacctcagtgttgtcccagtcaggagccttggtccgcatgcagggtgtcccatacacggctggtatgaaggatctgctcagcgtcttccaggcctaccagctacccgctgatgactacaccagtctgatgcctgttggtgacccacctcgcactgtgttacaagcccccaaggaatgggtgtgtttgtaggagagaaagccaggaggtaagagccagctgatatcctcggcgaacatgtctctcctgagtccagaagaccagcaccctcaacctggtagcttctttctggcttgtcaaagctctcagaaggtacctagaggagcccaagccccagctccatcctccacttattctgcctgtttcccccaaagacaatggctggaccctgcatgcagggctgggggtggaatggggctaaccagctcctgatggcctgagccaggcatcttgactggcacctggagagcccttaagtctgtcctggctgtggcccatgccgacagatatcgtggggctgacaggtccacggcaggcttgctttcttttataaaatggaagctctggtaccttcaatgtatgactcctgggagaatcaagggtccatctgagcctctgagtaaagatcccaatgttctacctctccctgtccctcttgtaggggatagggaggcagagagagccagcccctaccctcagagtatctggacctcagagaccatgttgtgccaggggtggtcccacctaaagatgctagcccctctccaggtgggcataaggagtaacagatggcaaaaccacaaactattttgatggactgtgctgcagtatcaccagaagacattagggggcagtaggcccccacacaaaaccttcaggcttgaattttaaaggggaggactttctgccaacttttcttgtatgccttgggaaagccagttgccctgaacccagcagacaccatggaatgtcctttgcacgcattaaatggtacagaactgaagcctcggaagcaatttggaactcgatcttctcttccttaaatgaaaagttattgaccaaatggactttttaaaagacacaggacccttaactttgccccaaagtgaggggctccacaccaaccccaggcggaggaacactcagacagattaaggatactgttgacctgtcactgtttattatttcagcactaaaactgaggagcctcaactgctggctcttcttccctttgtatttgtgtaaggagcactgcactcccataaaaggttttaaaatacaaaatgtacaag

SEQ ID NO: 130248 - DNA, 3386 bp, Homo sapiens
  Payload ID: 5486
  Gene Symbol: ESRP2
  Gene Name: epithelial splicing regulatory protein 2
  Uniprot ID: Q9H6T0
  ENST ID: ENST00000565858
  CDS Start-End: 88-2271
aagctgatccgcgtctgcggtcggtcggtgcgtgcgtgcgcctcgtcggtccgcgtgtctggccgagagcccccttcctctgcggccatgactccgccgccgccgccgccccctcccccgggccctgaccccgcggccgaccccgccgcggacccctgcccctggcccggatcactggtcgtcctcttcggggctacggcgggtgcgctgggacgggacctgggctcggacgagaccgacttaatcctcctagtttggcaagtggttgagccgcggagccgccaggtggggacgctgcacaaatcgctggttcgtgccgaggcggccgcactgagtacgcagtgccgcgaggcgagcggcctgagcgccgacagcctggcgcgggcagagccgctggacaaggtgctgcagcagttctcacagctggtgaacggggatgtggctttgctgggcgggggcccctacatgctctgcactgatgggcagcagctattgcgacaggtcctgcaccccgaggcctccaggaagaacctggtgctccccgacatgttcttctccttctatgacctccgaagagaattccatatgcagcatccaagcacctgccctgccagggacctcactgtggccaccatggcacagggtttaggactggagacagatgccacagaggatgactttggggtctgggaagtcaagacaatggtagctgttatcctccatctactcaaagagcccagcagtcaattgttttcgaagcccgaggtgataaagcagaaatacgagacggggccttgctctgacagcactgtgccctgcccctacagcagcaaggctgatgtggtggacagtgagactgtggtacgggctcgtgggttgccgtggcagtcatcagaccaggacgtggctcgcttcttcaaagggctcaacgtggccaggggtggtgtagcactctgcctcaacgcccagggccgcagaaatggcgaggccctcatccgctttgtggacagcgagcagcgggacctagcgctgcagagacacaagcaccacatgggcgtccgctatattgaggtgtataaagcgacaggggaggagtttgtaaagattgcagggggcacatcactagaggtggctcgtttcttgtcacgggaagaccaagtgatcctgcggctgcggggactgcccttctcggctgggccaacggacgtgcttggcttcctggggccagagtgcccagtgactgggggtaccgaggggctgctctttgtgcgccatcctgatggccggccgactggtgatgccttcgccctctttgcttgtgaggagctggcacaggctgcactgcgcaggcacaagggcatgctgggtaagcgatacattgaactcttccggagcactgcagccgaagtgcagcaggtcttgaaccgctatgcatccggcccactccttcctacactgactgccccactgctgcccatccccttcccactggcacctgggactgggagggactgtgtacgcctccgaggcctgccctacacggccaccattgaagacatcctgagctttctgggggaggcagcagctgacattcggccccacggtgtacacatggtgctcaaccagcagggccggccatcgggcgatgccttcattcagatgacatcagcagagcgagccctagctgctgctcagcgttgccataagaaggtgatgaaggagcgctacgtggaggtggtcccctgttccacagaggagatgagccgagtgctgatggggggcaccttgggccgcagtggcatgtcccctccaccctgcaagctgccctgcctctcaccacctacctacaccaccttccaagccaccccaacgctcattcccacggagacggcagctctatacccctcttcagcactgctcccagctgccagggtgcctgctgcccccacccctgttgcctactatccagggccagccactcaactctacctgaactacacagcctactacccaagccccccagtctcccccaccactgtgggctacctcactacacccactgctgccctggcctctgctcccacctcagtgttgtcccagtcaggagccttggtccgcatgcagggtgtcccatacacggctggtatgaaggatctgctcagcgtcttccaggcctaccagctacccgctgatgactacaccagtctgatgcctgttggtgacccacctcgcactgtgttacaagcccccaaggaatgggtgtgtttgtaggagagaaagccaggaggtaagagccagctgatatcctcggcgaacatgtctctcctgagtccagaagaccagcaccctcaacctggtagcttctttctggcttgtcaaagctctcagaaggtacctagaggagcccaagccccagctccatcctccacttattctgcctgtttcccccaaagacaatggctggaccctgcatgcagggctgggggtggaatggggctaaccagctcctgatggcctgagccaggcatcttgactggcacctggagagcccttaagtctgtcctggctgtggcccatgccgacagatatcgtggggctgacaggtccacggcaggcttgctttcttttataaaatggaagctctggtaccttcaatgtatgactcctgggagaatcaagggtccatctgagcctctgagtaaagatcccaatgttctacctctccctgtccctcttgtaggggatagggaggcagagagagccagcccctaccctcagagtatctggacctcagagaccatgttgtgccaggggtggtcccacctaaagatgctagcccctctccaggtgggcataaggagtaacagatggcaaaaccacaaactattttgatggactgtgctgcagtatcaccagaagacattagggggcagtaggcccccacacaaaaccttcaggcttgaattttaaaggggaggactttctgccaacttttcttgtatgccttgggaaagccagttgccctgaacccagcagacaccatggaatgtcctttgcacgcattaaatggtacagaactgaagcctcggaagcaatttggaactcgatcttctcttccttaaatgaaaagttattgaccaaatggactttttaaaagacacaggacccttaactttgccccaaagtgaggggctccacaccaaccccaggcggaggaacactcagacagattaaggatactgttgacctgtcactgtttattatttcagcactaaaactgaggagcctcaactgctggctcttcttccctttgtatttgtgtaaggagcactgcactcccataaaaggttttaaaatacaaaatgtacaagaacacacaattccaa

SEQ ID NO: 130249 - DNA, 478 bp, Homo sapiens
  Payload ID: 5486
  Gene Symbol: ESRP2
  Gene Name: epithelial splicing regulatory protein 2
  ENST ID: ENST00000562724
  CDS Start-End: 349-478
aatggagcagtcacctcgcgaaggtggcttccgggaagagcgggcgtcgagactcaggctgaagaggaaaaagggcctagaggctgcacagatgaggtcgccaggaggggcgagaaggagaccgagtagcgcccagaccttcgggcggggacgctgtgaccctgtgctgtggggacgctgcacaaatcgctggttcgtgccgaggcggccgcactgagtacgcagtgccgcgaggcgagcggcctgagcgccgacagcctggcgcgggcagagccgctggacaaggtgctgcagcagttctcacagctggtgaacggggatgtggctttgctgggcgggggcccctacatgctctgcactgatgggcagcagctattgcgacaggtcctgcaccccgaggcctccaggaagaacctggtgctccccgacatgttcttctccttctatgacctccgaagagaattccatatgcagcatc

SEQ ID NO: 130250 - DNA, 2072 bp, Homo sapiens
  Payload ID: 5486
  Gene Symbol: ESRP2
  Gene Name: epithelial splicing regulatory protein 2
  ENST ID: ENST00000566774
  CDS Start-End: 1-197
gtcaattgttttcgaagcccgaggtgataaagcagaaatacgagacggggccttgcagcaaggctgatgtggtggacagtgagactgtggtacgggctcgtgggttgccgtggcagtcatcagaccaggacgtggctcgcttcttcaaagggctcaacgtggccaggtgtataaagcgacaggggaggagtttgtaaagattgcagggggcacatcactagaggtggctcgtttcttgtcacgggaagaccaagtgatcctgcggctgcggggactgcccttctcggctgggccaacggacgtgcttggcttcctggggccagagtgcccagtgactgggggtaccgaggggctgctctttgtgcgccatcctgatggccggccgactggtgatgccttcgccctctttgcttgtgaggagctggcacaggctgcactgcgcaggcacaagggcatgctgggtaagcgatacattgaactcttccggagcactgcagccgaagtgcagcaggtcttgaaccgctatgcatccggcccactccttcctacactgactgccccactgctgcccatccccttcccactggcacctgggactgggagggactgtgtacgcctccgaggcctgccctacacggccaccattgaagacatcctgagctttctgggggaggcagcagctgacattcggccccacggtgtacacatggtgctcaaccagcagggccggccatcgggcgatgccttcattcagatgacatcagcagagcgagccctagctgctgctcagcgttgccataagaaggcctctcaccacctacctacaccaccttccaagccaccccaacgctcattcccacggagacggcagctctatacccctcttcagcactgctcccagctgccagggtgcctgctgcccccacccctgttgcctactatccagggccagccactcaactctacctgaactacacagcctactacccaagccccccagtctcccccaccactgtgggctacctcactacacccactgctgccctggcctctgctcccacctcagtgttgtcccagtcaggagccttggtccgcatgcagggtgtcccatacacggctggtatgaaggatctgctcagcgtcttccaggcctaccagctacccgctgatgactacaccagtctgatgcctgttggtgacccacctcgcactgtgttacaagcccccaaggaatgggtgtgtttgtaggagagaaagccaggaggtaagagccagctgatatcctcggcgaacatgtctctcctgagtccagaagaccagcaccctcaacctggtagcttctttctggcttgtcaaagctctcagaaggtacctagaggagcccaagccccagctccatcctccacttattctgcctgtttcccccaaagacaatggctggaccctgcatgcagggctgggggtggaatggggctaaccagctcctgatggcctgagccaggcatcttgactggcacctggagagcccttaagtctgtcctggctgtggcccatgccgacagatatcgtggggctgacaggtccacggcaggcttgctttcttttataaaatggaagctctggtaccttcaatgtatgactcctgggagaatcaagggtccatctgagcctctgagtaaagatcccaatgttctacctctccctgtccctcttgtaggggatagggaggcagagagagccagcccctaccctcagagtatctggacctcagagaccatgttgtgccaggggtggtcccacctaaagatgctagcccctctccaggtgggcataaggagtaacagatggcaaaaccacaaactattttgatggactgtgctgcagtatcaccagaagacattagggggcagtaggcccccacacaaaaccttcaggcttgaattttaaaggggaggactttctgccaacttttcttgtatgccttgggaaagccagttgccctgaacccagcagacaccatggaatgtcctttgcacgcattaaatggtacagaactgaagcctcggaagcaa

SEQ ID NO: 130251 - DNA, 592 bp, Homo sapiens
  Payload ID: 5486
  Gene Symbol: ESRP2
  Gene Name: epithelial splicing regulatory protein 2
  ENST ID: ENST00000564382
  CDS Start-End: 346-592
aagagcgggcgtcgagactcaggctgaagaggaaaaagggcctagaggctgcacagatgaggtcgccaggaggggcgagaaggagaccgagtagcgcccagaccttcgggcggggacgctgtgaccctgtgcttttggcaagtggttgagccgcggagccgccaggtggggacgctgcacaaatcgctggttcgtgccgaggcggccgcactgagtacgcagtgccgcgaggcgagcggcctgagcgccgacagcctggcgcgggcagagccgctggacaaggtgctgcagcagttctcacagctggtgaacggggatgtggctttgctgggcgggggcccctacatgctctgcactgatgggcagcagctattgcgacaggtcctgcaccccgaggcctccaggaagaacctggtgctccccgacatgttcttctccttctatgacctccgaagagaattccatatgcagcatccaagcacctgccctgccagggacctcactgtggccaccatggcacagggtttaggactggagacagatgccacagaggatgactttggggtctgggaagtcaagacaatggtagctg

SEQ ID NO: 130252 - DNA, 3114 bp, Homo sapiens
  Payload ID: 5487
  Gene Symbol: EPSTI1
  Gene Name: epithelial stromal interaction 1 (breast)
  Uniprot ID: Q96J88
  ENST ID: ENST00000313624
  CDS Start-End: 85-1008
ggaatcccatcttgagactcgctaagcgtcccagccgcatccctcccgcagcgacggcggcccgggacccgcgggctgtgaaccatgaacacccgcaatagagtggtgaactccgggctcggcgcctcccctgcctcccgcccgacccgggatccccaggacccttctgggcggcaaggggagctgagccccgtggaagaccagagagagggtttggaggcagcccctaagggcccttcgcgggagagcgtcgtgcacgcgggccagaggcgcacaagtgcatacaccttgatagcaccaaatataaaccggagaaatgagatacaaagaattgcggagcaggagctggccaacctggagaagtggaaggagcagaacagagctaaaccggttcacctggtgcccagacggctaggtggaagccagtcagaaactgaagtcagacagaaacaacaactccagctgatgcaatctaaatacaagcaaaagctaaaaagagaagaatctgtaagaatcaagaaggaagctgaagaagctgaactccaaaaaatgaaggcaattcagagagagaagagcaataaactggaggagaaaaaaagacttcaagaaaaccttagaagagaagcatttagagagcatcagcaatacaaaaccgctgagttcttgagcaaactgaacacagaatcgccagacagaagtgcctgtcaaagtgctgtttgtggcccacaatcctcaacatgggccagaagctgggcttacagagattctctaaaggcagaagaaaacagaaaattgcaaaagatgaaggatgaacaacatcaaaagagtgaattactggaactgaaacggcagcagcaagagcaagaaagagccaaaatccaccagactgaacacaggagggtaaataatgcttttctggaccgactccaaggcaaaagtcaaccaggtggcctcgagcaatctggaggctgttggaatatgaatagcggtaacagctggggtatatgagaaaatattgactcctatctggccttcatcaactgacctcgaaaagcctcatgagatgctttttcttaatgtgattttgttcagcctcactgtttttaccttaatttcaactgcccacacacttgaccgtgcagtcaggagtgactggcttctccttgtcctcatttatgcatgtttggaggagctgattcctgaactcatatttaatctctactgccagggaaatgctacattatttttctaattggaagtataattagagtgatgttggtagggtagaaaaagagggagtcacttgatgctttcaggttaatcagagctatgggtgctacaggcttgtctttctaagtgacatattcttatctaattctcagatcaggttttgaaagctttgggggtctttttagattttaatccctactttctttatggtacaaatatgtacaaaagaaaaaggtcttatattcttttacacaaatttataaataaattttgaactccttctgtataaatgggtcatttttatttttaatgaaaagttattggggttttctctcttgaagggtctcattttaattcccttttccaggccgtatagatcaaatatagtactgtcattactgttggctcttgttttggtcttgacttactaatagtgttaccctgattttcagagggggacagtttatctccagaaaggccaatgtttgtatacacatcagctagacacaaatatagacatcatatgtagtttgtacatgtttcagaaacttgttttttctttgctctgtgtaacctatttcctattgctagttcagttggctttcttattcacttctgtgaccctgaaccagttctcagaccctagagtgtaagagcattgattttctacgctgtgtaatctagctcaatccctctgtcccctccgcctcaccgtcccccagccaccacattgtatagcaaaagcattacattcaatcctagaataaaggtaaatacaacaaatcatctttgcagctggacaactaataatactttgcagcattaagagatcttctgtgttaccagtcactctgttgaaatgaactttccgaatctctttattcaggaaaacatggggttttgaaattcttgggccaagagacataactgaggggttcgcagagctaggcaagggtgcactaggaaagggccacattggtgggtggggggtaacagagaacagatggtgtcaggaagtttctctggagtaaataatgtggatattcttggtttccctctcctccgccagctgaagctgtgttagtgctgttgacactaatataaaatgtttggtccatttgaaatccttgtcattgccttatatgggggaaactcaatcccccagcctgtgttggaaatatcaccaaactgattgtaaatgtgcggctgtagcagacattttagtgtggtggtgtgcagccatttcggccctacacctgccagcctggctaccttacagttgtgttccgatttttgcgtctatgcttggtgtgcctcacttgctgcattttccagcatgcaaccaggagttgacgtaggaaaaagggatgctttcttactttggaagctctcagggaagttggtgtcaatttctcctccactgcctggcctaccctgcactcccaaagattttgtgcagatgggtagttccattttttaaaaattgtgcagatatggaaaattgtgacttacttcatgaccagaactatctagaatatgtgtgggggtataaacatcttgcttaaccaaatatctatgtaggcagaggtaaccaggagagaagcaagacttgctgcctaaaggagcccaccattttacttttcacatttaatctgccacgttgaatcaattggaataaaacctgactcgcaggtgactggacaggaaatcccaaagttccaccatttctatgcttaattttaatgtccccccgcttttttttttgtagaaaataaaaacaagaaaatcgttccaatgtaagatgtttgttatagaaactttaggcaatacaggtgtgtaataaaatgtttaataaacttctaaacacttttgtatttggattta

SEQ ID NO: 130253 - DNA, 3160 bp, Homo sapiens
  Payload ID: 5487
  Gene Symbol: EPSTI1
  Gene Name: epithelial stromal interaction 1 (breast)
  Uniprot ID: Q96J88
  ENST ID: ENST00000313640
  CDS Start-End: 66-1298
cgctaagcgtcccagccgcatccctcccgcagcgacggcggcccgggacccgcgggctgtgaaccatgaacacccgcaatagagtggtgaactccgggctcggcgcctcccctgcctcccgcccgacccgggatccccaggacccttctgggcggcaaggggagctgagccccgtggaagaccagagagagggtttggaggcagcccctaagggcccttcgcgggagagcgtcgtgcacgcgggccagaggcgcacaagtgcatacaccttgatagcaccaaatataaaccggagaaatgagatacaaagaattgcggagcaggagctggccaacctggagaagtggaaggagcagaacagagctaaaccggttcacctggtgcccagacggctaggtggaagccagtcagaaactgaagtcagacagaaacaacaactccagctgatgcaatctaaatacaagcaaaagctaaaaagagaagaatctgtaagaatcaagaaggaagctgaagaagctgaactccaaaaaatgaaggcaattcagagagagaagagcaataaactggaggagaaaaaaagacttcaagaaaaccttagaagagaagcatttagagagcatcagcaatacaaaaccgctgagttcttgagcaaactgaacacagaatcgccagacagaagtgcctgtcaaagtgctgtttgtggcccacaatcctcaacatggaaacttcctatcctgcctagggatcacagctgggccagaagctgggcttacagagattctctaaaggcagaagaaaacagaaaattgcaaaagatgaaggatgaacaacatcaaaagagtgaattactggaactgaaacggcagcagcaagagcaagaaagagccaaaatccaccagactgaacacaggagggtaaataatgcttttctggaccgactccaaggcaaaagtcaaccaggtggcctcgagcaatctggaggctgttggaatatgaatagcggtaacagctggggttctctattagttttttcgaggcacctaagggtatatgagaaaatattgactcctatctggccttcatcaactgacctcgaaaagcctcatgagatgctttttcttaatgtgattttgttcagcctcactgtttttaccttaatttcaactgcccacacacttgaccgtgcagtcaggagtgactggcttctccttgtcctcatttatgcatgtttggaggagctgattcctgaactcatatttaatctctactgccagggaaatgctacattatttttctaattggaagtataattagagtgatgttggtagggtagaaaaagagggagtcacttgatgctttcaggttaatcagagctatgggtgctacaggcttgtctttctaagtgacatattcttatctaattctcagatcaggttttgaaagctttgggggtctttttagattttaatccctactttctttatggtacaaatatgtacaaaagaaaaaggtcttatattcttttacacaaatttataaataaattttgaactccttctgtataaatgggtcatttttatttttaatgaaaagttattggggttttctctcttgaagggtctcattttaattcccttttccaggccgtatagatcaaatatagtactgtcattactgttggctcttgttttggtcttgacttactaatagtgttaccctgattttcagagggggacagtttatctccagaaaggccaatgtttgtatacacatcagctagacacaaatatagacatcatatgtagtttgtacatgtttcagaaacttgttttttctttgctctgtgtaacctatttcctattgctagttcagttggctttcttattcacttctgtgaccctgaaccagttctcagaccctagagtgtaagagcattgattttctacgctgtgtaatctagctcaatccctctgtcccctccgcctcaccgtcccccagccaccacattgtatagcaaaagcattacattcaatcctagaataaaggtaaatacaacaaatcatctttgcagctggacaactaataatactttgcagcattaagagatcttctgtgttaccagtcactctgttgaaatgaactttccgaatctctttattcaggaaaacatggggttttgaaattcttgggccaagagacataactgaggggttcgcagagctaggcaagggtgcactaggaaagggccacattggtgggtggggggtaacagagaacagatggtgtcaggaagtttctctggagtaaataatgtggatattcttggtttccctctcctccgccagctgaagctgtgttagtgctgttgacactaatataaaatgtttggtccatttgaaatccttgtcattgccttatatgggggaaactcaatcccccagcctgtgttggaaatatcaccaaactgattgtaaatgtgcggctgtagcagacattttagtgtggtggtgtgcagccatttcggccctacacctgccagcctggctaccttacagttgtgttccgatttttgcgtctatgcttggtgtgcctcacttgctgcattttccagcatgcaaccaggagttgacgtaggaaaaagggatgctttcttactttggaagctctcagggaagttggtgtcaatttctcctccactgcctggcctaccctgcactcccaaagattttgtgcagatgggtagttccattttttaaaaattgtgcagatatggaaaattgtgacttacttcatgaccagaactatctagaatatgtgtgggggtataaacatcttgcttaaccaaatatctatgtaggcagaggtaaccaggagagaagcaagacttgctgcctaaaggagcccaccattttacttttcacatttaatctgccacgttgaatcaattggaataaaacctgactcgcaggtgactggacaggaaatcccaaagttccaccatttctatgcttaattttaatgtccccccgcttttttttttgtagaaaataaaaacaagaaaatcgttccaatgtaagatgtttgttatagaaactttaggcaatacaggtgtgtaataaaatgtttaataaacttctaaacacttttgtatttggattta

SEQ ID NO: 130254 - DNA, 957 bp, Homo sapiens
  Payload ID: 5487
  Gene Symbol: EPSTI1
  Gene Name: epithelial stromal interaction 1 (breast)
  Uniprot ID: Q96J88
  ENST ID: ENST00000398762
  CDS Start-End: 1-957
atgaacacccgcaatagagtggtgaactccgggctcggcgcctcccctgcctcccgcccgacccgggatccccaggacccttctgggcggcaaggggagctgagccccgtggaagaccagagagagggtttggaggcagcccctaagggcccttcgcgggagagcgtcgtgcacgcgggccagaggcgcacaagtgcatacaccttgatagcaccaaatataaaccggagaaatgagatacaaagaattgcggagcaggagctggccaacctggagaagtggaaggagcagaacagagctaaaccggttcacctggtgcccagacggctaggtggaagccagtcagaaactgaagtcagacagaaacaacaactccagctgatgcaatctaaatacaagcaaaagctaaaaagagaagaatctgtaagaatcaagaaggaagctgaagaagctgaactccaaaaaatgaaggcaattcagagagagaagagcaataaactggaggagaaaaaaagacttcaagaaaaccttagaagagaagcatttagagagcatcagcaatacaaaaccgctgagttcttgagcaaactgaacacagaatcgccagacagaagtgcctgtcaaagtgctgtttgtggcccacaatcctcaacatggaaacttcctatcctgcctagggatcacagctgggccagaagctgggcttacagagattctctaaaggcagaagaaaacagaaaattgcaaaagatgaaggatgaacaacatcaaaagagtgaattactggaactgaaacggcagcagcaagagcaagaaagagccaaaatccaccagactgaacacaggagggtaaataatgcttttctggaccgactccaaggcaaaagtcaaccaggtggcctcgagcaatctggaggctgttggaatatgaatagcggtaacagctggggtatatga

SEQ ID NO: 130255 - DNA, 561 bp, Homo sapiens
  Payload ID: 5487
  Gene Symbol: EPSTI1
  Gene Name: epithelial stromal interaction 1 (breast)
  ENST ID: ENST00000537828
  CDS Start-End: 327-561
gtcaacaagaaatgtgatatggggtagaaggttcaaattctgcctctaggtaggagcaagcctacgtcccagcaagactcgcagataaactagcctcttacaaccagaggagtggagctgagagagtgaggagcacaagtgcatacaccttgatagcaccaaatataaaccggagaaatgagatacaaagaattgcggagcaggagctggccaacctggagaagtggaaggagcagaacagagctaaaccggttcacctggtgcccagacggctaggtggaagccagtcagaaactgaagtcagacagaaacaacaactccagctgatgcaatctaaatacaagcaaaagctaaaaagagaagaatctgtaagaatcaagaaggaagctgaagaagctgaactccaaaaaatgaaggcaattcagagagagaagagcaataaactggaggagaaaaaaagacttcaagaaaaccttagaagagaagcatttagagagcatcagcaatacaaaaccgctgagttcttgagcaaactgaacacagaatcgccagacagaagtg

SEQ ID NO: 130256 - DNA, 574 bp, Homo sapiens
  Payload ID: 5487
  Gene Symbol: EPSTI1
  Gene Name: epithelial stromal interaction 1 (breast)
  ENST ID: ENST00000538562
  CDS Start-End: 71-313
agactcgctaagcgtcccagccgcatccctcccgcagcgacggcggcccgggacccgcgggctgtgaaccatgaacacccgcaatagagtggtgaactccgggctcggcgcctcccctgcctcccgcccgacccgggatccccaggacccttctgggcggcaaggggagctgagccccgtggaagaccagagagagggtttggaggcagcccctaagggcccttcgcgggagagcgtcgtgcacgcgggccagaggcgttgcggagcaggagctggccaacctggagaagtggaaggagcagaacagagctaaaccggttcacctggtgcccagacggctaggtggaagccagtcagaaactgaagtcagacagaaacaacaactccagctgatgcaatctaaatacaagcaaaagctaaaaagagaagaatctgtaagaatcaagaaggaagctgaagaagctgaactccaaaaaatgaaggcaattcagagagagaagagcaataaactggaggagaaaaaaagacttcaagaaaaccttagaagagaagcatttagagagcatcagcaata

SEQ ID NO: 130257 - DNA, 8126 bp, Homo sapiens
  Payload ID: 5488
  Gene Symbol: EPM2AIP1
  Gene Name: EPM2A (laforin) interacting protein 1
  Uniprot ID: Q7L775
  ENST ID: ENST00000322716
  CDS Start-End: 92-1915
agagcggaggaggtgcttggcgcttctcaggctcctcctctccccttgcggcctttctaacgttggccctgctcttgtggcctcccgcagaatgtggatgacgcccaaaagaagcaagatggaagtcgacgaggctctagttttccggcccgagtggacccagcgttatttggtggtggagcctccggagggcgatggggccctgtgcctggtctgtcgccgcctcatcgtagctacccgcgaacgcgacgtcaggcgccactacgaggctgagcacgaatactacgagcggtatgtggcggacggcgagcgcgcggccctggtggagcgtctgcgtcagggcgacttgcccgtggcctccttcactcctgaagagagagctgctcgtgcaggcctcgggctctgccgcctcttggccttgaagggtcgcggctggggtgagggggactttgtataccagtgcatggaggtgttgctgagagaggtactgcccgagcatgtaagcgtcctgcaaggcgttgacttatctccagatatcacaaggcagaggatcctgagcattgacaggaatctacgcaaccagctttttaaccgagccagggactttaaagcctattctcttgccttggacgaccaggcttttgtggcctatgagaactacctcctggtctttatccgcggtgtaggccctgagttggaggtgcaagaagatcttctgaccataatcaacctgactcatcatttcagtgttggtgcgctcatgtcggcaatcctagagtccctgcagacagcagggcttagcttgcagagaatggttggactgaccacgacccatactttgaggatgattggtgagaactcaggactcgtctcatacatgagagaaaaggccgtaagccccaactgttggaatgtcattcattattcaggatttcttcacttggaactgttgagctcctatgatgtagatgttaatcagatcataaataccatatccgaatggatagttttgattaagaccagaggcgttaggcgacctgaatttcagactttactaacggaatctgaatcagagcatggtgaaagggttaatggacgatgtctgaacaattggcttaggagagggaaaactttaaaactaatattctctctaagaaaagaaatggaagcgttcttggtttcagtaggggcaacaacagtccacttctcagacaaacaatggctttgtgactttggcttcttggtggacattatggaacaccttcgagaactcagtgaagaattacgagttagtaaagtctttgctgctgctgcctttgaccatatttgtactttcgaagttaagctgaatttatttcaaagacatattgaggaaaaaaatctaacagactttcctgccctcagagaagttgttgatgagctaaaacagcaaaataaggaagatgaaaaaatatttgatcctgataggtatcaaatggtgatctgtcgtctccaaaaagaatttgagagacattttaaggacctcaggttcattaaaaaggacttagaacttttttcaaatccatttaactttaaacctgaatatgcacctatttcagtgagggtggagctaacaaaacttcaggcaaacactaatctttggaatgaatacagaatcaaagacttggggcagttttatgctggattgtctgctgaatcctacccaattatcaaaggggttgcctgtaaggtggcatccttgtttgatagtaaccaaatctgtgaaaaggctttttcatatttgactcgaaaccaacacactttgagtcagccattaacagatgagcatctccaagccctgtttcgggttgccacaactgaaatggagcccggttgggatgaccttgtgagagaaagaaatgaatctaatccataaggctttgtagtacaagattgaaaaactcaacaagaatttaattctaaaagcaaaaattggtttgagttttcaagtttactaatttggattgtgagaaagtaccaagtaccagccgtccaaactgatcacaattaaaattctgacagttgccttttttttcatctcaaatggcagcatgggactgaaacatgagaatgccaccttttttaaaacttagtttagtgacaaagtcattgtcttttatgatatagttaattttaaagagatttagtattaatgtgagttgaatttgcagtctgttttttaggtgttctgaagataaatgccaaaaatttcagctcttattttaatggagtgttaaaattctgattcatatagtcttaaattatcaactccttaaatgtgcttttgaaccaatttgcagaagctcacatagcaagttcataagtttccaaaaaggaagcccatacataacagtggaggtgttttgtctaaccatcaaaatgtttgagacttttttttaaacatttctgagttcgaaggtaatactgacagatttcttccctcttccctccccatcacccacctcagtgataacacattactgatagaggaagtcattagaatcatttttaagtttcagatataggagacttcatgcaatttggagataagactaattattgggggttttccttggattttttttttaataactgggggctattttatcagcttgcctattaaaggactatggtaagtatagaatcttaatggttgccagttagtaattctttttttttttttttttactgtagacacaagtttggccctatcaaaaacgatgaggaaaaaagattgcactccaggattaggaggtgtgagatattttagcttttttgtcttatctgcgtgggtattgctgctttattttaaaaaatcctgcctaaagtaaacactttgttttaaaatgatacagtatcagattttgttagatgctagaaatggatttattctaaaatttggaactgtcgtacacattctatatgtaagatagcacacaagtagaaatatttaaaagcagtcttattcacagattgcagtaattctgtatttctactaagataatctgctttgtgccaaaacagtaatttccaaacttctgttcaccatgaaaaggcaatcttaaagttcattatgtaaaactaattataaacaggacccaatttatattcatagatcctctcaagtattatacaatttaaaaactcttgttccaaagtcctgtcttaactattgaaacaccttaatctgtggttactaatccagcaaattcaaggaaccaggctatgactaagaatttaggtggaattgatgtctgggcaattaaaataaatggcataagagcttaaaaaccaaagttgtgccagtggctttcaactagaggcagtaacctgtcattccagaggatgctgagaaatgtgtaggggcacttttttggttgtcatatttactaggggcttctgttggcatttaagcctaaagacactcacccctgcagtgcatgggacagcctggcacaatgaagaattagccctcccaaaatgtagattattttatttcaagggatagggcagattaccattagaagcaaaattaaaagtacaagctgggcaaactgacagaatactagataggagagactaattccaaccttctaaatttggctagtaaagtgcaataaaggcattgataagttctgttagctcaccatagcacttgtaaatcaggaattaataattgaatcagatttaagggctctgtcctgttatacatatttaaggcagaaaaaaagttacatgtcgattaggtacttatcaagaatggtcaagctgagattttggttaatagagtaagcttacatatctagagaaacaacatagtggaaaaccgaaaaaaaaaaacagaaaaatctaccggtaatttcccaatagctttgaatattcacagcagagctttattacttgagagaaagactggaagacctgaaagccacttctgctttctaaccccagttccttaaatattgaaatcttgtacattttgtgaaattccagtatgttttgcttaaggtgttaataaaattagtttgcatcatgtagtcattgagtgagggggagatataagccaaggattttaaattgacccttagctatagagaatttgctataagctagtcttgtttgtaaaaaaaaaaaaaaaaaaagaaaaagaaaaaagtgtattttactgttttctgtattaagtaattctgtaactgcatggcagtctttttttttttaaataaatatagttgttactggtcctgttgtagcagtgaatatagttaaaatacgtacattaaaaaaaaaattattaggtccttaccagttactgtcctatagctcattcctactagttttcttgacagatttgtattcccagtgtcccgtattgccactcaaattgctctactatgctaagtccttgttaatagtcttaccctccttgaaacacttgaacacttgatgactttagctttgaggagataccatctccaggtgtgctttcttagtctttgcaggcacctcttcccttcaatatctgttcttcgtatttttaaaaaaatttgttttagactgccttgttctgtgtcagctcgctagctgatctcatttccttccatggtttccttaccatttatatgcaaatgactgtcagattcatatctcctttctagatcttccctaattgatgtatctaattgctaacaaatgctctttgctgtctcaggcactacatgtcattgatcttgcccccaatcctgctcctcctctcatgtttcctctttgactaaatggcattaccactaccaaccattcatttgtcctttttaccaattctccaatgctgccattttaattcaggccatcaacctacctaaattatagcaacagcctccttattagtctccctgttttttatttttattcctttctacactacaaccaaattgctccaaaagacttactgatcatgtcactgcattgctttcaccattgctcttagggtacaatacaaatttatcttcatctttaaggtctcagtatgccacttcatctaggaaaccttcattgatgccctctagattaggtgcccttactatccattccctatacaccctgttctttcccagacatacacttggcacactttattgttactgcttattgatcactgctagactgtaagctttgtaagggcagggaccatataagccttgttcactgttatatctctagtgcttagcacaatgcctggcatttcaataaatgtttggacaaacgaatatttgtgtagtgttttacaatttttgaagctctttcacagtcttatttgaccttcacagtcattctgccttagactgtccattgggtaacttttatccacatattactaattgaaaaatgaagacaagttctttgtaactagggacctcgttgtattctcagaatttagtgtagtgcttagcatgtgacttaaatatgtattatgtgactgttaaacaaattgtggttttctctgttgtatgaaaggagagaaggataacaaattgcggttttccctggtaaacacagtaagtagtaaactcaggattcaaaaccaaatatacacaccaaatccactatgtaatattaagtttgcatatccatgtatagaatcttatttttttttaccctttgtaaacagtgtcatatatatatatatattttttttttttttttaaatttccaaaggaacctacatatagagggaaaagattagacaactacttagtgaactaaaacaatatgtttttactaaatgttacatttagtattggaaaaagataatgccgcctaagagttaataatcatttttccttttgtaggcatcaacactaggagaaaatggcatgctatttacttgctactttcctttacagatgatttttggctcttctgggatttaaaagtaagtaaatttaacaaagtagaagactgactcagcccttctggtcactatatattcagttcacttgtttttacacctgcagaatgtccttatcacccaaagggagatgacccaaaagtgacatctagttaatgtatacttctaaagtttgctgtattcctttgccttcttgttcccatgcctctctgaacttaatttctgggtaactgaggcttttcaggcttaggtgggaaagccacacccttagtctgtttccttaagccattttgaccaatttatgggattaactagtataatcttagttggagttttagtctgaggcatattaagtcattcagagatcttaacagtaggtgtcatagtcatccagtgatttggtgcttgctgcaaaactggcttttttttttttttttttttttgaggcggggtctcactttgtcacccaggctggagtgcagaggtacaatctcagctcaatgcaatctctgccttcctggctcaagcaattctcccactgcagcctcctaagtagctgggaatacaggtatacacgagtacacccagctaatttttgtatttttatgtggagacagggtcttgctgtattccccaggctagtctcgaattcctggactcaagcagtccgcccgcctcgggctcccaaaatgttggtgttatacgtgtgagcctctgcacccggcggcaaaactggcttttaatcaaccttttggctaaaggatttctctttttatttatttgtaaaaggatttcccatttttatctttctttttgatattaaaatgttgcctcatcctacccagtaagtacttgaatttgaattctcttccttttcatttttgcctgcaaactgaccagtcttttctgagttcatctcttctgtacgttttgtcaagtgcagtgaacagcaactacaaaatattttgtttttctgtctttttctttagtaaagggtagatgatctgcctttcaggttatctcaaggggcagtttcacctttccataatataaattacccttgtgtaagttatttcttccatcttctgatagcaatttcctgaatgcctgccagctaaccattaagccagtgttcagtattttagcattttaaaaaacaagggaccaatttctgtgtcagcatgggctagcttgccattgaataacaaaggcaaaatctcactgtctcacacaacttttctattgcaacttgcctagggactttggtttagatcataggttggccatgatcaaactatggtccatgggcaaaatctgtctagctccttatttatctaaataaagttttactggaatatagccttgtccatttatttattatctgtggctactttggttctacaatggcacagctgagtagttgctacagagtgtgtacatctcacaaaacctaaaatacttattctgtggccctttacagagaaagttcaccaatttgtgctctaagttgccttcattctgggtctcaggctgacaaagcagataccatcaggagtgtgggtgctaactttgggaaatgaaaaaagagtatggcaaatcacttaaggactcttaaaggactttcattggccaaagcaaatcacatagccacattaaagttctaggaggagtgtgatccttgcatatacctgggagaaaaaccagaaatatttggaagacaacaccactgattaacatcttcatttatatgctttcttccaatatattttcaacttgttactgaggtaaaatttaaaagtgtaccgatattaagtgtacacctcagtgggtttttatatatgcccttgaatgcaccacccaggtcaaaatatagaatatttctagcacttcagtaggtgtccttatgttccccaggcccccaccaaccccttttatcaccacggattagttttgcctgttttaaaactttatgtaagtgaaataattatatgcactcttccgtgtcttgttcaacattgtatctgtgagagtaatccatgttatatgtagtagcagttcatgttttacttctgtgtagtattccattgtgtgactacatcacaacttacccattctaccgttgatagaaatttaggttgtttccagcttgtggtcattatgaataaagttactatgaaaatga

SEQ ID NO: 130258 - DNA, 513 bp, Homo sapiens
  Payload ID: 5488
  Gene Symbol: EPM2AIP1
  Gene Name: EPM2A (laforin) interacting protein 1
  ENST ID: ENST00000624586
  CDS Start-End: 1-418
caactgttggaatgtcattcattattcaggatttcttcacttggaactgttgagctcctatgatgtagatgttaatcagatcataaataccatatccgaatggatagttttgattaagaccagaggcgttaggcgacctgaatttcagactttactaacggaatctgaatcagagcatggtgaaagggttaatggacgatgtctgaacaattggcttaggagagggaaaactttaaaactaatattctctctaagaaaagaaatggaagcgttcttggtttcagtaggggcaacaacagtccacttctcagacaaacaatggctttgtgactttggcttcttggtggacattatggaacaccttcgagaactcagtgaagaattacgaacacaagtttggccctatcaaaaacgatgaggaaaaaagattgcactccaggattaggaggtgtgagatattttagcttttttgtcttatctgcgtgggtattgctgctttattttaaaaaatcc

SEQ ID NO: 130259 - DNA, 543 bp, Homo sapiens
  Payload ID: 5488
  Gene Symbol: EPM2AIP1
  Gene Name: EPM2A (laforin) interacting protein 1
  ENST ID: ENST00000623924
  CDS Start-End: 1-127
cgtagctacccgcgaacgcgacgtcaggcgccactacgaggctgagcacgaatactacgagcgacacaagtttggccctatcaaaaacgatgaggaaaaaagattgcactccaggattaggagatgatttttggctcttctgggatttaaaagtaagtaaatttaacaaagtagaagactgactcagcccttctggtcactatatattcagttcacttgtttttacacctgcagaatgtccttatcacccaaagggagatgacccaaaagtgacatctagttaatgtatacttctaaagtttgctgtattcctttgccttcttgttcccatgcctctctgaacttaatttctgggtaactgaggcttttcaggcttaggtgggaaagccacacccttagtctgtttccttaagccattttgaccaatttatgggattaactagtataatcttagttggagttttagtctgaggcatattaagtcattcagagatcttaacagtaggtgtcatagtcatccagtgatttggtgcttgctgcaaa

SEQ ID NO: 130260 - DNA, 1660 bp, Homo sapiens
  Payload ID: 5489
  Gene Symbol: EPHX1
  Gene Name: epoxide hydrolase 1, microsomal (xenobiotic)
  Uniprot ID: P07099
  ENST ID: ENST00000272167
  CDS Start-End: 81-1448
gaaaactagccgaggagagccagggagccggagagatcgcgcgcctgccgccgccggagcctgcgagccgagaccgagccatgtggctagaaatcctcctcacttcagtgctgggctttgccatctactggttcatctcccgggacaaagaggaaactttgccacttgaagatgggtggtgggggccaggcacgaggtccgcagccagggaggacgacagcatccgccctttcaaggtggaaacgtcagatgaggagatccacgacttacaccagaggatcgataagttccgtttcaccccacctttggaggacagctgcttccactatggcttcaactccaactacctgaagaaagtcatctcctactggcggaatgaatttgactggaagaagcaggtggagattctcaacagataccctcacttcaagactaagattgaagggctggacatccacttcatccacgtgaagcccccccagctgcccgcaggccataccccgaagcccttgctgatggtgcacggctggcccggctctttctacgagttttataagatcatcccactcctgactgaccccaagaaccatggcctgagcgatgagcacgtttttgaagtcatctgcccttccatccctggctatggcttctcagaggcatcctccaagaaggggttcaactcggtggccaccgccaggatcttttacaagctgatgctgcggctgggcttccaggaattctacattcaaggaggggactgggggtccctgatctgcactaatatggcccagctggtgcccagccacgtgaaaggcctgcacttgaacatggctttggttttaagcaacttctctaccctgaccctcctcctgggacagcgtttcgggaggtttcttggcctcactgagagggatgtggagctgctgtaccccgtcaaggagaaggtattctacagcctgatgagggagagcggctacatgcacatccagtgcaccaagcctgacaccgtaggctctgctctgaatgactctcctgtgggtctggctgcctatattctagagaagttttccacctggaccaatacggaattccgatacctggaggatggaggcctggaaaggaagttctccctggacgacctgctgaccaacgtcatgctctactggacaacaggcaccatcatctcctcccagcgcttctacaaggagaacctgggacagggctggatgacccagaagcatgagcggatgaaggtctatgtgcccactggcttctctgccttcccttttgagctattgcacacgcctgaaaagtgggtgaggttcaagtacccaaagctcatctcctattcctacatggttcgtgggggccactttgcggcctttgaggagccggagctgctcgcccaggacatccgcaagttcctgtcggtgctggagcggcaatgacccacccctctccccccgcctgccacctccccccacaagtgccctccaggcttttcttggggaagataccccttttctgaggaatgagtttgcctccgtcccctgcccatgctgggagcccacgctcaccccctcacccctccaagctcactccccaacccccaactccgtgtggtaagcaacatggctttgatgataaacgactttactct

SEQ ID NO: 130261 - DNA, 1780 bp, Homo sapiens
  Payload ID: 5489
  Gene Symbol: EPHX1
  Gene Name: epoxide hydrolase 1, microsomal (xenobiotic)
  Uniprot ID: P07099
  ENST ID: ENST00000366837
  CDS Start-End: 197-1564
acaggcccttagagcatcgccaggtgcagagctccacagctctctttcccaaggagtaatcagagggtgagaacgtggagcctggtggacaggtgaaagcactgggatctttctgcccagaaaggggaaagttgcacatttatatcctagagggaagcgacagcagtgcttctccctgtgctgaggtacaggagccatgtggctagaaatcctcctcacttcagtgctgggctttgccatctactggttcatctcccgggacaaagaggaaactttgccacttgaagatgggtggtgggggccaggcacgaggtccgcagccagggaggacgacagcatccgccctttcaaggtggaaacgtcagatgaggagatccacgacttacaccagaggatcgataagttccgtttcaccccacctttggaggacagctgcttccactatggcttcaactccaactacctgaagaaagtcatctcctactggcggaatgaatttgactggaagaagcaggtggagattctcaacagataccctcacttcaagactaagattgaagggctggacatccacttcatccacgtgaagcccccccagctgcccgcaggccataccccgaagcccttgctgatggtgcacggctggcccggctctttctacgagttttataagatcatcccactcctgactgaccccaagaaccatggcctgagcgatgagcacgtttttgaagtcatctgcccttccatccctggctatggcttctcagaggcatcctccaagaaggggttcaactcggtggccaccgccaggatcttttacaagctgatgctgcggctgggcttccaggaattctacattcaaggaggggactgggggtccctgatctgcactaatatggcccagctggtgcccagccacgtgaaaggcctgcacttgaacatggctttggttttaagcaacttctctaccctgaccctcctcctgggacagcgtttcgggaggtttcttggcctcactgagagggatgtggagctgctgtaccccgtcaaggagaaggtattctacagcctgatgagggagagcggctacatgcacatccagtgcaccaagcctgacaccgtaggctctgctctgaatgactctcctgtgggtctggctgcctatattctagagaagttttccacctggaccaatacggaattccgatacctggaggatggaggcctggaaaggaagttctccctggacgacctgctgaccaacgtcatgctctactggacaacaggcaccatcatctcctcccagcgcttctacaaggagaacctgggacagggctggatgacccagaagcatgagcggatgaaggtctatgtgcccactggcttctctgccttcccttttgagctattgcacacgcctgaaaagtgggtgaggttcaagtacccaaagctcatctcctattcctacatggttcgtgggggccactttgcggcctttgaggagccggagctgctcgcccaggacatccgcaagttcctgtcggtgctggagcggcaatgacccacccctctccccccgcctgccacctccccccacaagtgccctccaggcttttcttggggaagataccccttttctgaggaatgagtttgcctccgtcccctgcccatgctgggagcccacgctcaccccctcacccctccaagctcactccccaacccccaactccgtgtggtaagcaacatggctttgatgataaacgactttactctaaaa

SEQ ID NO: 130262 - DNA, 567 bp, Homo sapiens
  Payload ID: 5489
  Gene Symbol: EPHX1
  Gene Name: epoxide hydrolase 1, microsomal (xenobiotic)
  ENST ID: ENST00000445856
  CDS Start-End: 84-567
gctgaaaactagccgaggagagccagggagccggagagatcgcgcgcctgccgccgccggagcctgcgagccgagaccgagccatgtggctagaaatcctcctcacttcagtgctgggctttgccatctactggttcatctcccgggacaaagaggaaactttgccacttgaagatgggtggtgggggccaggcacgaggtccgcagccagggaggacgacagcatccgccctttcaaggtggaaacgtcagatgaggagatccacgacttacaccagaggatcgataagttccgtttcaccccacctttggaggacagctgcttccactatggcttcaactccaactacctgaagaaagtcatctcctactggcggaatgaatttgactggaagaagcaggtggagattctcaacagataccctcacttcaagactaagattgaagggctggacatccacttcatccacgtgaagcccccccagctgcccgcaggccataccccgaagcccttgctgatggtgcacggctggcccggctctttctacgagttttataagatcatcc

SEQ ID NO: 130263 - DNA, 895 bp, Homo sapiens
  Payload ID: 5489
  Gene Symbol: EPHX1
  Gene Name: epoxide hydrolase 1, microsomal (xenobiotic)
  ENST ID: ENST00000448202
  CDS Start-End: 488-895
cgcgcctgccgccgccggagcctgcgagccgagaccgtaagcgcccggggccggccgggcccgcactccccggacgcagacgcggttcgggctccgcgcgggctcggccgccggggtgggcggcgggccggggcgccgaggggtcggggctgcggtcggcccgcaggggtgcagagggacttgtagttggtccgcccccagctcctgccccggccaggagactgcgcgtgccgcctactgggggaaggagcctgcaggcgaccgcggacttctcgcagggaattccgcgtcccagactgtgggcggacgccgcagggagggaggctcgcgaccccgagagcgcaccgcgtcccctggcctgggcgagctctgcttccagggccgtggctcgctcggcggtgaaatgcacttaatttgtcacccaagtcggaacactgattttcatgcgcgtccgtgtgaagagaccaccaaacaggctttgtgagccatgtggctagaaatcctcctcacttcagtgctgggctttgccatctactggttcatctcccgggacaaagaggaaactttgccacttgaagatgggtggtgggggccaggcacgaggtccgcagccagggaggacgacagcatccgccctttcaaggtggaaacgtcagatgaggagatccacgacttacaccagaggatcgataagttccgtttcaccccacctttggaggacagctgcttccactatggcttcaactccaactacctgaagaaagtcatctcctactggcggaatgaatttgactggaagaagcaggtggagattctcaacagataccctcacttcaagactaagattgaagggctggacatccacttcatccacgtgaagcccccccagctgccc

SEQ ID NO: 130264 - DNA, 1789 bp, Homo sapiens
  Payload ID: 5489
  Gene Symbol: EPHX1
  Gene Name: epoxide hydrolase 1, microsomal (xenobiotic)
  Uniprot ID: P07099
  ENST ID: ENST00000614058
  CDS Start-End: 210-1577
ggaattccgcgtcccagactgtgggcggacgccgcagggagggaggctcgcgaccccgagagcgcaccgcgtcccctggcctgggcgagctctgcttccagggccgtggctcgctcggcggtgaaatgcacttaatttgtcacccaagtcggaacactgattttcatgcgcgtccgtgtgaagagaccaccaaacaggctttgtgagccatgtggctagaaatcctcctcacttcagtgctgggctttgccatctactggttcatctcccgggacaaagaggaaactttgccacttgaagatgggtggtgggggccaggcacgaggtccgcagccagggaggacgacagcatccgccctttcaaggtggaaacgtcagatgaggagatccacgacttacaccagaggatcgataagttccgtttcaccccacctttggaggacagctgcttccactatggcttcaactccaactacctgaagaaagtcatctcctactggcggaatgaatttgactggaagaagcaggtggagattctcaacagataccctcacttcaagactaagattgaagggctggacatccacttcatccacgtgaagcccccccagctgcccgcaggccataccccgaagcccttgctgatggtgcacggctggcccggctctttctacgagttttataagatcatcccactcctgactgaccccaagaaccatggcctgagcgatgagcacgtttttgaagtcatctgcccttccatccctggctatggcttctcagaggcatcctccaagaaggggttcaactcggtggccaccgccaggatcttttacaagctgatgctgcggctgggcttccaggaattctacattcaaggaggggactgggggtccctgatctgcactaatatggcccagctggtgcccagccacgtgaaaggcctgcacttgaacatggctttggttttaagcaacttctctaccctgaccctcctcctgggacagcgtttcgggaggtttcttggcctcactgagagggatgtggagctgctgtaccccgtcaaggagaaggtattctacagcctgatgagggagagcggctacatgcacatccagtgcaccaagcctgacaccgtaggctctgctctgaatgactctcctgtgggtctggctgcctatattctagagaagttttccacctggaccaatacggaattccgatacctggaggatggaggcctggaaaggaagttctccctggacgacctgctgaccaacgtcatgctctactggacaacaggcaccatcatctcctcccagcgcttctacaaggagaacctgggacagggctggatgacccagaagcatgagcggatgaaggtctatgtgcccactggcttctctgccttcccttttgagctattgcacacgcctgaaaagtgggtgaggttcaagtacccaaagctcatctcctattcctacatggttcgtgggggccactttgcggcctttgaggagccggagctgctcgcccaggacatccgcaagttcctgtcggtgctggagcggcaatgacccacccctctccccccgcctgccacctccccccacaagtgccctccaggcttttcttggggaagataccccttttctgaggaatgagtttgcctccgtcccctgcccatgctgggagcccacgctcaccccctcacccctccaagctcactccccaacccccaactccgtgtggtaagcaacatggctttgatgataaacgactttactct

SEQ ID NO: 130265 - DNA, 2064 bp, Homo sapiens
  Payload ID: 5490
  Gene Symbol: EPHX2
  Gene Name: epoxide hydrolase 2, cytoplasmic
  Uniprot ID: P34913
  ENST ID: ENST00000380476
  CDS Start-End: 165-1673
aggttagctgcgtgtccgggtgctaggctgcagacccgccgccatgacgctgcgcgcggccgtcttcgaccttgacggggtgctggcgctgccagcggtgttcggcgtcctcggccgcacggaggaggccctggcgctgcccagagggtgccactacccggcttatgaaaggagagatcacactttcccagtggataccactcatggaagaaaactgcaggaagtgctccgagaccgctaaagtctgcctccccaagaatttctccataaaagaaatctttgacaaggcgatttcagccagaaagatcaaccgccccatgctccaggcagctctcatgctcaggaagaaaggattcactactgccatcctcaccaacacctggctggacgaccgtgctgagagagatggcctggcccagctgatgtgtgagctgaagatgcactttgacttcctgatagagtcgtgtcaggtgggaatggtcaaacctgaacctcagatctacaagtttctgctggacaccctgaaggccagccccagtgaggtcgtttttttggatgacatcggggctaatctgaagccagcccgtgacttgggaatggtcaccatcctggtccaggacactgacacggccctgaaagaactggagaaagtgaccggaatccagcttctcaataccccggcccctctgccgacctcttgcaatccaagtgacatgagccatgggtacgtgacagtaaagcccagggtccgtctgcattttgtggagctgggctccggccctgctgtgtgcctctgccatggatttcccgagagttggtattcttggaggtaccagatccctgctctggcccaggcaggttaccgggtcctagctatggacatgaaaggctatggagagtcatctgctcctcccgaaatagaagaatattgcatggaagtgttatgtaaggagatggtaaccttcctggataaactgggcctctctcaagcagtgttcattggccatgactggggtggcatgctggtgtggtacatggctctcttctaccccgagagagtgagggcggtggccagtttgaatactcccttcataccagcaaatcccaacatgtcccctttggagagtatcaaagccaacccagtatttgattaccagctctacttccaagaaccaggagtggctgaggctgaactggaacagaacctgagtcggactttcaaaagcctcttcagagcaagcgatgagagtgttttatccatgcataaagtctgtgaagcgggaggactttttgtaaatagcccagaagagcccagcctcagcaggatggtcactgaggaggaaatccagttctatgtgcagcagttcaagaagtctggtttcagaggtcctctaaactggtaccgaaacatggaaaggaactggaagtgggcttgcaaaagcttgggacggaagatcctgattccggccctgatggtcacggcggagaaggacttcgtgctcgttcctcagatgtcccagcacatggaggactggattccccacctgaaaaggggacacattgaggactgtgggcactggacacagatggacaagccaaccgaggtgaatcagatcctcattaagtggctggattctgatgcccggaacccaccggtggtctcaaagatgtagaacgcagcgtgtgcccacgctcagcaggtgtgccatccttccacctgctggggcaccattcttagtatacagaggtggccttacacacatcttgcatggatggcagcattgttctgaaggggtttgcagaaaaaaaagattttctttacataaagtgaatcaaatttgacattattttagatcccagagaaatcaggtgtgattagttctccaggcatgaatgcatcgtccctttatctgtaagaacccttagtgtcctgtagggggacagaatggggtggccaggtggtgatttctctttgaccaatgcatagtttggcagaaaaatcagccgttcatttagaagaatcttagcagagattgggatgccttactcaataaagctaagatg

SEQ ID NO: 130266 - DNA, 1959 bp, Homo sapiens
  Payload ID: 5490
  Gene Symbol: EPHX2
  Gene Name: epoxide hydrolase 2, cytoplasmic
  ENST ID: ENST00000518379
  CDS Start-End: 18-1589
gctgcagacccgccgccatgacgctgcgcgcggccgtcttcgaccttgacggggtgctggcgctgccagcggtgttcggcgtcctcggccgcacggaggaggccctggcgctgcccagaggacttctgaatgatgctttccagaaagggggaccagagggtgccactacccggcttatgaaaggagagatcacactttcccagtggataccactcatggaagaaaactgcaggaagtgctccgagaccgctaaagtctgcctccccaagaatttctccataaaagaaatctttgacaaggcgatttcagccagaaagatcaaccgccccatgctccaggcagctctcatgctcaggaagaaaggattcactactgccatcctcaccaacacctggctggacgaccgtgctgagagagatggcctggcccagctgatgtgtgagctgaagatgcactttgacttcctgatagagtcgtgtcaggtgggaatggtcaaacctgaacctcagatctacaagtttctgctggacaccctgaaggccagccccagtgaggtcgtttttttggatgacatcggggctaatctgaagccagcccgtgacttgggaatggtcaccatcctggtccaggacactgacacggccctgaaagaactggagaaagtgaccggaatccagcttctcaataccccggcccctctgccgacctcttgcaatccaagtgacatgagccatgggtacgtgacagtaaagatccctgctctggcccaggcaggttaccgggtcctagctatggacatgaaaggctatggagagtcatctgctcctcccgaaatagaagaatattgcatggaagtgttatgtaaggagatggtaaccttcctggataaactgggcctctctcaagcagtgttcattggccatgactggggtggcatgctggtgtggtacatggctctcttctaccccgagagagtgagggcggtggccagtttgaatactcccttcataccagcaaatcccaacatgtcccctttggagagtatcaaagccaacccagtatttgattaccagctctacttccaagaaccaggagtggctgaggctgaactggaacagaacctgagtcggactttcaaaagcctcttcagagcaagcgatgagagtgttttatccatgcataaagtctgtgaagcgggaggactttttgtaaatagcccagaagagcccagcctcagcaggatggtcactgaggaggaaatccagttctatgtgcagcagttcaagaagtctggtttcagaggtcctctaaactggtaccgaaacatggaaaggaactggaagtgggcttgcaaaagcttgggacggaagatcctgattccggccctgatggtcacggcggagaaggacttcgtgctcgttcctcagatgtcccagcacatggaggactggattccccacctgaaaaggggacacattgaggactgtgggcactggacacagatggacaagccaaccgaggtgaatcagatcctcattaagtggctggattctgatgcccggaacccaccggtggtctcaaagatgtagaacgcagcgtgtgcccacgctcagcaggtgtgccatccttccacctgctggggcaccattcttagtatacagaggtggccttacacacatcttgcatggatggcagcattgttctgaaggggtttgcagaaaaaaaagattttctttacataaagtgaatcaaatttgacattattttagatcccagagaaatcaggtgtgattagttctccaggcatgaatgcatcgtccctttatctgtaagaacccttagtgtcctgtagggggacagaatggggtggccaggtggtgatttctctttgaccaatgcatagtttggcagaaaaatcagccgttcatttagaagaatcttagcagagattgggatgcc

SEQ ID NO: 130267 - DNA, 935 bp, Homo sapiens
  Payload ID: 5490
  Gene Symbol: EPHX2
  Gene Name: epoxide hydrolase 2, cytoplasmic
  ENST ID: ENST00000521684
  CDS Start-End: 1-935
tgacgctgcgcgcggccgtcttcgaccttgacggggtgctggcgctgccagcggtgttcggcgtcctcggccgcacggaggaggccctggcgctgcccagaggacttctgaatgatgctttccagaaagggggaccagagggtgccactacccggcttatgaaaggagagatcacactttcccagtggataccactcatggaagaaaactgcaggaagtgctccgagaccgctaaagtctgcctccccaagaatttctccataaaagaaatctttgacaaggcgatttcagccagaaagatcaaccgccccatgctccaggcagctctcatgctcaggaagaaaggattcactactgccatcctcaccaacacctggctggacgaccgtgctgagagagatggcctggcccagctgatgtgtgagctgaagatgcactttgacttcctgatagagtcgtgtcaggtgggaatggtcaaacctgaacctcagatctacaagtttctgctggacaccctgaaggccagccccagtgagcttctcaataccccggcccctctgccgacctcttgcaatccaagtgacatgagccatgggtacgtgacagtaaagcccagggtccgtctgcattttgtggagctgggctccggccctgctgtgtgcctctgccatggatttcccgagagttggtattcttggaggtaccagatccctgctctggcccaggcaggttaccgggtcctagctatggacatgaaaggctatggagagtcatctgctcctcccgaaatagaagaatattgcatggaagtgttatgtaaggagatggtaaccttcctggataaactgggcctctctcaagcagtgttcattggccatgactggggtggcatgctggtgtggtacatggctctcttctaccccgagagagtgagg

SEQ ID NO: 130268 - DNA, 1600 bp, Homo sapiens
  Payload ID: 5490
  Gene Symbol: EPHX2
  Gene Name: epoxide hydrolase 2, cytoplasmic
  ENST ID: ENST00000517536
  CDS Start-End: 85-1203
aagctgggcgggtcatgcgccctggccttcgcgcatctcccaggttagctgcgtgtccgggtgctaggctgcagacccgccgccatgacgctgcgcgcggccgtcttcgaccttgacggggtgctggcgctgccagcggtgttcggcgtcctcggccgcacggaggaggccctggcgctgcccagaggacttctgaatgatgctttccagaaagggggaccagagggtgccactacccggcttatgaaaggagagatcacactttcccagcccagggtccgtctgcattttgtggagctgggctccggccctgctgtgtgcctctgccatggatttcccgagagttggtattcttggaggtaccagatccctgctctggcccaggcaggttaccgggtcctagctatggacatgaaaggctatggagagtcatctgctcctcccgaaatagaagaatattgcatggaagtgttatgtaaggagatggtaaccttcctggataaactgggcctctctcaagcagtgttcattggccatgactggggtggcatgctggtgtggtacatggctctcttctaccccgagagagtgagggcggtggccagtttgaatactcccttcataccagcaaatcccaacatgtcccctttggagagtatcaaagccaacccagtatttgattaccagctctacttccaagaaccaggagtggctgaggctgaactggaacagaacctgagtcggactttcaaaagcctcttcagagcaagcgatgagagtgttttatccatgcataaagtctgtgaagcgggaggactttttgtaaatagcccagaagagcccagcctcagcaggatggtcactgaggaggaaatccagttctatgtgcagcagttcaagaagtctggtttcagaggtcctctaaactggtaccgaaacatggaaaggaactggaagtgggcttgcaaaagcttgggacggaagatcctgattccggccctgatggtcacggcggagaaggacttcgtgctcgttcctcagatgtcccagcacatggaggactggattccccacctgaaaaggggacacattgaggactgtgggcactggacacagatggacaagccaaccgaggtgaatcagatcctcattaagtggctggattctgatgcccggaacccaccggtggtctcaaagatgtagaacgcagcgtgtgcccacgctcagcaggtgtgccatccttccacctgctggggcaccattcttagtatacagaggtggccttacacacatcttgcatggatggcagcattgttctgaaggggtttgcagaaaaaaaagattttctttacataaagtgaatcaaatttgacattattttagatcccagagaaatcaggtgtgattagttctccaggcatgaatgcatcgtccctttatctgtaagaacccttagtgtcctgtagggggacagaatggggtggccaggtggtgatttctctttgaccaatgcatagtttggcagaaaaatcagccgttcatttagaagaatcttagcagagattgggatgccttactcaataaagctaagatgactatg

SEQ ID NO: 130269 - DNA, 3140 bp, Homo sapiens
  Payload ID: 5490
  Gene Symbol: EPHX2
  Gene Name: epoxide hydrolase 2, cytoplasmic
  Uniprot ID: P34913
  ENST ID: ENST00000521400
  CDS Start-End: 431-2098
attccaagtccagcaagttcgcagggagctgtcagtccgtccaggaaggcccgggcctgggtttgcctcttcaagcagctactgcaggggcgtggggagggggcataagagactttggactttcctttgagacagtagaaagcgttacatccagaggcgagattctagcctggggtccccgccttcccggcctcctcttcctctccctctgactccctttcctgtgcccctccccctgcctctttcccggccagagtccagccttaacccgggcagagggcggagtcccgttaagggggtgtggggaggaggcggggccagggcaggggcggggcagagccgggccaagctgggcgggtcatgcgccctggccttcgcgcatctcccaggttagctgcgtgtccgggtgctaggctgcagacccgccgccatgacgctgcgcgcggccgtcttcgaccttgacggggtgctggcgctgccagcggtgttcggcgtcctcggccgcacggaggaggccctggcgctgcccagaggacttctgaatgatgctttccagaaagggggaccagagggtgccactacccggcttatgaaaggagagatcacactttcccagtggataccactcatggaagaaaactgcaggaagtgctccgagaccgctaaagtctgcctccccaagaatttctccataaaagaaatctttgacaaggcgatttcagccagaaagatcaaccgccccatgctccaggcagctctcatgctcaggaagaaaggattcactactgccatcctcaccaacacctggctggacgaccgtgctgagagagatggcctggcccagctgatgtgtgagctgaagatgcactttgacttcctgatagagtcgtgtcaggtgggaatggtcaaacctgaacctcagatctacaagtttctgctggacaccctgaaggccagccccagtgaggtcgtttttttggatgacatcggggctaatctgaagccagcccgtgacttgggaatggtcaccatcctggtccaggacactgacacggccctgaaagaactggagaaagtgaccggaatccagcttctcaataccccggcccctctgccgacctcttgcaatccaagtgacatgagccatgggtacgtgacagtaaagcccagggtccgtctgcattttgtggagctgggctccggccctgctgtgtgcctctgccatggatttcccgagagttggtattcttggaggtaccagatccctgctctggcccaggcaggttaccgggtcctagctatggacatgaaaggctatggagagtcatctgctcctcccgaaatagaagaatattgcatggaagtgttatgtaaggagatggtaaccttcctggataaactgggcctctctcaagcagtgttcattggccatgactggggtggcatgctggtgtggtacatggctctcttctaccccgagagagtgagggcggtggccagtttgaatactcccttcataccagcaaatcccaacatgtcccctttggagagtatcaaagccaacccagtatttgattaccagctctacttccaagaaccaggagtggctgaggctgaactggaacagaacctgagtcggactttcaaaagcctcttcagagcaagcgatgagagtgttttatccatgcataaagtctgtgaagcgggaggactttttgtaaatagcccagaagagcccagcctcagcaggatggtcactgaggaggaaatccagttctatgtgcagcagttcaagaagtctggtttcagaggtcctctaaactggtaccgaaacatggaaaggaactggaagtgggcttgcaaaagcttgggacggaagatcctgattccggccctgatggtcacggcggagaaggacttcgtgctcgttcctcagatgtcccagcacatggaggactggattccccacctgaaaaggggacacattgaggactgtgggcactggacacagatggacaagccaaccgaggtgaatcagatcctcattaagtggctggattctgatgcccggaacccaccggtggtctcaaagatgtagaacgcagcgtgtgcccacgctcagcaggtgtgccatccttccacctgctggggcaccattcttagtatacagaggtggccttacacacatcttgcatggatggcagcattgttctgaaggggtttgcagaaaaaaaagattttctttacataaagtgaatcaaatttgacattattttagatcccagagaaatcaggtgtgattagttctccaggcatgaatgcatcgtccctttatctgtaagaacccttagtgtcctgtagggggacagaatggggtggccaggtggtgatttctctttgaccaatgcatagtttggcagaaaaatcagccgttcatttagaagaatcttagcagagattgggatgccttactcaataaagctaagatgactatgctgctggctgtctttgttcttggagaggtggagtgactgttcacggagaatgcacggcatggggatgaaccctttccctctgcttttgagccctgttctgggctccaaggtgctgtatgatctaggccgtgctggccaggagacaatcctatggggatggcagtggtgtcttgtgctctgtcccctagagcagtcactggccacaggtagccacctgcctttctcccggcttccctagcagagtttgctcaggcacaaatgtgcacctggagcatttgaaatgtgctagtgaggctgaggaagagaattttaaatttcattgaattgtaatcagtttaaagttaaatagcagcagctgccatgaggctcaggcagatccagctcatcttcccctctgccccctcctccctatcttcccctctaccctctcctgcctcctgtcacatccggttaggctcccatctcactgatgtgtctcctgcagtggtctctcccctgccctgcttccagccccagagtcctggagcagcagcctcctcacgggtcttgccgcccacatggttggatcctgaaactcgcagggcctcccccaactgcccctgcccacccccagcccggccccatcaccctccaattcctaaccgc

SEQ ID NO: 130270 - DNA, 2038 bp, Homo sapiens
  Payload ID: 5490
  Gene Symbol: EPHX2
  Gene Name: epoxide hydrolase 2, cytoplasmic
  Uniprot ID: P34913
  ENST ID: ENST00000521780
  CDS Start-End: 172-1641
cttcgcgcatctcccaggttagctgcgtgtccgggtgctaggctgcagacccgccgccatgacgctgcgcgcggccgtcttcgaccttgacggggtgctggcgctgccagcggtgttcggcgtcctcggccgcacggaggaggccctggcgctgcccagtggataccactcatggaagaaaactgcaggaagtgctccgagaccgctaaagtctgcctccccaagaatttctccataaaagaaatctttgacaaggcgatttcagccagaaagatcaaccgccccatgctccaggcagctctcatgctcaggaagaaaggattcactactgccatcctcaccaacacctggctggacgaccgtgctgagagagatggcctggcccagctgatgtgtgagctgaagatgcactttgacttcctgatagagtcgtgtcaggtgggaatggtcaaacctgaacctcagatctacaagtttctgctggacaccctgaaggccagccccagtgaggtcgtttttttggatgacatcggggctaatctgaagccagcccgtgacttgggaatggtcaccatcctggtccaggacactgacacggccctgaaagaactggagaaagtgaccggaatccagcttctcaataccccggcccctctgccgacctcttgcaatccaagtgacatgagccatgggtacgtgacagtaaagcccagggtccgtctgcattttgtggagctgggctccggccctgctgtgtgcctctgccatggatttcccgagagttggtattcttggaggtaccagatccctgctctggcccaggcaggttaccgggtcctagctatggacatgaaaggctatggagagtcatctgctcctcccgaaatagaagaatattgcatggaagtgttatgtaaggagatggtaaccttcctggataaactgggcctctctcaagcagtgttcattggccatgactggggtggcatgctggtgtggtacatggctctcttctaccccgagagagtgagggcggtggccagtttgaatactcccttcataccagcaaatcccaacatgtcccctttggagagtatcaaagccaacccagtatttgattaccagctctacttccaagaaccaggagtggctgaggctgaactggaacagaacctgagtcggactttcaaaagcctcttcagagcaagcgatgagagtgttttatccatgcataaagtctgtgaagcgggaggactttttgtaaatagcccagaagagcccagcctcagcaggatggtcactgaggaggaaatccagttctatgtgcagcagttcaagaagtctggtttcagaggtcctctaaactggtaccgaaacatggaaaggaactggaagtgggcttgcaaaagcttgggacggaagatcctgattccggccctgatggtcacggcggagaaggacttcgtgctcgttcctcagatgtcccagcacatggaggactggattccccacctgaaaaggggacacattgaggactgtgggcactggacacagatggacaagccaaccgaggtgaatcagatcctcattaagtggctggattctgatgcccggaacccaccggtggtctcaaagatgtagaacgcagcgtgtgcccacgctcagcaggtgtgccatccttccacctgctggggcaccattcttagtatacagaggtggccttacacacatcttgcatggatggcagcattgttctgaaggggtttgcagaaaaaaaagattttctttacataaagtgaatcaaatttgacattattttagatcccagagaaatcaggtgtgattagttctccaggcatgaatgcatcgtccctttatctgtaagaacccttagtgtcctgtagggggacagaatggggtggccaggtggtgatttctctttgaccaatgcatagtttggcagaaaaatcagccgttcatttagaagaatcttagcagagattgggatgccttactcaataaagctaagatgactatg

SEQ ID NO: 130271 - DNA, 574 bp, Homo sapiens
  Payload ID: 5490
  Gene Symbol: EPHX2
  Gene Name: epoxide hydrolase 2, cytoplasmic
  ENST ID: ENST00000518328
  CDS Start-End: 100-574
tccaagtccagcaagttcgcagggagctgtcagtccgtccaggaaggcccgggcctgggttagctgcgtgtccgggtgctaggctgcagacccgccgccatgacgctgcgcgcggccgtcttcgaccttgacggggtgctggcgctgccagcggtgttcggcgtcctcggccgcacggaggaggccctggcgctgcccagaggacttctgaatgatgctttccagaaagggggaccagagggtgccactacccggcttatgaaaggagagatcacactttcccagtggataccactcatggaagaaaactgcaggaagtgctccgagaccgctaaagtctgcctccccaagaatttctccataaaagaaatctttgacaaggcgatttcagccagaaagatcaaccgccccatgctccaggcagctctcatgctcaggaagaaaggattcactactgccatcctcaccaacacctggctggacgaccgtgctgagagagatggcctggcccagctgatgtgtgagctgaagatgcactttgacttcctgatagagtcgtgtcaggtgggaatgg

SEQ ID NO: 130272 - DNA, 1822 bp, Homo sapiens
  Payload ID: 5491
  Gene Symbol: EPHX3
  Gene Name: epoxide hydrolase 3
  Uniprot ID: Q9H6B9
  ENST ID: ENST00000221730
  CDS Start-End: 222-1304
cctgtcgcgcccaggtgtttacctggcactcaggtgagtggtgcgctctggctgttttctgtcggagccgcccgcctcttccttcagcgcgtcccacaaatcccgacggcacggaggggccccaggccaagggcgatgggcccctgagccctgacaccgcttcgccgctgctgcaggtgcccctggccggcagcgccgccgtggtcccggagcgcggcgacatgccggagctggtggtgaccgcgctgctggcgccgtcgcgcctgtcgctgaagctgctgcgcgccttcatgtggagcctggtgttctcggtggcgctggtggccgcggcggtctacggctgcatagcgctcacgcacgtgctgtgccggccccggcgcggctgctgcgggcgccgtcggagcgcgtcccccgcctgcctgagcgacccctcgctgggtgagcacggtttcctgaacctcaagagctcgggcctgcgtctgcactatgtctcggctggacgaggtaacggacccctcatgctgtttctgcacggcttccctgagaactggttctcctggcgttaccagctccgggagttccagagccgcttccatgttgtggctgtggacttgcgaggctatggcccctcggatgcacctcgggatgtggactgctacacaatcgacctgctgctggtggacatcaaagatgtcatcctaggcctgggttactcgaagtgcatccttgtggcccatgactggggtgccctccttgcctggcatttctccatctactacccatccctggtcgagcggatggttgtggtcagtggtgcccccatgtcggtgtaccaagactattccctgcaccacatcagccagttcttccgttcccactacatgttcctgttccagctgccctggctgcccgagaagctgctgtctatgtctgactttcagattctgaagaccaccctcacccaccgcaagacaggcatcccatgcttgacccccagcgagctcgaggccttcctttataacttctcacagcctggtggcctcactgggcccctcaactactaccgaaacctcttcaggaacttccccctggaaccccaggagctgaccacacccacattgctgctgtggggggagaaggacacttacttggagctggggctggtggaagccatcggcagccgctttgtgccgggccgcttggaggcccacatcctgccaggcatagggcattggatcccacagagcaacccccaggagatgcaccagtacatgtgggccttcttgcaagacctgctggactagtggtccttgctggcctgcccaggaggcatggatactcaggaaggaacacacacccattatctgtgtgtgcctgggagtccatacaatgtccatacatgggtgaactcttgaatcgctcataggcatgggactcctggatcccacacaagcgcacctatgggtgcctcgggacacaccaacccctatactcacacacaggcatggatgcatgtgtgtgtaacaaacactttgaccctgggaactgggtatacctctcttccagtggagccagatgccgagaccgagtgtcccacctcctcccttcctggggcctcactctgcgctttgccaaagtcgcttctctgccatagctgcacagaccttaaaccctgaccttcctgtccctgccttcgacctcctgcctgggtcttcagctcagtgctactctgaatacaatactgctgaccacatttggctacttcagcttaaatgtatgttaattgaaatgaaatacaatgaaaatgcagtgctcagtccca

SEQ ID NO: 130273 - DNA, 1771 bp, Homo sapiens
  Payload ID: 5491
  Gene Symbol: EPHX3
  Gene Name: epoxide hydrolase 3
  Uniprot ID: Q9H6B9
  ENST ID: ENST00000435261
  CDS Start-End: 174-1256
ataagccaggcccaccattccaactctttctcctttttggcttgtaggccgcacctactctgcatatgccccgcccctcactccaggtgtcgcccacttaactgaagatccaggatcccctccttaaggtgcccctggccggcagcgccgccgtggtcccggagcgcggcgacatgccggagctggtggtgaccgcgctgctggcgccgtcgcgcctgtcgctgaagctgctgcgcgccttcatgtggagcctggtgttctcggtggcgctggtggccgcggcggtctacggctgcatagcgctcacgcacgtgctgtgccggccccggcgcggctgctgcgggcgccgtcggagcgcgtcccccgcctgcctgagcgacccctcgctgggtgagcacggtttcctgaacctcaagagctcgggcctgcgtctgcactatgtctcggctggacgaggtaacggacccctcatgctgtttctgcacggcttccctgagaactggttctcctggcgttaccagctccgggagttccagagccgcttccatgttgtggctgtggacttgcgaggctatggcccctcggatgcacctcgggatgtggactgctacacaatcgacctgctgctggtggacatcaaagatgtcatcctaggcctgggttactcgaagtgcatccttgtggcccatgactggggtgccctccttgcctggcatttctccatctactacccatccctggtcgagcggatggttgtggtcagtggtgcccccatgtcggtgtaccaagactattccctgcaccacatcagccagttcttccgttcccactacatgttcctgttccagctgccctggctgcccgagaagctgctgtctatgtctgactttcagattctgaagaccaccctcacccaccgcaagacaggcatcccatgcttgacccccagcgagctcgaggccttcctttataacttctcacagcctggtggcctcactgggcccctcaactactaccgaaacctcttcaggaacttccccctggaaccccaggagctgaccacacccacattgctgctgtggggggagaaggacacttacttggagctggggctggtggaagccatcggcagccgctttgtgccgggccgcttggaggcccacatcctgccaggcatagggcattggatcccacagagcaacccccaggagatgcaccagtacatgtgggccttcttgcaagacctgctggactagtggtccttgctggcctgcccaggaggcatggatactcaggaaggaacacacacccattatctgtgtgtgcctgggagtccatacaatgtccatacatgggtgaactcttgaatcgctcataggcatgggactcctggatcccacacaagcgcacctatgggtgcctcgggacacaccaacccctatactcacacacaggcatggatgcatgtgtgtgtaacaaacactttgaccctgggaactgggtatacctctcttccagtggagccagatgccgagaccgagtgtcccacctcctcccttcctggggcctcactctgcgctttgccaaagtcgcttctctgccatagctgcacagaccttaaaccctgaccttcctgtccctgccttcgacctcctgcctgggtcttcagctcagtgctactctgaatacaatactgctgaccacatttggctacttcagcttaaatgtatgttaattgaaatgaaatacaatgaaaatgcagtgctcagtc

SEQ ID NO: 130274 - DNA, 550 bp, Homo sapiens
  Payload ID: 5491
  Gene Symbol: EPHX3
  Gene Name: epoxide hydrolase 3
  ENST ID: ENST00000594042
  CDS Start-End: 174-550
ataagccaggcccaccattccaactctttctcctttttggcttgtaggccgcacctactctgcatatgccccgcccctcactccaggtgtcgcccacttaactgaagatccaggatcccctccttaaggtgcccctggccggcagcgccgccgtggtcccggagcgcggcgacatgccggagctggtggtgaccgcgctgctggcgccgtcgcgcctgtcgctgaagctgctgcgcgccttcatgtggagcctggtgttctcggtggcgctggtggccgcggcggtctacggctgcatagcgctcacgcacgtgctgtgccggccccggcgcggctgctgcgggcgccgtcggagcgcgtcccccgcctgcctgagcgacccctcgctgggtgagcacggtttcctgaacctcaagagctcgggcctgcgtctgcactatgtctcggctggacgaggtaacggacccctcatgctgtttctgcacggcttccctgagaactggttctcctggcgttaccagctccgggagttccagagccgcttccatgt

SEQ ID NO: 130275 - DNA, 1805 bp, Homo sapiens
  Payload ID: 5491
  Gene Symbol: EPHX3
  Gene Name: epoxide hydrolase 3
  Uniprot ID: Q9H6B9
  ENST ID: ENST00000602233
  CDS Start-End: 211-1293
acccgccgttggaaccacagctgggtgaagtcagtgctgctaggtctttggagccagaccgaagggagggtcgcgcgcccctgggccgcacctactctgcatatgccccgcccctcactccaggtgtcgcccacttaactgaagatccaggatcccctccttaaggtgcccctggccggcagcgccgccgtggtcccggagcgcggcgacatgccggagctggtggtgaccgcgctgctggcgccgtcgcgcctgtcgctgaagctgctgcgcgccttcatgtggagcctggtgttctcggtggcgctggtggccgcggcggtctacggctgcatagcgctcacgcacgtgctgtgccggccccggcgcggctgctgcgggcgccgtcggagcgcgtcccccgcctgcctgagcgacccctcgctgggtgagcacggtttcctgaacctcaagagctcgggcctgcgtctgcactatgtctcggctggacgaggtaacggacccctcatgctgtttctgcacggcttccctgagaactggttctcctggcgttaccagctccgggagttccagagccgcttccatgttgtggctgtggacttgcgaggctatggcccctcggatgcacctcgggatgtggactgctacacaatcgacctgctgctggtggacatcaaagatgtcatcctaggcctgggttactcgaagtgcatccttgtggcccatgactggggtgccctccttgcctggcatttctccatctactacccatccctggtcgagcggatggttgtggtcagtggtgcccccatgtcggtgtaccaagactattccctgcaccacatcagccagttcttccgttcccactacatgttcctgttccagctgccctggctgcccgagaagctgctgtctatgtctgactttcagattctgaagaccaccctcacccaccgcaagacaggcatcccatgcttgacccccagcgagctcgaggccttcctttataacttctcacagcctggtggcctcactgggcccctcaactactaccgaaacctcttcaggaacttccccctggaaccccaggagctgaccacacccacattgctgctgtggggggagaaggacacttacttggagctggggctggtggaagccatcggcagccgctttgtgccgggccgcttggaggcccacatcctgccaggcatagggcattggatcccacagagcaacccccaggagatgcaccagtacatgtgggccttcttgcaagacctgctggactagtggtccttgctggcctgcccaggaggcatggatactcaggaaggaacacacacccattatctgtgtgtgcctgggagtccatacaatgtccatacatgggtgaactcttgaatcgctcataggcatgggactcctggatcccacacaagcgcacctatgggtgcctcgggacacaccaacccctatactcacacacaggcatggatgcatgtgtgtgtaacaaacactttgaccctgggaactgggtatacctctcttccagtggagccagatgccgagaccgagtgtcccacctcctcccttcctggggcctcactctgcgctttgccaaagtcgcttctctgccatagctgcacagaccttaaaccctgaccttcctgtccctgccttcgacctcctgcctgggtcttcagctcagtgctactctgaatacaatactgctgaccacatttggctacttcagcttaaatgtatgttaattgaaatgaaatacaatgaaaatgcagtgctca

SEQ ID NO: 130276 - DNA, 1437 bp, Homo sapiens
  Payload ID: 5492
  Gene Symbol: EPHX4
  Gene Name:: epoxide hydrolase 4
  Uniprot ID: Q8IUS5
  ENST ID: ENST00000370383
  CDS Start-End: 99-1187
ggcgcgcgtcgagaggcgacggcgggctggcctggcgcgctgcggcgctcgctcacccgctcccgaggaagggcagtgggccccgccgccgcctcccaatggcgaggctgcgggattgcctgccccgcctgatgctcacgctccggtccctgctcttctggtccctggtctactgctactgcgggctctgcgcctccatccacctgctcaaacttttgtggagcctcggcaaggggccggcgcagaccttccggcggcccgcccgggagcaccctcccgcgtgcctgagcgacccctccttgggcacccactgctacgtgcggatcaaggattcagggttaagatttcactatgttgctgctggagaaagaggcaaaccacttatgctgctgcttcatggatttccagaattctggtattcttggcgttaccaactgagagaatttaaaagtgaatatcgagttgtagcactggatttgagaggttatggagaaacagatgctcccattcatcgacagaattataaattggattgtctaattacagatataaaggatattttagattctttagggtatagcaaatgtgttcttattggccatgactgggggggcatgattgcttggctaattgccatctgttatcctgaaatggtgatgaagcttattgttattaacttccctcatccaaatgtatttacagaatatattttacgacaccctgctcagctgttgaaatccagttattattacttcttccaaataccatggttcccagaatttatgttctcaataaatgatttcaaggttttgaaacatctgtttaccagtcacagcactggcattggaagaaaaggatgccaattaacaacagaggatcttgaagcttatatttatgtcttttctcagcctggagcattaagtggcccaattaaccattaccgaaatatcttcagctgcctgcctctcaaacatcacatggtgaccactccaacactactactgtggggagagaatgacgcattcatggaggttgagatggctgaagtcacaaagatttatgttaaaaactatttcaggctaactattttgtcagaagccagtcattggcttcagcaagaccaacctgacatagtgaacaaattgatatggacatttctaaaagaagaaacaagaaaaaaagattgacttttctttatcttctatgaagggtctgtaatgaaatctctaaataatttttaaaaattgttcatcaacttctttatgttttattagaaaaaaactgttttaatgtgctttatcataaataaatatcctgacaaatggtattgaaaaaaatctgagatcatgtgaacatataatacaatgttgattttcttctggtgtattttgcacagacaagcatctgccttaaaatatatacacttgtacaaaaagg

SEQ ID NO: 130277 - DNA, 1156 bp, Homo sapiens
  Payload ID: 5493
  Gene Symbol: EPPIN-WFDC6
  Gene Name: EPPIN-WFDC6 readthrough
  Uniprot ID: O95925
  ENST ID: ENST00000504988
  CDS Start-End: 70-609
tatatccaaggtgcagcagctgagcattccaaattcgggaaccaccagaaaggctggcctctcttcaacatgggatcttctggacttttgagcctcctggtgctattcgtcctcttagcgaatgtccagggacctggtctgactgattggttatttcccaggagatgtcccaaaatcagagaagaatgtgaattccaagaaagggatgtgtgtacaaaggacagacaatgccaggacaacaagaagtgttgtgtcttcagctgcggaaaaaaatgtttagatctcaaacaagatgtatgcgaaatgccaaaagaaactggcccctgcctggcttattttcttcattggtggtatgacaagaaagataatacttgctccatgtttgtctatggtggctgccagggaaacaataacaacttccaatccaaagccaactgcctgaacacctgcaagaataaacagccgtgtcccaaaatcaaagtggaatgcgaagtggaagaaatagaccagtgtaccaaacccagagattgcccagaaaacatgaagtgttgcccgttcagccgtggaaagaaatgtttagacttcagaaaggcctctctgtctacataaatccaggatgccttccctgaccaccttagaccgcctacactctttcttctctgcccatattattgagctctaaagaagatcatcaaggaccattcgttcattctattcattcaacaaatattgattggtgcccctgacacccatgatgggttccacttgctcattgtggccaggaaggtcagaaaagtttttctgggaaagagatccatgatttaagatctgaaagatgagtacttagaccaaaaatgggaagaaatagcctttcaggccagataataggatgtgcaaaggctctgtggcaggaggcaggatgttcaggtctagaaaggctagaaagcagagagtgagcaagagacaagaaacaggaaactggtagtgtatattcagggcaacttgaatctgtattcccaagtggccatcctcaagttttggggtcaaataaatgccctacttaatgatattttctgaatcttgttactttaggttgacatacctttcaagacaataactaggttttcagtgctttgataaaacctcaaatgtgtgg

SEQ ID NO: 130278 - DNA, 2536 bp, Homo sapiens
  Payload ID: 5494
  Gene Symbol: EPS8L1
  Gene Name: EPS8-like 1
  Uniprot ID: Q8TE68
  ENST ID: ENST00000201647
  CDS Start-End: 57-2228
gcagagcctgagcaggcagggcacctccaggtgggcaggagctaccactcagcaccatgagcaccgccacaggcccagaagctgccccaaagccaagcgccaagtctatctatgagcagaggaagcgttactccacagttgttatggctgatgtatcccagtacccagtcaatcacctggtgacgttctgcctgggtgaggacgatggcgtgcataccgtggaggatgcctccaggaagttggccgtcatggatagccagggccgagtctgggcacaggagatgctgctgcgagtgtctcccgaccatgtcacgctgctcgacccggcctccaaggaggagctggagtcgtacccactgggcgccatcgtgcgctgtgacgcggtgatgccacccggcaggagccgctcgttgctgctgctcgtgtgccaggaacccgagcgcgcgcagcccgacgtgcacttcttccagggcctgcgcctcggggcggagctgatccgagaggacatccagggggctctgcacaattaccgctcgggccgcggggagcgcagggcggcggcgctcagggccacgcaggaggagttgcagcgcgaccgctcgcccgccgctgagaccccgcccctgcagcgccgcccgtcagtccgcgcagtgatcagcaccgtagagcggggcgcgggccgcggacgaccccaggcgaagcccattcccgaggcagaggaggcgcagaggcctgagccggtggggacctcgagcaacgctgactcggcctccccggacctgggtccccggggtcctgacctggcggttctgcaggcggagcgggaagtggacatcctgaaccacgtgttcgacgacgtagagagctttgtatcgaggctgcagaagtcggcggaggcggccagggtgctggagcaccgggaacgcggccgcaggagccggcgccgggcggctggggagggcttgctgacgctgcgggccaagccgccctcggaggccgagtacaccgacgtgctgcagaagatcaagtacgccttcagcctgctggcccggctgcgcggcaacatcgccgacccctcctctccggagctgttgcacttccttttcgggcctctgcagatgattgtgaacacgtcgggggggccggagttcgcgagcagtgtgcggcggccgcatctgacatcggatgccgtggcgctgctgcgggacaacgtcactccacgtgaaaacgagctctggacctcgctgggggactcgtggacccgccccgggctggagctgtccccggaggagggacccccatacagacccgagttcttcagcggctgggagccgccggtcactgacccgcagagccgcgcctgggaggacccagttgagaaacagctacagcacgagcggaggcgccggcagcaaagcgccccccaggtcgctgtcaatggtcaccgagacttggagccagaatctgagcctcagctggagtcagagacagcaggaaaatgggtcctgtgtaattatgacttccaggcccgcaacagcagtgagctgtcggtcaagcagcgggacgtactggaggtcctggatgacagtcgtaagtggtggaaggttcgggacccagcggggcaggagggatatgtgccctacaacatcctgacaccctaccccggaccccggctgcaccacagccaaagccctgcccgcagcctgaacagcactcctcctccaccaccagccccagccccggccccacctccagctctggctcggccccgctgggacaggccccgctgggacagctgcgatagcctcaacggcttggaccccagcgagaaggagaaattctcccagatgctcatcgtcaacgaggaactgcaggcgcgcctggcccagggccgctcgggaccgagccgcgcagtcccagggccccgcgccccggaaccgcagctcagcccgggctcggacgcctccgaggtccgcgcctggctgcaggccaagggctttagctccgggaccgtggacgcgctgggtgtgctgaccggggcgcagcttttctcgctgcagaaggaggagctgcgggcggtgagccccgaggagggggcacgtgtgtacagccaggtcaccgtgcagcgctcgctgctggaggacaaagagaaagtgtcagagctggaggcagtgatggagaagcaaaagaagaaggtggaaggcgaggtggaaatggaggtcatttgacctgccaggcgcccttcgcaaagagtgacgaggccccgtgggagaacggactcctcagactctccccaatagcggaagtcgatcttctgaaggatggccaatctgctccggccctggtcttcccccatcccggtggacagacttaacgatccttgctgcagtccctccggagaggatctggactggctgggagtggggagggcgtggagacagtctacggaaagcgctagcagacccccgagagggtgcagtggagccctgagcattgtaatatgcggcccagcctataaacagcctccgtgcttagc

SEQ ID NO: 130279 - DNA, 2198 bp, Homo sapiens
  Payload ID: 5494
  Gene Symbol: EPS8L1
  Gene Name: EPS8-like 1
  Uniprot ID: Q8TE68
  ENST ID: ENST00000245618
  CDS Start-End: 103-1893
agagcaaggaagggcaggggacctgggaaggaagttctggaaggcagtggggtttgagattggacccagggtcaagatagaacatgaaggtgggatgaggacatgaacagaacatggccaagaaggatctgggggagcagccaggacgaggcggagctgatccgagaggacatccagggggctctgcacaattaccgctcgggccgcggggagcgcagggcggcggcgctcagggccacgcaggaggagttgcagcgcgaccgctcgcccgccgctgagaccccgcccctgcagcgccgcccgtcagtccgcgcagtgatcagcaccgtagagcggggcgcgggccgcggacgaccccaggcgaagcccattcccgaggcagaggaggcgcagaggcctgagccggtggggacctcgagcaacgctgactcggcctccccggacctgggtccccggggtcctgacctggcggttctgcaggcggagcgggaagtggacatcctgaaccacgtgttcgacgacgtagagagctttgtatcgaggctgcagaagtcggcggaggcggccagggtgctggagcaccgggaacgcggccgcaggagccggcgccgggcggctggggagggcttgctgacgctgcgggccaagccgccctcggaggccgagtacaccgacgtgctgcagaagatcaagtacgccttcagcctgctggcccggctgcgcggcaacatcgccgacccctcctctccggagctgttgcacttccttttcgggcctctgcagatgattgtgaacacgtcgggggggccggagttcgcgagcagtgtgcggcggccgcatctgacatcggatgccgtggcgctgctgcgggacaacgtcactccacgtgaaaacgagctctggacctcgctgggggactcgtggacccgccccgggctggagctgtccccggaggagggacccccatacagacccgagttcttcagcggctgggagccgccggtcactgacccgcagagccgcgcctgggaggacccagttgagaaacagctacagcacgagcggaggcgccggcagcaaagcgccccccaggtcgctgtcaatggtcaccgagacttggagccagaatctgagcctcagctggagtcagagacagcaggaaaatgggtcctgtgtaattatgacttccaggcccgcaacagcagtgagctgtcggtcaagcagcgggacgtactggaggtcctggatgacagtcgtaagtggtggaaggttcgggacccagcggggcaggagggatatgtgccctacaacatcctgacaccctaccccggaccccggctgcaccacagccaaagccctgcccgcagcctgaacagcactcctcctccaccaccagccccagccccggccccacctccagctctggctcggccccgctgggacaggccccgctgggacagctgcgatagcctcaacggcttggaccccagcgagaaggagaaattctcccagatgctcatcgtcaacgaggaactgcaggcgcgcctggcccagggccgctcgggaccgagccgcgcagtcccagggccccgcgccccggaaccgcagctcagcccgggctcggacgcctccgaggtccgcgcctggctgcaggccaagggctttagctccgggaccgtggacgcgctgggtgtgctgaccggggcgcagcttttctcgctgcagaaggaggagctgcgggcggtgagccccgaggagggggcacgtgtgtacagccaggtcaccgtgcagcgctcgctgctggaggacaaagagaaagtgtcagagctggaggcagtgatggagaagcaaaagaagaaggtggaaggcgaggtggaaatggaggtcatttgacctgccaggcgcccttcgcaaagagtgacgaggccccgtgggagaacggactcctcagactctccccaatagcggaagtcgatcttctgaaggatggccaatctgctccggccctggtcttcccccatcccggtggacagacttaacgatccttgctgcagtccctccggagaggatctggactggctgggagtggggagggcgtggagacagtctacggaaagcgctagcagacccccgagagggtgcagtggagccctgagcattgtaatatgcggcccagcctataaacagcctccgtgctt

SEQ ID NO: 130280 - DNA, 2360 bp, Homo sapiens
  Payload ID: 5494
  Gene Symbol: EPS8L1
  Gene Name: EPS8-like 1
  ENST ID: ENST00000540810
  CDS Start-End: 147-2126
agagcctgagcaggcagggcacctccaggtgggcaggagctaccactcagcaccatgagcaccgccacaggcacctggtgacgttctgcctgggtgaggacgatggcgtgcataccgtggaggatgcctccaggaagttggccgtcatggatagccagggccgagtctgggcacaggagatgctgctgcgagtgtctcccgaccatgtcacgctgctcgacccggcctccaaggaggagctggagtcgtacccactgggcgccatcgtgcgctgtgacgcggtgatgccacccggcaggagccgctcgttgctgctgctcgtgtgccaggaacccgagcgcgcgcagcccgacgtgcacttcttccagggcctgcgcctcggggcggagctgatccgagaggacatccagggggctctgcacaattaccgctcgggccgcggggagcgcagggcggcggcgctcagggccacgcaggaggagttgcagcgcgaccgctcgcccgccgctgagaccccgcccctgcagcgccgcccgtcagtccgcgcagtgatcagcaccgtagagcggggcgcgggccgcggacgaccccaggcgaagcccattcccgaggcagaggaggcgcagaggcctgagccggtggggacctcgagcaacgctgactcggcctccccggacctgggtccccggggtcctgacctggcggttctgcaggcggagcgggaagtggacatcctgaaccacgtgttcgacgacgtagagagctttgtatcgaggctgcagaagtcggcggaggcggccagggtgctggagcaccgggaacgcggccgcaggagccggcgccgggcggctggggagggcttgctgacgctgcgggccaagccgccctcggaggccgagtacaccgacgtgctgcagaagatcaagtacgccttcagcctgctggcccggctgcgcggcaacatcgccgacccctcctctccggagctgttgcacttccttttcgggcctctgcagatgattgtgaacacgtcgggggggccggagttcgcgagcagtgtgcggcggccgcatctgacatcggatgccgtggcgctgctgcgggacaacgtcactccacgtgaaaacgagctctggacctcgctgggggactcgtggacccgccccgggctggagctgtccccggaggagggacccccatacagacccgagttcttcagcggctgggagccgccggtcactgacccgcagagccgcgcctgggaggacccagttgagaaacagctacagcacgagcggaggcgccggcagcaaagcgccccccaggtcgctgtcaatggtcaccgagacttggagccagaatctgagcctcagctggagtcagagacagcaggaaaatgggtcctgtgtaattatgacttccaggcccgcaacagcagtgagctgtcggtcaagcagcgggacgtactggaggtcctggatgacagtcgtaagtggtggaaggttcgggacccagcggggcaggagggatatgtgccctacaacatcctgacaccctaccccggaccccggctgcaccacagccaaagccctgcccgcagcctgaacagcactcctcctccaccaccagccccagccccggccccacctccagctctggctcggccccgctgggacaggccccgctgggacagctgcgatagcctcaacggcttggaccccagcgagaaggagaaattctcccagatgctcatcgtcaacgaggaactgcaggcgcgcctggcccagggccgctcgggaccgagccgcgcagtcccagggccccgcgccccggaaccgcagctcagcccgggctcggacgcctccgaggtccgcgcctggctgcaggccaagggctttagctccgggaccgtggacgcgctgggtgtgctgaccggggcgcagcttttctcgctgcagaaggaggagctgcgggcggtgagccccgaggagggggcacgtgtgtacagccaggtcaccgtgcagcgctcgctgctggaggacaaagagaaagtgtcagagctggaggcagtgatggagaagcaaaagaagaaggtggaaggcgaggtggaaatggaggtcatttgacctgccaggcgcccttcgcaaagagtgacgaggccccgtgggagaacggactcctcagactctccccaatagcggaagtcgatcttctgaaggatggccaatctgctccggccctggtcttcccccatcccggtggacagacttaacgatccttgctgcagtccctccggagaggatctggactggctgggagtggggagggcgtggagacagtctacggaaagcgctagcaga

SEQ ID NO: 130281 - DNA, 2343 bp, Homo sapiens
  Payload ID: 5494
  Gene Symbol: EPS8L1
  Gene Name: EPS8-like 1
  ENST ID: ENST00000587786
  CDS Start-End: 145-1431
aggaattagaggctcctactggccaggccttcacatgtttgctggctcccagggcacctccaggtgggcaggagctaccactcagcaccatgagcaccgccacaggcccagaagctgccccaaagccaagcgccaagtctatctatgcacctggtgacgttctgcctgggtgaggacgatggcgtgcataccgtggaggatgcctccaggaagttggccgtcatggatagccagggccgagtctgggcacaggagatgctgctgcgagtgtctcccgaccatgtcacgctgctcgacccggcctccaaggaggagctggagtcgtacccactgggcgccatcgtgcgctgtgacgcggtgatgccacccggcaggagccgctcgttgctgctgctcgtgtgccaggaacccgagcgcgcgcagcccgacgtgcacttcttccagggcctgcgcctcggggcggagctgatccgagaggacatccagggggctctgcacaattaccgctcgggccgcggggagcgcagggcggcggcgctcagggccacgcaggaggagttgcagcgcgaccgctcgcccgccgctgagaccccgcccctgcagcgccgcccgtcagtccgcgcagtgatcagcaccgtagagcggggcgcgggccgcggacgaccccaggcgaagcccattcccgaggcagaggaggcgcagaggcctgagccggtggggacctcgagcaacgctgactcggcctccccggacctgggtccccggggtcctgacctggcggttctgcaggcggagcgggaagtggacatcctgaaccacgtgttcgacgacgtagagagctttgtatcgaggctgcagaagtcggcggaggcggccagggtgctggagcaccgggaacgcggccgcaggagccggcgccgggcggctggggagggcttgctgacgctgcgggccaagccgccctcggaggccgagtacaccgacgtgctgcagaagatcaagtacgccttcagcctgctggcccggctgcgcggcaacatcgccgacccctcctctccggagctgttgcacttccttttcgggcctctgcagatgattgtgaacacgtcgggggggccggagttcgcgagcagtgtgcggcggccgcatctgacatcggatgccgtggcgctgctgcgggacaacgtcactccacgtgaaaacgagctctggacctcgctgggggactcgtggacccgccccgggctggagctgtccccggaggagggacccccatacagacccgagttcttcagcggctgggagccgccggtcactgacccgcagagccgcgcctgggaggacccagttgagaaacagctacagcacgagcggaggcgccggcagcaaagcgccccccaggtcgctgtcaatgggtgggtgagatggtgatggggcgggccggggctgggagagagggaggagcagggtgggagggggcgggacccagacttctggggctaagggagttgggaatggagacccggattcctgggcctaagggaggaagggggctgggagtgggtaaagtctgagaggttggatccctggatccccaaaaggctggaagaagccagtttgttttcccagggcctgggaagcaccatgcctgggctccctaggaggacagagccctggatattggaggggagaggctggggaattggacctttgggttttgaagaagagcccaagtctggtgcttgggatcctggagacccagaggagcaggcttgggacttcaagggcttgggggcaagtttctgggaaagttaggaagtggtagtatctctgggcccccgagaggggtaaaggctggacgattaaactcttggttttccagaggctctaatgcaattgtctaagtcgctgctgggtgtcggactgggttaaaaggtttgagggttaaaaggataagattgaagcttgagacctggactcctaggtccctgggggaggaaagaacattccaagtcatggttctaccaagcagtgggggctcagactctgggtcctgggggagggaaggaggtagatggactagaactctagggtccttgagcaaatagagggcagactggagggaagcaacgtgggaggagacgaaaacaaagcagtgaggctggaggagacaaaggggggtctgggtgagggcccgagcagagggtctcagcagggacagcgtgctgggagctgccggccccacacagggggtgccgcggccctgaagaccccccctctcccctgcacagtcaccgagacttggagccagaatctgagcctcagctggagtcagagacagca

SEQ ID NO: 130282 - DNA, 1407 bp, Homo sapiens
  Payload ID: 5494
  Gene Symbol: EPS8L1
  Gene Name: EPS8-like 1
  ENST ID: ENST00000588359
  CDS Start-End: 103-1332
agagcaaggaagggcaggggacctgggaaggaagttctggaaggcagtggggtttgagattggacccagggtcaagatagaacatgaaggtgggatgaggacatgaacagaacatggccaagaaggatctgggggagcagccaggacgaggtggggttcgcgagcagtgtgcggcggccgcatctgacatcggatgccgtggcgctgctgcgggacaacgtcactccacgtgaaaacgagctctggacctcgctgggggactcgtggacccgccccgggctggagctgtccccggaggagggacccccatacagacccgagttcttcagcggctgggagccgccggtcactgacccgcagagccgcgcctgggaggacccagttgagaaacagctacagcacgagcggaggcgccggcaggtgacccaagcgacacagcagggccgaggctgggaagtccgggggcgcggccggtccgcctggccccgcctgacccgactgtcttacttcctacagcaaagcgccccccaggtcgctgtcaatggtcaccgagacttggagccagaatctgagcctcagctggagtcagagacagcaggaaaatgggtcctgtgtaattatgacttccaggcccgcaacagcagtgagctgtcggtcaagcagcgggacgtactggaggtcctggatgacagtcgtaagtggtggaaggttcgggacccagcggggcaggagggatatgtgccctacaacatcctgacaccctaccccggaccccggctgcaccacagccaaagccctgcccgcagcctgaacagcactcctcctccaccaccagccccagccccggccccacctccagctctggctcggccccgctgggacaggccccgctgggacagctgcgatagcctcaacggcttggaccccagcgagaaggagaaattctcccagatgctcatcgtcaacgaggaactgcaggcgcgcctggcccagggccgctcgggaccgagccgcgcagtcccagggccccgcgccccggaaccgcagctcagcccgggctcggacgcctccgaggtccgcgcctggctgcaggccaagggctttagctccgggaccgtggacgcgctgggtgtgctgaccggggcgcagcttttctcgctgcagaaggaggagctgcgggcggtgagccccgaggagggggcacgtgtgtacagccaggtcaccgtgcagcgctcgctgctggaggacaaagagaaagtgtcagagctggaggcagtgatggagaagcaaaagaagaaggtggaaggcgaggtggaaatggaggtcatttgacctgccaggcgcccttcgcaaagagtgacgaggccccgtgggagaacggactcctcagactctccccaatagcgg

SEQ ID NO: 130283 - DNA, 2130 bp, Homo sapiens
  Payload ID: 5494
  Gene Symbol: EPS8L1
  Gene Name: EPS8-like 1
  ENST ID: ENST00000586329
  CDS Start-End: 179-1825
ccagaacacccctatcttctaggattgacactggctgtcaaactcatccttcaaggtgattcctggcctgccctcctcctccaggcagcctgtcctcctcctccaggcagcctgtcctgaccctcagcagcctctcctggccttggcagagcccctcgtgtcctcccttgcagcacgcatgggaagaaaggccatcgtcctcgccattgctaacaccagccttgcgtttcctctttgccagcacctggtgacgttctgcctgggtgaggacgatggcgtgcataccgtggaggatgcctccaggaagttggccgtcatggatagccagggccgagtctgggcacaggagatgctgctgcgagtgtctcccgaccatgtcacgctgctcgacccggcctccaaggaggagctggagtcgtacccactgggcgccatcgtgcgctgtgacgcggtgatgccacccggcaggagccgctcgttgctgctgctcgtgtgccaggaacccgagcgcgcgcagcccgacgtgcacttcttccagggcctgcgcctcggggcggagctgatccgagaggacatccagggggctctgcacaattaccgctcgggccgcggggagcgcagggcggcggcgctcagggccacgcaggaggagttgcagcgcgaccgctcgcccgccgctgagaccccgcccctgcagcgccgcccgtcagtccgcgcagtgatcagcaccgtagagcggggcgcgggccgcggacgaccccaggcgaagcccattcccgaggcagaggaggcgcagaggcctgagccggtggggacctcgagcaacgctgactcggcctccccggacctgggtccccggggtcctgacctggcggttctgcaggcggagcgggaagtggacatcctgaaccacgtgttcgacgacgtagagagctttgtatcgaggctgcagaagtcggcggaggcggccagggtgctggagcaccgggaacgcggccgcaggagccggcgccgggcggctggggagggcttgctgacgctgcgggccaagccgccctcggaggccgagtacaccgacgtgctgcagaagatcaagtacgccttcagcctgctggcccggctgcgcggcaacatcgccgacccctcctctccggagctgttgcacttccttttcgggcctctgcagatgattgtgaacacgtcgggggggccggagttcgcgagcagtgtgcggcggccgcatctgacatcggatgccgtggcgctgctgcgggacaacgtcactccacgtgaaaacgagctctggacctcgctgggggactcgtggacccgccccgggctggagctgtccccggaggagggacccccatacagacccgagttcttcagcggctgggagccgccggtcactgacccgcagagccgcgcctgggaggacccagttgagaaacagctacagcacgagcggaggcgccggcaggtgacccaagcgacacagcagggccgaggctgggaagtccgggggcgcggccggtccgcctggccccgcctgacccgactgtcttacttcctacagcaaagcgccccccaggtcgctgtcaatggtcaccgagacttggagccagaatctgagcctcagctggagtcagagacagcaggaaaatgggtcctgtgtaattatgacttccaggcccgcaacagcagtgagctgtcggtcaagcagcgggacgtactggaggacaaagagaaagtgtcagagctggaggcagtgatggagaagcaaaagaagaaggtggaaggcgaggtggaaatggaggtcatttgacctgccaggcgcccttcgcaaagagtgacgaggccccgtgggagaacggactcctcagactctccccaatagcggaagtcgatcttctgaaggatggccaatctgctccggccctggtcttcccccatcccggtggacagacttaacgatccttgctgcagtccctccggagaggatctggactggctgggagtggggagggcgtggagacagtctacggaaagcgctagcagacccccgagagggtgcagtggagccctgagcattgtaatatgcggcccagcctataaacagcctccgtgctt

SEQ ID NO: 130284 - DNA, 3148 bp, Homo sapiens
  Payload ID: 5495
  Gene Symbol: EPS8L2
  Gene Name: EPS8-like 2
  Uniprot ID: Q9H6S3
  ENST ID: ENST00000318562
  CDS Start-End: 255-2402
tcgggtgactccgcaacctgtcgctcaggttcctcctctcccggccccgccccggcccggccccgccgagcgtcccacccgcccgcgggagacctggcgccccggccgaggcgcgaacagacggacgcaccggcgagcgccgaggggacaggccgagcgcggggcgccggaggcaggtgtgggacaggcactggcctcagaccggggccacactgaggtctgcccttctcccgctggccgccacccaagacaccatgagccagtccggggccgtgagctgctgcccgggtgccaccaatggcagcctgggccggtccgacggtgtggccaagatgagccccaaggacctgtttgagcagaggaagaagtattccaactccaacgtcatcatgcacgagacctcgcagtaccacgtccagcacctggccacattcatcatggacaagagcgaagccatcacgtctgtggacgacgccatccggaagctggtgcagctgagctccaaggagaagatctggacccaggagatgctgctgcaggtgaacgaccagtcgctgcggctgctggacatcgagtcacaggaggagctggaagacttcccgctgcccacggtgcagcgcagccagacggtcctcaaccagctgcgctacccgtctgtgctgctgctcgtgtgccaggactcggagcagagcaagccggatgtccacttcttccactgcgatgaggtggaggcagagctggtgcacgaggacatcgagagcgcgttggccgactgccggctgggcaagaagatgcggccgcagaccctgaagggacaccaggagaagattcggcagcggcagtccatcctgcctcctccccagggcccggcgcccatccccttccagcaccgcggcggggattccccggaggccaagaatcgcgtgggcccgcaggtgccactcagcgagccaggtttccgccgtcgggagtcgcaggaggagccgcgggccgtgctggctcagaagatagagaaggagacgcaaatcctcaactgcgccctggacgacatcgagtggtttgtggcccggctgcagaaggcagccgaggctttcaagcagctgaaccagcggaaaaaggggaagaagaagggcaagaaggcgccagcagagggcgtcctcacactgcgggcacggcccccctctgagggcgagttcatcgactgcttccagaaaatcaagctggcgattaacttgctggcaaagctgcagaagcacatccagaaccccagcgccgcggagctcgtgcacttcctcttcgggcctctggacctgatcgtcaacacctgcagtggcccagacatcgcacgctccgtctcctgcccactgctctcccgagatgccgtggacttcctgcgcggccacctggtccctaaggagatgtcgctgtgggagtcactgggagagagctggatgcggccccgttccgagtggccgcgggagccacaggtgcccctctacgtgcccaagttccacagcggctgggagcctcctgtggatgtgctgcaggaggccccctgggaggtggaggggctggcgtctgcccccatcgaggaggtgagtccagtgagccgacagtccataagaaactcccagaagcacagccccacttcagagcccacccccccgggggatgccctaccaccagtcagctccccacatactcacaggggctaccagccaacaccagccatggccaagtacgtcaagatcctgtatgacttcacagcccgaaatgccaacgagctatcggtgctcaaggatgaggtcctagaggtgctggaggacggccggcagtggtggaagctgcgcagccgcagcggccaggcggggtacgtgccctgcaacatcctaggcgaggcgcgaccggaggacgccggcgccccgttcgagcaggccggtcagaagtactggggccccgccagcccgacccacaagctacccccaagcttcccggggaacaaagacgagctcatgcagcacatggacgaggtcaacgacgagctcatccggaaaatcagcaacatcagggcgcagccacagaggcacttccgcgtggagcgcagccagcccgtgagccagccgctcacctacgagtcgggtccggacgaggtccgcgcctggctggaagccaaggccttcagcccgcggatcgtggagaacctgggcatcctgaccgggccgcagctcttctccctcaacaaggaggagctgaagaaagtgtgcggcgaggagggcgtccgcgtgtacagccagctcaccatgcagaaggccttcctggagaagcagcaaagtgggtcggagctggaagaactcatgaacaagtttcattccatgaatcagaggaggggggaggacagctaggcccagctgccttgggctggggcctgcggaggggaagcccacccacaatgcatggagtattatttttatatgtgtatgtattttgtatcaaggacacggagggggtgtggtgctggctagaggtccctgcccctgtctggaggcacaacgcccatccttaggccaaacagtacccaaggcctcagcccacaccaagactaatctcagccaaacctgctgcttggtggtgccagccccttgtccaccttctcttgaggccacagaactccctggggctggggcctctttctctggcctcccctgtgcacctggggggtcctggcccctgtgatgctcccccatccccacccacttctacatccatccacaccccagggtgagctggagctccaggctggccaggctgaacctcgcacacacgcagagttctgctccctgaggggggcccgggaggggctccagcaggaggccgtgggtgccattcgggggaaagtgggggaacgacacacacttcacctgcaagggccgacaacgcaggggacaccgtgccggcttcagacactcccagcgcccactcttacaggcccaggactggagctttctctggccaagtttcaggccaatgatccccgcatggtgttgggggtgctggtgtgtcttggtgcctggacttgagtctcaccctacagatgagaggtggctgaggcaccagggctaagcaattaaaccagttaagtctcccagga

SEQ ID NO: 130285 - DNA, 582 bp, Homo sapiens
  Payload ID: 5495
  Gene Symbol: EPS8L2
  Gene Name: EPS8-like 2
  ENST ID: ENST00000531348
  CDS Start-End: 298-582
gctctggggcttggtgggggcaatccctgcgtccggagagcgctggtggtagggaggcttctcccggttctgtgagcagcaggaccctcccgagggcctgaccgtggaggtagcactgcacacccactccctgtgggccggagccaggaggcacttcctgggtgtcggagcccagaaggaaaccagtggccgggaagcaccagctgggtcagtctccaggtgtgggacaggcactggcctcagaccggggccacactgaggtctgcccttctcccgctggccgccacccaagacaccatgagccagtccggggccgtgagctgctgcccgggtgccaccaatggcagcctgggccggtccgacggtgtggccaagatgagccccaaggacctgtttgagcagaggaagaagtattccaactccaacgtcatcatgcacgagacctcgcagtaccacgtccagcacctggccacattcatcatggacaagagcgaagccatcacgtctgtggacgacgccatccggaagctggtgcagctgagctccaaggagaagatctggacccaggagatgctgctgcag

SEQ ID NO: 130286 - DNA, 474 bp, Homo sapiens
  Payload ID: 5495
  Gene Symbol: EPS8L2
  Gene Name: EPS8-like 2
  ENST ID: ENST00000534755
  CDS Start-End: 236-474
gagacctggcgccccggccgaggcgcgaacagacggacgcaccggcgagcgccgaggggacaggccgagcgcggggcgccggaggcagtccctcccctaggcttggctgctgccaggggttctgcgctggccacctggccgcatccctgccctcgaggtgtgggacaggcactggcctcagaccggggccacactgaggtctgcccttctcccgctggccgccacccaagacaccatgagccagtccggggccgtgagctgctgcccgggtgccaccaatggcagcctgggccggtccgacggtgtggccaagatgagccccaaggacctgtttgagcagaggaagaagtattccaactccaacgtcatcatgcacgagacctcgcagtaccacgtccagcacctggccacattcatcatggacaagagcgaagccatcacgtctgtggacgacgccatccggaagctggtgca

SEQ ID NO: 130287 - DNA, 704 bp, Homo sapiens
  Payload ID: 5495
  Gene Symbol: EPS8L2
  Gene Name: EPS8-like 2
  ENST ID: ENST00000530452
  CDS Start-End: 1-418
gcagcggcagtccatcctgcctcctccccagggcccggcgcccatccccttccagcaccgcggcggggattccccggaggccaagaatcgcgtgggcccgcaggtgccactcagcgagccaggtttccgccgtcgggagtcgcaggaggagccgcgggccgtgctggctcagaagatagagaaggagacgcaaatcctcaactgcgccctggacgacatcgagtggtttgtggcccggctgcagaaggcagccgaggctttcaagcagctgaaccagcggaaaaaggggaagaagaagggcaagaaggcgccagcagatcgtcaacacctgcagtggcccagacatcgcacgctccgtctcctgcccactgctctcccgagatgccgtggacttcctgcgcggccacctggtccctaaggagatgtcgctgtgggagtcactgggagagagctggatgcggccccgttccgagtggccgcgggagccacaggtgcccctctacgtgcccaagttccacagcggctgggagcctcctgtggatgtgctgcaggaggccccctgggaggtggaggggctggcgtctgcccccatcgaggaggtgagtccagtgagccgacagtccataagaaactcccagaagcacagccccacttcagagcccacccccccgggggatgccctaccaccagtcagctccccacat

SEQ ID NO: 130288 - DNA, 3844 bp, Homo sapiens
  Payload ID: 5495
  Gene Symbol: EPS8L2
  Gene Name: EPS8-like 2
  ENST ID: ENST00000526909
  CDS Start-End: 144-251
cgcgaacagacggacgcaccggcgagcgccgaggggacaggccgagcgcggggcgccggaggcaggtgtgggacaggcactggcctcagaccggggccacactgaggtctgcccttctcccgctggccgccacccaagacaccatgagccagtccggggccgtgagctgctgcccgggtgccaccaatggcagcctgggccggtccgacggtgtggccaagatgagccccaaggacctgtttggtgagtgaggtttgagaacgggctggacgtcacaggggagaaatgggcactgcatccaggtgggggacagctgctcctgccccacagctgtgcctggtctggcccaggggatctccgggtgcccagggaggcctctggaccctaatcaaccttccgaaagctcctggccactggatcccctcccccacacccgtaaggggagaggcctttactaataattcagggagcatcaatattgattccgctgcactcattgctgtaacctgatcacagcgaggttcaggcaggataagccgccaggtgtctgctccaggaggggggcctggccagcccccacctccccccactctgcccttccccagagacgaccctgccctctcgctagctagatgcacccttcacttatgtctttggacaaggtgcctagtctggaaagcgagaagacctgggagggcagggagagtgaagctggcagctctcagagtgggaagaagccgggctgggacccccttcctgtcccctcaccctccgggacagaaaccccccgggcacaggctgctggtccccactccactcagagcaagcccatcgccttctccgagctgcgtccttctccaagggggcttccctggagggagggagggggcttcctgcaggtcctgatttcacacccacatccttcctggtggccaagaggtccacggagcagcctccctccgcttgactccaccttcccttgtgggtccagtcccaactggacgggaggctgtgggtcctgcccgtcgggggagtgactggtgtctcccggttcagagcagaggaagaagtattccaactccaacgtcatcatgcacgagacctcgcagtaccacgtccagcacctggccacattcatcatggacaagagcgaagccatcacgtctgtggacgacgccatccggaagctggtgcagctgagctccaaggagaagatctggacccaggagatgctgctgcaggtgaacgaccagtcgctgcggctgctggacatcgagtcacaggaggagctggaagacttcccgctgcccacggtgcagcgcagccagacggtcctcaaccagctgcgctacccgtctgtgctgctgctcgtgtgccaggactcggagcagagcaagccggatgtccacttcttccactgcgatgaggtggaggcagagctggtgcacgaggacatcgagagcgcgttggccgactgccggctgggcaagaagatgcggccgcagaccctgaagggacaccaggagaagattcggcagcggcagtccatcctgcctcctccccagggcccggcgcccatccccttccagcaccgcggcggggattccccggaggccaagaatcgcgtgggcccgcaggtgccactcagcgagccaggtttccgccgtcgggagtcgcaggaggagccgcgggccgtgctggctcagaagatagagaaggagacgcaaatcctcaactgcgccctggacgacatcgagtggtttgtggcccggctgcagaaggcagccgaggctttcaagcagctgaaccagcggaaaaaggggaagaagaagggcaagaaggcgccagcagagggcgtcctcacactgcgggcacggcccccctctgagggcgagttcatcgactgcttccagaaaatcaagctggcgattaacttgctggcaaagctgcagaagcacatccagaaccccagcgccgcggagctcgtgcacttcctcttcgggcctctggacctgatcgtcaacacctgcagtggcccagacatcgcacgctccgtctcctgcccactgctctcccgagatgccgtggacttcctgcgcggccacctggtccctaaggagatgtcgctgtgggagtcactgggagagagctggatgcggccccgttccgagtggccgcgggagccacaggtgcccctctacgtgcccaagttccacagcggctgggagcctcctgtggatgtgctgcaggaggccccctgggaggtggaggggctggcgtctgcccccatcgaggaggtgagtccagtgagccgacagtccataagaaactcccagaagcacagccccacttcagagcccacccccccgggggatgccctaccaccagtcagctccccacatactcacaggggctaccagccaacaccagccatggccaagtacgtcaagatcctgtatgacttcacagcccgaaatgccaacgagctatcggtgctcaaggatgaggtcctagaggtgctggaggacggccggcagtggtggaagctgcgcagccgcagcggccaggcggggtacgtgccctgcaacatcctaggcgaggcgcgaccggaggacgccggcgccccgttcgagcaggccggtcagaagtactggggccccgccagcccgacccacaagctacccccaagcttcccggggaacaaagacgagctcatgcagcacatggacgaggtcaacgacgagctcatccggaaaatcagcaacatcagggcgcagccacagaggcacttccgcgtggagcgcagccagcccgtgagccagccgctcacctacgagtcgggtccggacgaggtccgcgcctggctggaagccaaggccttcagcccgcggatcgtggagaacctgggcatcctgaccgggccgcagctcttctccctcaacaaggaggagctgaagaaagtgtgcggcgaggagggcgtccgcgtgtacagccagctcaccatgcagaaggccttcctggagaagcagcaaagtgggtcggagctggaagaactcatgaacaagtttcattccatgaatcagaggaggggggaggacagctaggcccagctgccttgggctggggcctgcggaggggaagcccacccacaatgcatggagtattatttttatatgtgtatgtattttgtatcaaggacacggagggggtgtggtgctggctagaggtccctgcccctgtctggaggcacaacgcccatccttaggccaaacagtacccaaggcctcagcccacaccaagactaatctcagccaaacctgctgcttggtggtgccagccccttgtccaccttctcttgaggccacagaactccctggggctggggcctctttctctggcctcccctgtgcacctggggggtcctggcccctgtgatgctcccccatccccacccacttctacatccatccacaccccagggtgagctggagctccaggctggccaggctgaacctcgcacacacgcagagttctgctccctgaggggggcccgggaggggctccagcaggaggccgtgggtgccattcgggggaaagtgggggaacgacacacacttcacctgcaagggccgacaacgcaggggacaccgtgccggcttcagacactcccagcgcccactcttacaggcccaggactggagctttctctggccaagtttcaggccaatgatccccgcatggtgttgggggtgctggtgtgtcttggtgcctggacttgagtctcaccctacagatgagaggtggctgaggcaccagggctaagcaattaaaccagttaagtctc

SEQ ID NO: 130289 - DNA, 587 bp, Homo sapiens
  Payload ID: 5495
  Gene Symbol: EPS8L2
  Gene Name: EPS8-like 2
  ENST ID: ENST00000533500
  CDS Start-End: 337-587
acgcaccggcgagcgccgaggggacaggccgagcgcggggcgccggaggcagctctggggcttggtgggggcaatccctgcgtccggagagcgctggtggtagggaggcttctcccggttctgtgagcagcaggaccctcccgagggcctgaccgtggaggtagcactgcacacccactccctgtgggccggagccaggaggcacttcctgggtgtcggagcccagaaggaaaccagtggccgggaagcaccagctgggtgtgggacaggcactggcctcagaccggggccacactgaggtctgcccttctcccgctggccgccacccaagacaccatgagccagtccggggccgtgagctgctgcccgggtgccaccaatggcagcctgggccggtccgacggtgtggccaagatgagccccaaggacctgtttgagcagaggaagaagtattccaactccaacgtcatcatgcacgagacctcgcagtaccacgtccagcacctggccacattcatcatggacaagagcgaagccatcacgtctgtggacgacgccatccggaagctggtgcagctgagctccaa

SEQ ID NO: 130290 - DNA, 580 bp, Homo sapiens
  Payload ID: 5495
  Gene Symbol: EPS8L2
  Gene Name: EPS8-like 2
  ENST ID: ENST00000524763
  CDS Start-End: 265-580
atttgtggcaggtggggcaggctggtcacctggagcaggttcctcctctcccggccccgccccggcccggccccgccgagcgtcccacccgcccgcgggagacctggcgccccggccgaggcgcgaacagacggacgcaccggcgagcgccgaggggacaggccgagcgcggggcgccggaggcaggtgtgggacaggcactggcctcagaccggggccacactgaggtctgcccttctcccgctggccgccacccaagacaccatgagccagtccggggccgtgagctgctgcccgggtgccaccaatggcagcctgggccggtccgacggtgtggccaagatgagccccaaggacctgtttgagcagaggaagaagtattccaactccaacgtcatcatgcacgagacctcgcagtaccacgtccagcacctggccacattcatcatggacaagagcgaagccatcacgtctgtggacgacgccatccggaagctggtgcagctgagctccaaggagaagatctggacccaggagatgctgctgcaggtgaacgaccagtcgctgcggctgctggaca

SEQ ID NO: 130291 - DNA, 3266 bp, Homo sapiens
  Payload ID: 5495
  Gene Symbol: EPS8L2
  Gene Name: EPS8-like 2
  Uniprot ID: Q9H6S3
  ENST ID: ENST00000533256
  CDS Start-End: 376-2523
gtgactccgcaacctgtcgctcaggttcctcctctcccggccccgccccggcccggccccgccgagcgtcccacccgcccgcgggagacctggcgccccggccgaggcgcgaacagacggacgcaccggcgagcgccgaggggacaggccgagcgcggggcgccggaggcaggaccctcccgagggcctgaccgtggaggtagcactgcacacccactccctgtgggccggagccaggaggcacttcctgggtgtcggagcccagaaggaaaccagtggccgggaagcaccagctgggtgtgggacaggcactggcctcagaccggggccacactgaggtctgcccttctcccgctggccgccacccaagacaccatgagccagtccggggccgtgagctgctgcccgggtgccaccaatggcagcctgggccggtccgacggtgtggccaagatgagccccaaggacctgtttgagcagaggaagaagtattccaactccaacgtcatcatgcacgagacctcgcagtaccacgtccagcacctggccacattcatcatggacaagagcgaagccatcacgtctgtggacgacgccatccggaagctggtgcagctgagctccaaggagaagatctggacccaggagatgctgctgcaggtgaacgaccagtcgctgcggctgctggacatcgagtcacaggaggagctggaagacttcccgctgcccacggtgcagcgcagccagacggtcctcaaccagctgcgctacccgtctgtgctgctgctcgtgtgccaggactcggagcagagcaagccggatgtccacttcttccactgcgatgaggtggaggcagagctggtgcacgaggacatcgagagcgcgttggccgactgccggctgggcaagaagatgcggccgcagaccctgaagggacaccaggagaagattcggcagcggcagtccatcctgcctcctccccagggcccggcgcccatccccttccagcaccgcggcggggattccccggaggccaagaatcgcgtgggcccgcaggtgccactcagcgagccaggtttccgccgtcgggagtcgcaggaggagccgcgggccgtgctggctcagaagatagagaaggagacgcaaatcctcaactgcgccctggacgacatcgagtggtttgtggcccggctgcagaaggcagccgaggctttcaagcagctgaaccagcggaaaaaggggaagaagaagggcaagaaggcgccagcagagggcgtcctcacactgcgggcacggcccccctctgagggcgagttcatcgactgcttccagaaaatcaagctggcgattaacttgctggcaaagctgcagaagcacatccagaaccccagcgccgcggagctcgtgcacttcctcttcgggcctctggacctgatcgtcaacacctgcagtggcccagacatcgcacgctccgtctcctgcccactgctctcccgagatgccgtggacttcctgcgcggccacctggtccctaaggagatgtcgctgtgggagtcactgggagagagctggatgcggccccgttccgagtggccgcgggagccacaggtgcccctctacgtgcccaagttccacagcggctgggagcctcctgtggatgtgctgcaggaggccccctgggaggtggaggggctggcgtctgcccccatcgaggaggtgagtccagtgagccgacagtccataagaaactcccagaagcacagccccacttcagagcccacccccccgggggatgccctaccaccagtcagctccccacatactcacaggggctaccagccaacaccagccatggccaagtacgtcaagatcctgtatgacttcacagcccgaaatgccaacgagctatcggtgctcaaggatgaggtcctagaggtgctggaggacggccggcagtggtggaagctgcgcagccgcagcggccaggcggggtacgtgccctgcaacatcctaggcgaggcgcgaccggaggacgccggcgccccgttcgagcaggccggtcagaagtactggggccccgccagcccgacccacaagctacccccaagcttcccggggaacaaagacgagctcatgcagcacatggacgaggtcaacgacgagctcatccggaaaatcagcaacatcagggcgcagccacagaggcacttccgcgtggagcgcagccagcccgtgagccagccgctcacctacgagtcgggtccggacgaggtccgcgcctggctggaagccaaggccttcagcccgcggatcgtggagaacctgggcatcctgaccgggccgcagctcttctccctcaacaaggaggagctgaagaaagtgtgcggcgaggagggcgtccgcgtgtacagccagctcaccatgcagaaggccttcctggagaagcagcaaagtgggtcggagctggaagaactcatgaacaagtttcattccatgaatcagaggaggggggaggacagctaggcccagctgccttgggctggggcctgcggaggggaagcccacccacaatgcatggagtattatttttatatgtgtatgtattttgtatcaaggacacggagggggtgtggtgctggctagaggtccctgcccctgtctggaggcacaacgcccatccttaggccaaacagtacccaaggcctcagcccacaccaagactaatctcagccaaacctgctgcttggtggtgccagccccttgtccaccttctcttgaggccacagaactccctggggctggggcctctttctctggcctcccctgtgcacctggggggtcctggcccctgtgatgctcccccatccccacccacttctacatccatccacaccccagggtgagctggagctccaggctggccaggctgaacctcgcacacacgcagagttctgctccctgaggggggcccgggaggggctccagcaggaggccgtgggtgccattcgggggaaagtgggggaacgacacacacttcacctgcaagggccgacaacgcaggggacaccgtgccggcttcagacactcccagcgcccactcttacaggcccaggactggagctttctctggccaagtttcaggccaatgatccccgcatggtgttgggggtgctggtgtgtcttggtgcctggacttgagtctcaccctacagatgagaggtggctgaggcaccagggctaagcaattaaaccagttaagtctccca

SEQ ID NO: 130292 - DNA, 2469 bp, Homo sapiens
  Payload ID: 5495
  Gene Symbol: EPS8L2
  Gene Name: EPS8-like 2
  Uniprot ID: Q9H6S3
  ENST ID: ENST00000530636
  CDS Start-End: 252-2399
ggagagcgctggtggtagggaggcttctcccggttctgtgagcagcaggaccctcccgagggcctgaccgtggaggtagcactgcacacccactccctgtgggccggagccaggaggcacttcctgggtgtcggagcccagaaggaaaccagtggccgggaagcaccagctgggtgtgggacaggcactggcctcagaccggggccacactgaggtctgcccttctcccgctggccgccacccaagacaccatgagccagtccggggccgtgagctgctgcccgggtgccaccaatggcagcctgggccggtccgacggtgtggccaagatgagccccaaggacctgtttgagcagaggaagaagtattccaactccaacgtcatcatgcacgagacctcgcagtaccacgtccagcacctggccacattcatcatggacaagagcgaagccatcacgtctgtggacgacgccatccggaagctggtgcagctgagctccaaggagaagatctggacccaggagatgctgctgcaggtgaacgaccagtcgctgcggctgctggacatcgagtcacaggaggagctggaagacttcccgctgcccacggtgcagcgcagccagacggtcctcaaccagctgcgctacccgtctgtgctgctgctcgtgtgccaggactcggagcagagcaagccggatgtccacttcttccactgcgatgaggtggaggcagagctggtgcacgaggacatcgagagcgcgttggccgactgccggctgggcaagaagatgcggccgcagaccctgaagggacaccaggagaagattcggcagcggcagtccatcctgcctcctccccagggcccggcgcccatccccttccagcaccgcggcggggattccccggaggccaagaatcgcgtgggcccgcaggtgccactcagcgagccaggtttccgccgtcgggagtcgcaggaggagccgcgggccgtgctggctcagaagatagagaaggagacgcaaatcctcaactgcgccctggacgacatcgagtggtttgtggcccggctgcagaaggcagccgaggctttcaagcagctgaaccagcggaaaaaggggaagaagaagggcaagaaggcgccagcagagggcgtcctcacactgcgggcacggcccccctctgagggcgagttcatcgactgcttccagaaaatcaagctggcgattaacttgctggcaaagctgcagaagcacatccagaaccccagcgccgcggagctcgtgcacttcctcttcgggcctctggacctgatcgtcaacacctgcagtggcccagacatcgcacgctccgtctcctgcccactgctctcccgagatgccgtggacttcctgcgcggccacctggtccctaaggagatgtcgctgtgggagtcactgggagagagctggatgcggccccgttccgagtggccgcgggagccacaggtgcccctctacgtgcccaagttccacagcggctgggagcctcctgtggatgtgctgcaggaggccccctgggaggtggaggggctggcgtctgcccccatcgaggaggtgagtccagtgagccgacagtccataagaaactcccagaagcacagccccacttcagagcccacccccccgggggatgccctaccaccagtcagctccccacatactcacaggggctaccagccaacaccagccatggccaagtacgtcaagatcctgtatgacttcacagcccgaaatgccaacgagctatcggtgctcaaggatgaggtcctagaggtgctggaggacggccggcagtggtggaagctgcgcagccgcagcggccaggcggggtacgtgccctgcaacatcctaggcgaggcgcgaccggaggacgccggcgccccgttcgagcaggccggtcagaagtactggggccccgccagcccgacccacaagctacccccaagcttcccggggaacaaagacgagctcatgcagcacatggacgaggtcaacgacgagctcatccggaaaatcagcaacatcagggcgcagccacagaggcacttccgcgtggagcgcagccagcccgtgagccagccgctcacctacgagtcgggtccggacgaggtccgcgcctggctggaagccaaggccttcagcccgcggatcgtggagaacctgggcatcctgaccgggccgcagctcttctccctcaacaaggaggagctgaagaaagtgtgcggcgaggagggcgtccgcgtgtacagccagctcaccatgcagaaggccttcctggagaagcagcaaagtgggtcggagctggaagaactcatgaacaagtttcattccatgaatcagaggaggggggaggacagctaggcccagctgccttgggctggggcctgcggaggggaagcccacccacaatgcatggagtattatttttata

SEQ ID NO: 130293 - DNA, 2289 bp, Homo sapiens
  Payload ID: 5495
  Gene Symbol: EPS8L2
  Gene Name: EPS8-like 2
  Uniprot ID: Q9H6S3
  ENST ID: ENST00000526198
  CDS Start-End: 41-2236
gaggtctgcccttctcccgctggccgccacccaagacaccatgagccagtccggggccgtgagctgctgcccgggtgccaccaatggcagcctgggccggtccgacggtgtggccaagatgagccccaaggacctgtttgagcagaggaagaagtattccaactccaacgtcatcatgcacgagacctcgcagtaccacgtccagcacctggccacattcatcatggacaagagcgaagccatcacgtctgtggacgacgccatccggaagctggtgcagctgagctccaaggagaagatctggacccaggagatgctgctgcaggtgaacgaccagtcgctgcggctgctggacatcgagtcacagagtgcccagaccccgggtgcgagtcgtgtccgcgcgatgtacccgcaggaggagctggaagacttcccgctgcccacggtgcagcgcagccagacggtcctcaaccagctgcgctacccgtctgtgctgctgctcgtgtgccaggactcggagcagagcaagccggatgtccacttcttccactgcgatgaggtggaggcagagctggtgcacgaggacatcgagagcgcgttggccgactgccggctgggcaagaagatgcggccgcagaccctgaagggacaccaggagaagattcggcagcggcagtccatcctgcctcctccccagggcccggcgcccatccccttccagcaccgcggcggggattccccggaggccaagaatcgcgtgggcccgcaggtgccactcagcgagccaggtttccgccgtcgggagtcgcaggaggagccgcgggccgtgctggctcagaagatagagaaggagacgcaaatcctcaactgcgccctggacgacatcgagtggtttgtggcccggctgcagaaggcagccgaggctttcaagcagctgaaccagcggaaaaaggggaagaagaagggcaagaaggcgccagcagagggcgtcctcacactgcgggcacggcccccctctgagggcgagttcatcgactgcttccagaaaatcaagctggcgattaacttgctggcaaagctgcagaagcacatccagaaccccagcgccgcggagctcgtgcacttcctcttcgggcctctggacctgatcgtcaacacctgcagtggcccagacatcgcacgctccgtctcctgcccactgctctcccgagatgccgtggacttcctgcgcggccacctggtccctaaggagatgtcgctgtgggagtcactgggagagagctggatgcggccccgttccgagtggccgcgggagccacaggtgcccctctacgtgcccaagttccacagcggctgggagcctcctgtggatgtgctgcaggaggccccctgggaggtggaggggctggcgtctgcccccatcgaggaggtgagtccagtgagccgacagtccataagaaactcccagaagcacagccccacttcagagcccacccccccgggggatgccctaccaccagtcagctccccacatactcacaggggctaccagccaacaccagccatggccaagtacgtcaagatcctgtatgacttcacagcccgaaatgccaacgagctatcggtgctcaaggatgaggtcctagaggtgctggaggacggccggcagtggtggaagctgcgcagccgcagcggccaggcggggtacgtgccctgcaacatcctaggcgaggcgcgaccggaggacgccggcgccccgttcgagcaggccggtcagaagtactggggccccgccagcccgacccacaagctacccccaagcttcccggggaacaaagacgagctcatgcagcacatggacgaggtcaacgacgagctcatccggaaaatcagcaacatcagggcgcagccacagaggcacttccgcgtggagcgcagccagcccgtgagccagccgctcacctacgagtcgggtccggacgaggtccgcgcctggctggaagccaaggccttcagcccgcggatcgtggagaacctgggcatcctgaccgggccgcagctcttctccctcaacaaggaggagctgaagaaagtgtgcggcgaggagggcgtccgcgtgtacagccagctcaccatgcagaaggccttcctggagaagcagcaaagtgggtcggagctggaagaactcatgaacaagtttcattccatgaatcagaggaggggggaggacagctaggcccagctgccttgggctggggcctgcggaggggaagcccacccacaatgcat

SEQ ID NO: 130294 - DNA, 540 bp, Homo sapiens
  Payload ID: 5495
  Gene Symbol: EPS8L2
  Gene Name: EPS8-like 2
  ENST ID: ENST00000527199
  CDS Start-End: 465-540
attcccacccctacccaggaccggcagccggagccttgggtccctgcatgggcctggggcgccctgtgccccttcacctcgtcctcgtccagttgactgctgtggcagccggtgctacccgctgtgtccactgcaccctggccctgttctgagcggtcacagcagctggggagaagggccatcctggaagccgggcagatgaggacggaaccagacagtcccactgtggtgggcagaggttcctcctctcccggccccgccccggcccggccccgccgagcgtcccacccgcccgcgggagacctggcgccccggccgaggcgcgaacagacggacgcaccggcgagcgccgaggggacaggccgagcgcggggcgccggaggcaggtgtgggacaggcactggcctcagaccggggccacactgaggtctgcccttctcccgctggccgccacccaagacaccatgagccagtccggggccgtgagctgctgcccgggtgccaccaatggcagcctgggccggtccgacggtgtggcca

SEQ ID NO: 130295 - DNA, 2233 bp, Homo sapiens
  Payload ID: 5495
  Gene Symbol: EPS8L2
  Gene Name: EPS8-like 2
  ENST ID: ENST00000528770
  CDS Start-End: 1-503
agaagattcggcagcggcagtccatcctgcctcctccccagggcccggcgcccatccccttccagcaccgcggcggggattccccggaggccaagaatcgcgtgggcccgcaggtgccactcagcgagccaggtttccgccgtcgggagtcgcaggaggagccgcgggccgtgctggctcagaagatagagaaggagacgcaaatcctcaactgcgccctggacgacatcgagtggtttgtggcccggctgcagaaggcagccgaggctttcaagcagctgaaccagcggaaaaaggggaagaagaagggcaagaaggcgccagcaggcaaagctgcagaagcacatccagaaccccagcgccgcggagctcgtgcacttcctcttcgggcctctggacctgatcgtcaacacctgcagtggcccagacatcgcacgctccgtctcctgcccactgctctcccgagatgccgtggacttcctgcgcggccacctggtccctaaggagatgtcgctgtgggagtcactgggagagagctggatgcggccccgttccgagtggccgcgggagccacaggtgcccctctacgtgcccaagttccacagcggctgggagcctcctgtggatgtgctgcaggaggccccctgggaggtggaggggctggcgtctgcccccatcgaggaggtgagtccagtgagccgacagtccataagaaactcccagaagcacagccccacttcagagcccacccccccgggggatgccctaccaccagtcagctccccacatactcacaggggctaccagccaacaccagccatggccaagtacgtcaagatcctgtatgacttcacagcccgaaatgccaacgagctatcggtgctcaaggatgaggtcctagaggtgctggaggacggccggcagtggtggaagctgcgcagccgcagcggccaggcggggtacgtgccctgcaacatcctaggcgaggcgcgaccggaggacgccggcgccccgttcgagcaggccggtcagaagtactggggccccgccagcccgacccacaagctacccccaagcttcccggggaacaaagacgagctcatgcagcacatggacgaggtcaacgacgagctcatccggaaaatcagcaacatcagggcgcagccacagaggcacttccgcgtggagcgcagccagcccgtgagccagccgctcacctacgagtcgggtccggacgaggtccgcgcctggctggaagccaaggccttcagcccgcggatcgtggagaacctgggcatcctgaccgggccgcagctcttctccctcaacaaggaggagctgaagaaagtgtgcggcgaggagggcgtccgcgtgtacagccagctcaccatgcagaaggccttcctggagaagcagcaaagtgggtcggagctggaagaactcatgaacaagtttcattccatgaatcagaggaggggggaggacagctaggcccagctgccttgggctggggcctgcggaggggaagcccacccacaatgcatggagtattatttttatatgtgtatgtattttgtatcaaggacacggagggggtgtggtgctggctagaggtccctgcccctgtctggaggcacaacgcccatccttaggccaaacagtacccaaggcctcagcccacaccaagactaatctcagccaaacctgctgcttggtggtgccagccccttgtccaccttctcttgaggccacagaactccctggggctggggcctctttctctggcctcccctgtgcacctggggggtcctggcccctgtgatgctcccccatccccacccacttctacatccatccacaccccagggtgagctggagctccaggctggccaggctgaacctcgcacacacgcagagttctgctccctgaggggggcccgggaggggctccagcaggaggccgtgggtgccattcgggggaaagtgggggaacgacacacacttcacctgcaagggccgacaacgcaggggacaccgtgccggcttcagacactcccagcgcccactcttacaggcccaggactggagctttctctggccaagtttcaggccaatgatccccgcatggtgttgggggtgctggtgtgtcttggtgcctggacttgagtctcaccctacagatgagaggtggctgaggcaccagggctaagcaattaaaccagttaagtctccc

SEQ ID NO: 130296 - DNA, 3188 bp, Homo sapiens
  Payload ID: 5495
  Gene Symbol: EPS8L2
  Gene Name: EPS8-like 2
  Uniprot ID: Q9H6S3
  ENST ID: ENST00000614442
  CDS Start-End: 248-2443
actccgcaacctgtcgctcaggttcctcctctcccggccccgccccggcccggccccgccgagcgtcccacccgcccgcgggagacctggcgccccggccgaggcgcgaacagacggacgcaccggcgagcgccgaggggacaggccgagcgcggggcgccggaggcaggtgtgggacaggcactggcctcagaccggggccacactgaggtctgcccttctcccgctggccgccacccaagacaccatgagccagtccggggccgtgagctgctgcccgggtgccaccaatggcagcctgggccggtccgacggtgtggccaagatgagccccaaggacctgtttgagcagaggaagaagtattccaactccaacgtcatcatgcacgagacctcgcagtaccacgtccagcacctggccacattcatcatggacaagagcgaagccatcacgtctgtggacgacgccatccggaagctggtgcagctgagctccaaggagaagatctggacccaggagatgctgctgcaggtgaacgaccagtcgctgcggctgctggacatcgagtcacagagtgcccagaccccgggtgcgagtcgtgtccgcgcgatgtacccgcaggaggagctggaagacttcccgctgcccacggtgcagcgcagccagacggtcctcaaccagctgcgctacccgtctgtgctgctgctcgtgtgccaggactcggagcagagcaagccggatgtccacttcttccactgcgatgaggtggaggcagagctggtgcacgaggacatcgagagcgcgttggccgactgccggctgggcaagaagatgcggccgcagaccctgaagggacaccaggagaagattcggcagcggcagtccatcctgcctcctccccagggcccggcgcccatccccttccagcaccgcggcggggattccccggaggccaagaatcgcgtgggcccgcaggtgccactcagcgagccaggtttccgccgtcgggagtcgcaggaggagccgcgggccgtgctggctcagaagatagagaaggagacgcaaatcctcaactgcgccctggacgacatcgagtggtttgtggcccggctgcagaaggcagccgaggctttcaagcagctgaaccagcggaaaaaggggaagaagaagggcaagaaggcgccagcagagggcgtcctcacactgcgggcacggcccccctctgagggcgagttcatcgactgcttccagaaaatcaagctggcgattaacttgctggcaaagctgcagaagcacatccagaaccccagcgccgcggagctcgtgcacttcctcttcgggcctctggacctgatcgtcaacacctgcagtggcccagacatcgcacgctccgtctcctgcccactgctctcccgagatgccgtggacttcctgcgcggccacctggtccctaaggagatgtcgctgtgggagtcactgggagagagctggatgcggccccgttccgagtggccgcgggagccacaggtgcccctctacgtgcccaagttccacagcggctgggagcctcctgtggatgtgctgcaggaggccccctgggaggtggaggggctggcgtctgcccccatcgaggaggtgagtccagtgagccgacagtccataagaaactcccagaagcacagccccacttcagagcccacccccccgggggatgccctaccaccagtcagctccccacatactcacaggggctaccagccaacaccagccatggccaagtacgtcaagatcctgtatgacttcacagcccgaaatgccaacgagctatcggtgctcaaggatgaggtcctagaggtgctggaggacggccggcagtggtggaagctgcgcagccgcagcggccaggcggggtacgtgccctgcaacatcctaggcgaggcgcgaccggaggacgccggcgccccgttcgagcaggccggtcagaagtactggggccccgccagcccgacccacaagctacccccaagcttcccggggaacaaagacgagctcatgcagcacatggacgaggtcaacgacgagctcatccggaaaatcagcaacatcagggcgcagccacagaggcacttccgcgtggagcgcagccagcccgtgagccagccgctcacctacgagtcgggtccggacgaggtccgcgcctggctggaagccaaggccttcagcccgcggatcgtggagaacctgggcatcctgaccgggccgcagctcttctccctcaacaaggaggagctgaagaaagtgtgcggcgaggagggcgtccgcgtgtacagccagctcaccatgcagaaggccttcctggagaagcagcaaagtgggtcggagctggaagaactcatgaacaagtttcattccatgaatcagaggaggggggaggacagctaggcccagctgccttgggctggggcctgcggaggggaagcccacccacaatgcatggagtattatttttatatgtgtatgtattttgtatcaaggacacggagggggtgtggtgctggctagaggtccctgcccctgtctggaggcacaacgcccatccttaggccaaacagtacccaaggcctcagcccacaccaagactaatctcagccaaacctgctgcttggtggtgccagccccttgtccaccttctcttgaggccacagaactccctggggctggggcctctttctctggcctcccctgtgcacctggggggtcctggcccctgtgatgctcccccatccccacccacttctacatccatccacaccccagggtgagctggagctccaggctggccaggctgaacctcgcacacacgcagagttctgctccctgaggggggcccgggaggggctccagcaggaggccgtgggtgccattcgggggaaagtgggggaacgacacacacttcacctgcaagggccgacaacgcaggggacaccgtgccggcttcagacactcccagcgcccactcttacaggcccaggactggagctttctctggccaagtttcaggccaatgatccccgcatggtgttgggggtgctggtgtgtcttggtgcctggacttgagtctcaccctacagatgagaggtggctgaggcaccagggctaagcaattaaaccagttaagtctcccagg

SEQ ID NO: 130297 - DNA, 1633 bp, Homo sapiens
  Payload ID: 5495
  Gene Symbol: EPS8L2
  Gene Name: EPS8-like 2
  ENST ID: ENST00000610855
  CDS Start-End: 581-1279
cggcccccctctgagggcgagttcatcgactgcttccagaaaatcaagctggcgattaacttgctggtgggtccggtggccccagccctgccccactgtctgtgctgaggggagggtggaggccccgccccgccccggcacctgctcacttgttcccacccccaggcaaagctgcagaagcacatccagaaccccagcgccgcggagctcgtgcacttcctcttcgggcctctggacctggtgcctggggccgggcggcaggggcgcgcagggtgggggcccagaggcctctgcagcatctccccggggtcggggttggggcagcaggtgcccgccttgggcagcccggttcacgctgtgtggccactctccctggggtccaaagtcccttcccgagggccagcctgtggagctacgggggtgctgggccagggtctgtgggcctcagtcccctctgaacctcactgtgccccagatcgtcaacacctgcagtggcccagacatcgcacgctccgtctcctgcccactgctctcccgagatgccgtggacttcctgcgcggccacctggtccctaaggagatgtcgctgtgggagtcactgggagagagctggatgcggccccgttccgagtggccgcgggagccacaggtgcccctctacgtgcccaagttccacagcggctgggagcctcctgtggatgtgctgcaggaggccccctgggaggtggaggggctggcgtctgcccccatcgaggaggtgagtccagtgagccgacagtccataagaaactcccagaagcacagccccacttcagagcccacccccccgggggatgccctaccaccagtcagctccccacatactcacaggggctaccagccaacaccagccatggccaagtacgtcaagatcctgtatgacttcacagcccgaaatgccaacgagctatcggtgctcaaggatgaggtcctagaggtgctggaggacggccggcagtggtggaagctgcgcagccgcagcggccaggcggggtacgtgccctgcaacatcctaggcgaggcgcgaccggaggacgccggcgccccgttcgagcaggcaggccggagaagtactggggccccgccagcccgacccacaagctacccccaagcttcccggggaacaaagacgagctcatgcagcacatggacgaggtcaacgacgagctcatccggaaaatcagcaacatcagggcgcagccacagaggcacttccgcgtggagcgcagccagcccgtgagccagccgctcacctacgagtcgggtccggacgaggtccgcgcctggctggaagccaaggccttcagcccgcggatcgtggagaacctgggcatcctgaccgggccgcagctcttctccctcaacaaggaggagctgaagaaagtgtgcggcgaggagggcgtccgcgtgtacagccagctcaccatgcagaaggccttcctggagaagcagcaaagtgggtcggagctggaagaactcatgaacaagtttcattccatgaatcagaggaggggggaggacagctaggcccagctgccttgggctggggcctgcggaggggaagcccacccacaatgcatggagtattattttt

SEQ ID NO: 130298 - DNA, 2130 bp, Homo sapiens
  Payload ID: 5496
  Gene Symbol: EPS8L3
  Gene Name: EPS8-like 3
  Uniprot ID: Q8TE67
  ENST ID: ENST00000361852
  CDS Start-End: 128-1819
cactagcagagaagctgctgtccttccaccaccagcaccggaccacctgctccaagaccagcctcctggggggaccaggcacccggccttcactggcacccagggagccgtcctcagcagcgtcaacatgtcaaggcccagcagcagagccatttacttgcaccggaaggagtactcccagaacctcacctcagagcccaccctcctgcagcacagggtggagcacttgatgacatgcaagcaggggagtcagagagtccaggggcccgaggatgccttgcagaagctgttcgagatggatgcacagggccgggtgtggagccaagacttgatcctgcaggtcagggacggctggctgcagctgctggacattgagaccaaggaggagctggactcttaccgcctagacagcatccaggccatgaatgtggcgctcaacacatgttcctacaactccatcctgtccatcaccgtgcaggagccgggcctgccaggcactagcactctgctcttccagtgccaggaagtgggggcagagcgactgaagaccagcctgcagaaggctctggaggaagagctggagcaaagacctcgacttggaggccttcagccaggccaggacagatggagggggcctgctatggaaaggccgctccctatggagcaggcacgctatctggagccggggatccctccagaacagccccaccagaggaccctagagcacagcctcccaccatccccaaggcccctgccacgccacaccagtgcccgagaaccaagtgcctttactctgcctcctccaaggcggtcctcttcccccgaggacccagagagggacgaggaagtgctgaaccatgtcctaagggacattgagctgttcatgggaaagctggagaaggcccaggcaaagaccagcaggaagaagaaatttgggaaaaaaaacaaggaccagggaggtctcacccaggcacagtacattgactgcttccagaagatcaagcacagcttcaacctcctgggaaggctggccacctggctgaaggagacaagtgcccctgagctcgtacacatcctcttcaagtccctgaacttcatcctggccaggtgccctgaggctggcctagcagcccaagtgatctcacccctcctcacccctaaagctatcaacctgctacagtcctgtctaagcccacctgagagtaacctttggatggggttgggcccagcctggaccactagccgggccgactggacaggcgatgagcccctgccctaccaacccacattctcagatgactggcaacttccagagccctccagccaagcacccttaggataccaggaccctgtttcccttcggccctccagccccaaacctgcccagccagccctgaaaatgcaagtcttgtacgagtttgaagctaggaacccacgggaactgactgtggtccagggagagaagctggaggttctggaccacagcaagcggtggtggctggtgaagaatgaggcgggacggagcggctacattccaagcaacatcctggagcccctacagccggggacccctgggacccagggccagtcaccctctcgggttccaatgcttcgacttagctcgaggcctgaagaggtcacagactggctgcaggcagagaacttctccactgccacggtgaggacacttgggtccctgacggggagccagctacttcgcataagacctggggagctacagatgctatgtccacaggaggccccacgaatcctgtcccggctggaggctgtcagaaggatgctggggataagcccttaggcaccagcttagacacctccaagaaccaggccccgctgatgcaagatggcagatctgatacccattagagccccgagaattcctcttctggatcccagtttgcagcaaaccccacaccccagctcacacagcaaaaacaatggacaggcccagaggctgaagcaaacagtgtcccttctggctgtgttggagcctccccagtaaccacctatttattttacctctttcccaaacctggagcatttatgcctaggcttgtcaagaatctgttcagtccctctccttctcaataaaagcatcttcaagcttgt

SEQ ID NO: 130299 - DNA, 1971 bp, Homo sapiens
  Payload ID: 5496
  Gene Symbol: EPS8L3
  Gene Name: EPS8-like 3
  Uniprot ID: Q8TE67
  ENST ID: ENST00000361965
  CDS Start-End: 108-1889
tccttccaccaccagcaccggaccacctgctccaagaccagcctcctggggggaccaggcacccggccttcactggcacccagggagccgtcctcagcagcgtcaacatgtcaaggcccagcagcagagccatttacttgcaccggaaggagtactcccagaacctcacctcagagcccaccctcctgcagcacagggtggagcacttgatgacatgcaagcaggggagtcagagagtccaggggcccgaggatgccttgcagaagctgttcgagatggatgcacagggccgggtgtggagccaagacttgatcctgcaggtcagggacggctggctgcagctgctggacattgagaccaaggaggagctggactcttaccgcctagacagcatccaggccatgaatgtggcgctcaacacatgttcctacaactccatcctgtccatcaccgtgcaggagccgggcctgccaggcactagcactctgctcttccagtgccaggaagtgggggcagagcgactgaagaccagcctgcagaaggctctggaggaagagctggagcaaagacctcgacttggaggccttcagccaggccaggacagatggagggggcctgctatggaaaggccgctccctatggagcaggcacgctatctggagccggggatccctccagaacagccccaccagaggaccctagagcacagcctcccaccatccccaaggcccctgccacgccacaccagtgcccgagaaccaagtgcctttactctgcctcctccaaggcggtcctcttcccccgaggacccagagagggacgaggaagtgctgaaccatgtcctaagggacattgagctgttcatgggaaagctggagaaggcccaggcaaagaccagcaggaagaagaaatttgggaaaaaaaacaaggaccagggaggtctcacccaggcacagtacattgactgcttccagaagatcaagcacagcttcaacctcctgggaaggctggccacctggctgaaggagacaagtgcccctgagctcgtacacatcctcttcaagtccctgaacttcatcctggccaggtgccctgaggctggcctagcagcccaagtgatctcacccctcctcacccctaaagctatcaacctgctacagtcctgtctaagcccacctgagagtaacctttggatggggttgggcccagcctggaccactagccgggccgactggacaggcgatgagcccctgccctaccaacccacattctcagatgactggcaacttccagagccctccagccaagcacccttaggataccaggaccctgtttcccttcggcggggaagtcataggttagggagcacctcacactttcctcaggagaagacacacaaccatgaccctcagcctggggaccccaactccaggccctccagccccaaacctgcccagccagccctgaaaatgcaagtcttgtacgagtttgaagctaggaacccacgggaactgactgtggtccagggagagaagctggaggttctggaccacagcaagcggtggtggctggtgaagaatgaggcgggacggagcggctacattccaagcaacatcctggagcccctacagccggggacccctgggacccagggccagtcaccctctcgggttccaatgcttcgacttagctcgaggcctgaagaggtcacagactggctgcaggcagagaacttctccactgccacggtgaggacacttgggtccctgacggggagccagctacttcgcataagacctggggagctacagatgctatgtccacaggaggccccacgaatcctgtcccggctggaggctgtcagaaggatgctggggataagcccttaggcaccagcttagacacctccaagaaccaggccccgctgatgcaagatggcagatctgatacccattagagccccgagaattc

SEQ ID NO: 130300 - DNA, 2325 bp, Homo sapiens
  Payload ID: 5496
  Gene Symbol: EPS8L3
  Gene Name: EPS8-like 3
  Uniprot ID: Q8TE67
  ENST ID: ENST00000369805
  CDS Start-End: 231-2015
gttgagcggttagtgaccaggaagcctccccacccaccagagtccaaagagcacaggcgtggctgcctctgtaacctcatcaaaggcaggctctgcctgtggccactagcagagaagctgctgtccttccaccaccagcaccggaccacctgctccaagaccagcctcctggggggaccaggcacccggccttcactggcacccagggagccgtcctcagcagcgtcaacatgtcaaggcccagcagcagagccatttacttgcaccggaaggagtactcccagaacctcacctcagagcccaccctcctgcagcacagggtggagcacttgatgacatgcaagcaggggagtcagagagtccaggggcccgaggatgccttgcagaagctgttcgagatggatgcacagggccgggtgtggagccaagacttgatcctgcaggtcagggacggctggctgcagctgctggacattgagaccaaggaggagctggactcttaccgcctagacagcatccaggccatgaatgtggcgctcaacacatgttcctacaactccatcctgtccatcaccgtgcaggagccgggcctgccaggcactagcactctgctcttccagtgccaggaagtgggggcagagcgactgaagaccagcctgcagaaggctctggaggaagagctggagcaaagcagacctcgacttggaggccttcagccaggccaggacagatggagggggcctgctatggaaaggccgctccctatggagcaggcacgctatctggagccggggatccctccagaacagccccaccagaggaccctagagcacagcctcccaccatccccaaggcccctgccacgccacaccagtgcccgagaaccaagtgcctttactctgcctcctccaaggcggtcctcttcccccgaggacccagagagggacgaggaagtgctgaaccatgtcctaagggacattgagctgttcatgggaaagctggagaaggcccaggcaaagaccagcaggaagaagaaatttgggaaaaaaaacaaggaccagggaggtctcacccaggcacagtacattgactgcttccagaagatcaagcacagcttcaacctcctgggaaggctggccacctggctgaaggagacaagtgcccctgagctcgtacacatcctcttcaagtccctgaacttcatcctggccaggtgccctgaggctggcctagcagcccaagtgatctcacccctcctcacccctaaagctatcaacctgctacagtcctgtctaagcccacctgagagtaacctttggatggggttgggcccagcctggaccactagccgggccgactggacaggcgatgagcccctgccctaccaacccacattctcagatgactggcaacttccagagccctccagccaagcacccttaggataccaggaccctgtttcccttcggcggggaagtcataggttagggagcacctcacactttcctcaggagaagacacacaaccatgaccctcagcctggggaccccaactccaggccctccagccccaaacctgcccagccagccctgaaaatgcaagtcttgtacgagtttgaagctaggaacccacgggaactgactgtggtccagggagagaagctggaggttctggaccacagcaagcggtggtggctggtgaagaatgaggcgggacggagcggctacattccaagcaacatcctggagcccctacagccggggacccctgggacccagggccagtcaccctctcgggttccaatgcttcgacttagctcgaggcctgaagaggtcacagactggctgcaggcagagaacttctccactgccacggtgaggacacttgggtccctgacggggagccagctacttcgcataagacctggggagctacagatgctatgtccacaggaggccccacgaatcctgtcccggctggaggctgtcagaaggatgctggggataagcccttaggcaccagcttagacacctccaagaaccaggccccgctgatgcaagatggcagatctgatacccattagagccccgagaattcctcttctggatcccagtttgcagcaaaccccacaccccagctcacacagcaaaaacaatggacaggcccagaggctgaagcaaacagtgtcccttctggctgtgttggagcctccccagtaaccacctatttattttacctctttcccaaacctggagcatttatgcctaggcttgtcaagaatctgttcagtccctctccttctcaataaaagcatcttcaagcttg

SEQ ID NO: 130301 - DNA, 1806 bp, Homo sapiens
  Payload ID: 5496
  Gene Symbol: EPS8L3
  Gene Name: EPS8-like 3
  ENST ID: ENST00000472325
  CDS Start-End: 124-243
agcagagaagctgctgtccttccaccaccagcaccggaccacctgctccaagaccagcctcctggggggaccaggcacccggccttcactggcacccagggagccgtcctcagcagcgtcaacatgtcaaggcccagcagcagagccatttacttgcaccggaaggagtactcccagaacctcacctcagagcccaccctcctgcagcacagggtggagcacgcctgtggtccacctctctgagctttctcccagtcctaggactccccctctccctgcagcacttgatgacatgcaagcaggggagtcagagagtccaggggcccgaggatgccttgcagaagctgttcgagatggatgcacagggccgggtgtggagccaagacttgatcctgcaggtcagggacggctggctgcagctgctggacattgagaccaaggaggagctggactcttaccgcctagacagcatccaggccatgaatgtggcgctcaacacatgttcctacaactccatcctgtccatcaccgtgcaggagccgggcctgccaggcactagcactctgctcttccagtgccaggaagtgggggcagagcgactgaagaccagcctgcagaaggctctggaggaagagctggagcaaagcagacctcgacttggaggccttcagccaggccaggacagatggagggggcctgctatggaaaggccgctccctatggagcaggcacgctatctggagccggggatccctccagaacagccccaccagaggaccctagagcacagtccatggtccccttacactgcaggcctcccaccatccccaaggcccctgccacgccacaccagtgcccgagaaccaagtgcctttactctgcctcctccaaggcggtcctcttcccccgaggacccagagagggacgaggaagtgctgaaccatgtcctaagggacattgagctgttcatgggaaagctggagaaggcccaggcaaagaccagcaggaagaagaaatttgggaaaaaaaacaaggaccagggaggtctcacccaggcacagtacattgactgcttccagaagatcaagcacagcttcaacctcctgggaaggctggccacctggctgaaggagacaagtgcccctgagctcgtacacatcctcttcaagtccctgaacttcatcctggccaggtgccctgaggctggcctagcagcccaagtgatctcacccctcctcacccctaaagctatcaacctgctacagtcctgtctaagcccacctgagagtaacctttggatggggttgggcccagcctggaccactagccgggccgactggacaggcgatgagcccctgccctaccaacccacattctcagatgactggcaacttccagagccctccagccaagcacccttaggataccaggaccctgtttcccttcggccctccagccccaaacctgcccagccagccctgaaaatgcaagtcttgtacgagtttgaagctaggaacccacgggaactgactgtggtccagggagagaagctggaggttctggaccacagcaagcggtggtggctggtgaagaatgaggcgggacggagcggctacattccaagcaacatcctggagcccctacagccggggacccctgggacccagggccagtcaccctctcgggtactacccagcctggactatccagagccctaagtcttgagttggaggtcggggtggggaggattcagtggcaagcagaggagatagtcttggtttgattcggaccgtattattgcatgct

SEQ ID NO: 130302 - DNA, 2355 bp, Homo sapiens
  Payload ID: 5497
  Gene Symbol: EPN1
  Gene Name: epsin 1
  Uniprot ID: Q9Y6I3
  ENST ID: ENST00000085079
  CDS Start-End: 293-1945
cggcggctcccctcccccgcccggctctccgcgccccttctgggcggcggggcggcggagccgtcggcgtgcggccctccttgcgttcgtgcgtgcgcccgtggcccggcgcacgtcccgcgacaccgaggccgagcggggcagggggctgaccgccatgaccccccagagcccggcgtgagggggccgagatgcggtgacctgccagcacctgccgcagccttcgtccgggagtcgccccatctctccacgcatcggggccctgtgccccttgctgctgcagccgggcaccatgtcgacctcgtccttgaggcgccagatgaagaacatcgtccacaactactcagaggcggagatcaaggttcgagaggccacgagcaatgacccctggggcccatccagctccctcatgtcagagattgccgacctcacctacaacgttgtcgccttctcggagatcatgagcatgatctggaagcggctcaatgaccatggcaagaactggcgtcacgtttacaaggccatgacgctgatggagtacctcatcaagaccggctcggagcgcgtgtcgcagcagtgcaaggagaacatgtacgccgtgcagacgctgaaggacttccagtacgtggaccgcgacggcaaggaccagggcgtgaacgtgcgtgagaaagctaagcagctggtggccctgctgcgcgacgaggaccggctgcgggaagagcgggcgcacgcgctcaagaccaaggaaaagctggcacagaccgccacggcctcatcagcagctgtgggctcaggcccccctcccgaggcggagcaggcgtggccgcagagcagcggggaggaggagctgcagctccagctggccctggccatgagcaaggaggaggccgaccaggaggagcggatccgtcgcggggatgacctgcggctgcagatggcaatcgaggagagcaagagggagactgggggcaaggaggagtcgtccctcatggaccttgctgacgtcttcacggccccagctcctgccccgaccacagacccctgggggggcccagcacccatggctgctgccgtccccacggctgcccccacctcggacccctggggcggcccccctgtccctccagctgctgatccctggggaggtccagcccccacgccggcctctggggacccctggaggcctgctgcccctgcaggaccctcagttgacccttggggtgggaccccagcccctgcagctggggaggggcccacgcctgatccatggggaagttccgatggtggggtcccggtcagtgggccctcagcctccgatccctggacaccggccccggccttctcagatccctggggagggtcacctgccaagcccagcaccaatggcacaacagccgggggattcgacacggagcccgacgagttctctgactttgaccgactccgcacggcactgccgacctccgggagcagcgcaggagagctggagctgctggcaggagaggtgccggcccgaagccctggggcgtttgacatgagtggggtcaggggatctctggctgaggctgtgggcagccccccacctgcagccacaccaactcccacgccccccacccggaagacgccggagtcattcctggggcccaatgcagccctcgtcgacctggactcgctggtgagccggccgggccccacgccgcctggagccaaggcctccaaccccttcctgccaggcggaggcccagccactggcccttccgtcaccaaccccttccagcccgcgcctcccgcgacgctcaccctgaaccagctccgtctcagtcctgtgcctcccgtccctggagcgccacccacgtacatctctccccttggcgggggccctggcctgccccccatgatgcccccgggccccccggcccccaacactaatcccttcctcctataatccagggcggaagggggcctggctccatccggctgccccattccggctccctgggagatcagtgttgtgagtgcatgtgaaatgggggatccccacccccagtgcccttccccttcctggggcccactcacactacaccctcttcctttcccaccccacctccccggagagaaactggacatggggcctggggaggggagctggccagaggaggacccctttcccgtggcattagaagggggaggggtggctggggcccccacccattccccctccctccaaactcccaacccccagtcagtgtttgagcctcctcgttcccctcacgcacccgctcacgcaccctcggtgaatccttggtgatgattttggcaactttgggaataaatggcaattcccacgggcttggc

SEQ ID NO: 130303 - DNA, 16219 bp, Homo sapiens
  Payload ID: 5497
  Gene Symbol: EPN1
  Gene Name: epsin 1
  Uniprot ID: Q9Y6I3
  ENST ID: ENST00000270460
  CDS Start-End: 312-2042
ctgttgcttcccgtctcctcggcggctcccctcccccgcccggctctccgcgccccttctgggcggcggggcggcggagccgtcggcgtgcggccctccttgcgttcgtgcgtgcgcccgtggcccggcgcacgtcccgcgacaccgaggccgagcggggcagggggctgaccgccatgaccccccagagcccggcgtgagggggccgagatgcggtgacctgccagcacctgccgcagccttcgtccgggagtcgccccatctctccacgcatcggggccctgtgccccttgctgctgcagccgggcaccatgtcgacctcgtccttgaggcgccagatgaagaacatcgtccacaactactcagaggcggagatcaaggttcgagaggccacgagcaatgacccctggggcccatccagctccctcatgtcagagattgccgacctcacctacaacgttgtcgccttctcggagatcatgagcatgatctggaagcggctcaatgaccatggcaagaactggcgtcacgtttacaaggccatgacgctgatggagtacctcatcaagaccggctcggagcgcgtgtcgcagcagtgcaaggagaacatgtacgccgtgcagacgctgaaggacttccagtacgtggaccgcgacggcaaggaccagggcgtgaacgtgcgtgagaaagctaagcagctggtggccctgctgcgcgacgaggaccggctgcgggaagagcgggcgcacgcgctcaagaccaaggaaaagctggcacagaccgccacggcctcatcagcagctgtgggctcaggcccccctcccgaggcggagcaggcgtggccgcagagcagcggggaggaggagctgcagctccagctggccctggccatgagcaaggaggaggccgaccagcccccgtcctgcggccccgaggacgacgcccagctccagctggcccttagtttgagccgagaagagcatgataaggaggagcggatccgtcgcggggatgacctgcggctgcagatggcaatcgaggagagcaagagggagactgggggcaaggaggagtcgtccctcatggaccttgctgacgtcttcacggccccagctcctgccccgaccacagacccctgggggggcccagcacccatggctgctgccgtccccacggctgcccccacctcggacccctggggcggcccccctgtccctccagctgctgatccctggggaggtccagcccccacgccggcctctggggacccctggaggcctgctgcccctgcaggaccctcagttgacccttggggtgggaccccagcccctgcagctggggaggggcccacgcctgatccatggggaagttccgatggtggggtcccggtcagtgggccctcagcctccgatccctggacaccggccccggccttctcagatccctggggagggtcacctgccaagcccagcaccaatggcacaacagcagccgggggattcgacacggagcccgacgagttctctgactttgaccgactccgcacggcactgccgacctccgggagcagcgcaggagagctggagctgctggcaggagaggtgccggcccgaagccctggggcgtttgacatgagtggggtcaggggatctctggctgaggctgtgggcagccccccacctgcagccacaccaactcccacgccccccacccggaagacgccggagtcattcctggggcccaatgcagccctcgtcgacctggactcgctggtgagccggccgggccccacgccgcctggagccaaggcctccaaccccttcctgccaggcggaggcccagccactggcccttccgtcaccaaccccttccagcccgcgcctcccgcgacgctcaccctgaaccagctccgtctcagtcctgtgcctcccgtccctggagcgccacccacgtacatctctccccttggcgggggccctggcctgccccccatgatgcccccgggccccccggcccccaacactaatcccttcctcctataatccagggcggaagggggcctggctccatccggctgccccattccggctccctgggagatcagtgttgtgagtgcatgtgaaatgggggatccccacccccagtgcccttccccttcctggggcccactcacactacaccctcttcctttcccaccccacctccccggagagaaactggacatggggcctggggaggggagctggccagaggaggacccctttcccgtggcattagaagggggaggggtggctggggcccccacccattccccctccctccaaactcccaacccccagtcagtgtttgagcctcctcgttcccctcacgcacccgctcacgcaccctcggtgaatccttggtgatgattttggcaactttgggaataaatggcaattcccacgggcttggcactcccagattcccatctgtgatttcgtgtgtcccccagagccccttcatccagggacccagggctcaggtcacatctctttctcgggggtggctggcaaccagcccctctgtctcagaagccctgatttccctgaccctcccaggtcaagggatggctgggttgagggtggactgtgcgaggcctggcggagctgtagcccacacaggtccaggtggtcgggaggccactcatggccagacgcttccggtgcaggaggccttgctcttgtgttgaggggacaccaggatgaggtcagagagtgcactggggttcagggaggagaagaatcctgagagatggcacatgtgcaacacaggtcaccgtcgccatcgcccgggcccaccgcaagcatcactaatccatccctgcactcctggaaagccgggtcagcctctgccggctgagctgagtggaccaccaggcgcctcctggttgtcctctgtgtgctgttttcctctgtgtgctcttgtcctgggctggaccacacctggtgagactatccgggagaatcctcgggccgccttgtgaggggggtgttgctgtcatctccagggctaggtgacagcttgttgcaggccccacagccagggcctcagggatggggatctggccatgtctgttttaagccgaacaggctgttcttccatgtggagtctccctccgtgatcccctggggtcaagtcctgacggctgggttcgctccctcagtgactccgacagctcttgtctcagaggtgctggggtgaaggctgtgtggggccaggcccctggggtcagacttcttgccccttctgcccgggggacgctctgggctcagggtggggccagacagctacatcacagggacacttgttatgggtcggggtccagggagcacccagccagtggagtgttggaggccactgagagggacatgactgcggtgtccgagcagcgtcgtggccaccctgtgtgcccactccctggtggacagacctacgtcacctggggattgcagagcaaaaggagtgctgttggggtgatgtgaggttggggttctgtttcttgctgtgaattgggtcatgacctgtgtcggagcgttctctggcctccacttgcccctgcagaccagggtgtctggagggttgtcgggggcttgatggaggaattgctgaccacaccatgcaggaagaggtgggtcccagggacacaggaactttggggtcagccggttccagattcagttgcagaggagcatcccccttgcttagccagggaggggaagccctcttctcacacccggcctgggtatgttgtgggagagtcatttcccaggaggaaatggggactgttaccgggggagggggtgctgtccccaggcagcagcaagcgtcccttacgcttgggctgtccgagaccctgctgctctaggcggttgtgatgggggagccccacagggcacagagagccagctgaaggcggcagctctgggtgggatcacatggaaaggggaggcgagccgagcctccctcttgccaatcttggtctccccacagggtcatagctcctgggcccctcacttgtcagaccctccattcaccaaattaaggataagtttcacgatttcgcactgcggagcctgcactccctttctcttcaaaaaagctgaggacgaagataaaatgatacagttggattagtccagtggaggggttaaaggtgtgaggctttaattctccccaccatttcctcatttggcaaaacagagaagacaggattgaaaaacaagacaaaaacccagaggcttgcacataaatttggggcttaactacagcatcttcggcatcttcttttccctacagtgcgaattacaaagtagcaccacagatctcgtgtctcctactttattcctctttctagaatattccagccaccaaagtgctcagcaggagctgctgtgtaggagtcccccatgaggcccaagcacctgagcttagtgacatacacggttgaacgctgggagaatgctgggagcctgctgttgtccccgattgagggctccccccactgtgtgtgtatcactctttctacagcagatgtgtctctctccccacagtgggatggcgagcttgttaaatggccgtgaggaagactttattcaggaccatcgagacaggtacaggtaccatcagtggatggaaaatcactaagagcaaacctcaggggtccgggggttttcggctaaacccacctagcaggattcttgctgaaggcaggccagggtgatcagaggtcacctggggatggtggaggctgaagaagcctatcagatgtgagggtggcgggggttgggggggatggcggcggggttcatttgctgaaaggattttacaagggcatgcacggatgggcctaggaggaggttcagatccctcaggtttggctaagcaagagtcatggtggtgctcccggctggctctcaggagcagatgtgcttctgacccgacgtcttcccccagagagggctgaagtggaaaaaaccccagaatttctccctgggacaggtgaagcgatggggcgtgggacattcctgggtctcgactctgttcagggcctaggggttgggtggggaaggcacttgagggaaccttcctggagcccgtaggagcttcatccgagctcctgggtcaccccgcccaccagagtccaggcccaccagagtcccctgccacctgtgctcaccctagccttacccctcgctctactcccgccctcgccctatcctcgctcctcgccctacgcttgcccctcgctctggagctgcgatgccagcctcagggctttcagtcctgccttgatctttttttatactgaaactcaattttacacacacaaacccactcccagccagcctctgccttttgccttttcctcatgttctcattgaataggaagaaatgcccttttttttcccccctagaaggagtcttgctctgttgccaggctggagtgcagtggcacgatctcggctcaccgcaacctccacctcccgggttcaagcgattctcctgcctcagcctctcgagtagctgggattacaggtgcccaccaccacgcccagctaatttttttttgtatttttagtacagacggggtttcaccatgttaggatggtctcgatctcctgacctcgtgatccgcctgcctcggcctcccaaagtgctgggattacaggcgtgagccactgtagcggcccccaccccatttcattttttatttttttattatactttaagttctagggtacctatgcacaacgcgcaggtttgttacatatatatacatgtgccatgttggtgtgctgcacgcattaactcgtcatttacattaggtatatctcctaatgccttccctcccgcctcccccaggcccttagtttgtgctgctctgcgttggttttctgcgtgtgctaaaaggggagggagagtttctgtgcccattcccaggcaccttcttgcagccgcaggcatctcccccacacgtgcttctagcttcccgggtgtggcgtgagccattgcgtccggccagaaatgttttatttcttgagaacttgtctgtctctgtgatgactgtgggttgtccagctcatccctcaagcgccatcctgccaggcccttcactgtggtgagaaaccggcctactcacatcacaggtgcccctggagtttctcaaactgcagcccaaggattggctgcttgcttttgtaaaaaaaaatgttttattagagtgcagccacggctgcttctgcactacagtggcaatggtgacattgagtgtggcagagaccgagtgtcccttgagcctaaaatatttactatctggctcttcaacaaaaagtgtgctgacccccggtgattgcttgtatgtggcaggggtctaaggcctgcctgcacgtcctgggacagcccacgcttccacagggttccagcatgctttccgccgagaaatcgctccctttgctgtttgttttgtattgaatgtttcttcatgcttttgttttactttcagggataattatataatgttatgtttcatccacattattttagtatggatatttataatttcctaaagcactattttttttttttgagacagagtcttgctctgtcgcccaggctggagtgcagtggctcgatctctgctcactgcaagctccgcctcctgtgttcacgccattctcctgcctcagcctcccaagtagctgggactacagatgcccaccaccatgcccagctaatttttttgtatttttttagtagagacggggtttcactgtgttagccaggatggtcacgatctcctgacctcgtgatctgcccacctcggccttccaaagtgttgggattacaggcttgagccactgtgcccggcccataaagcactatttaatgactgctccataaatacaaacttcctttccttattattattatttattttttttttgagatggagtcttgctctcgtcccccaggctggagtgcagtggcgcgatctcggctcactgcaacctccgcctcccgggttcaagcgattctcctgacttgggactacaggtgcgtgcgaccacagccaactcatttttctgtttttagcagagacagggtttcaccatattggccaggctggtcgaactcctgaccttgtgatccacccgcctcggcctcccaaagtgctgggattacaggcgtgagccacggcacccggcccataattacaaactttctgagggacatcttgaagcacacaaaactatagacaatattatcataaccacccctgcaaatgcctcactcgtgttcagccatcatttacatttgaaccactcctgtttcacctacagcctcctcatggcccctcccctggagcacttaaaaatggtaatgacatgctctctagtaatcgttgtgtgttactgtcaaaaggtataactcatgcattgatgggggtaacccctacagcagttaaccctgcgtgctcagaggggaatgaaaggtagctcagaggctcgggaggtgaggttgcaaaatggcttgtgttgtggggaatgttctcatccacccaaatcaagcatcactacatccatccgcaggggaggcaagcttagggcatcacgtccaggagtggccaggtcccgatgtcacggggagccgggctgggacaagctccagacggccagggtggtgtgggtttgcagtgggagggctggcgcgggggccctgagggctccctggttcccatcttatcaagatgctggactcggtgcttgaaacatgtcctgacagccacatgaaaagggttagaaatgatactgtttcgcctgggtgctgtggctcatgcttgtaatcctagcactttgggaggccgaggcgggcggatcacgaggtcaggagttcgagaccagcctggccaacatggcgaaaccccgtctctactaaaaatacaaaaattagcctagtgtggtggcgggcacctgtaatcccagctacttaggaggctgaggcaggagaatcgcttgaacccaggaggcggaggttgtagtgagccgagattgcactactgcactccagcctgggtgacagagtgagaccctgtctccaaaaaaaaaaaaaaaatgatactgtttcctgtatttttttctcttagtatcttaagaaatacatgatttgaacaaggaccttgtgtctcctctcccctttcccggactattctgaccccagcagttctcagaaggagctgacattaatgagaacttctccctgttagacccttaaaatactgagctttcgggaccctgcctggcttgttcctgtaaaacggtcttgtctgtggtaaatactaaggtttttggtctcacagccgaggaaatcaaggatgtggatgcacacagagtgagatttggagcaggagtttaataggcaaaaggaagaaacagctctgtcacagagacgggtcccgaacgggttgtgaagttgtagaagaaatgtcaggggttttatagatgggctagtgaggaggggtgtcttttcttcctagggcctgaagaaccagttaggaccaggtgtgctgtctgcatcgagcagagtctctagcagcccccaccccattcttttttttttttttttttttgagatggagtctcgctctgtcgcccaggctggagtgcagtggtgtcatcttggctcactgcaacctccgcctcccaggttcaagcaattctcgtgcctcagcctcccgcgtagtcgggattacaggtgcatgcagccatgcccggctaattttgtatttttagtagagacaaggtttcaccatgttggtcaggctggtctccaactcctgacctcaagtgatccgcctgcctcggcctcccaaagtagtgggattgcaggcgtgagccaccgcgccgggcccccaccccattctttgatcctgcaggcaggcccttcgtttgtgctgctctgcgctgctgcttatctgtgtgtgctaaaaggggagggagtgtttctgtgcccattcccaggcaccttcgtgcagctgcaggcatctcccccacgcgcttccagcttcccttagtgtgcctaaagaaagggaaaggaatgtgctttaggcccactgttttcactggggcccatctatgtatgtggcttggtgattacccaggaacctcccaagtctgtgcccgagttgcttatctgtgttttacagcctgaaagatcaggctgctctttgttaggagaagtgatttctttgaactgcgtggtgtggtgagaaagggagcaatttctaagctgctttttgttaggaagttttttgctggggactctcttcgccctatctacctaaatgatttctgtttcttacatcaattgggtattgatttcaggtagaatgggtgaatgcatttattcgttcatctaagccgcatttactcctttcttttctttcactgttgttttttttttgagacggagtcttgcactgtcacccaggctggagtgcagtggtgcgatctcggctcactgcaagctccacctcccgggttcatgccattctcctgcctcagcctcccgagtagctgggactacaggcgcccaccaccacgcccggctaagctaattttttgtattgttagtagagacggggtttcaccgtgttagccaggatggtctcaatctgaccttgtgattccgcccacctcggcctcccaaagtgctgggattacagccgtgagccaccgcacctggcctctttcagttttgatagcagattatttcctttggccctgcgtggtctctctctggctgggcagctctgggccagccataaatggaggggagggcgtgtgtgtggccacgtgtgtttctgtcctggacaacactgtccggaggggcctaagtgggaagtgccctcaaccaaggagatagctgctgtgtgtgtgtgtgttgtgtgtggttgggacagtcggggattctcacttttttttaaaatttgagatggagtttcactgtcgtcacccaggctagagtgcaatggtgtgatttcggctcactgcaacctctgcctcccgggtttaagcgattctcctgcttcagcctctcaagtagctgggattacaggtgcccgccaccacgcccagctaatttttgtatttttagtagagacggggtttcaccacgttggccaggctggtctggaactcctgacctcaggtgatccacctgcctcggccccccaaagtactgggattacaggcgtgagccactgggcgcagcctgggatcctcactttttcgcagattggtcactagcagggcgtctgatggaactttctgagatgccggaaatgttctctgtgctgtacaaaagggatgccactagccacatgccacgtagaacagttgaaatgtggccagcatgagatttttttaatcttgccaatttttgatggatttaagtttaagcacctgcgtgtgagcggctaccgcgtgggctgggattggaggaagctggaaagcgctcccctgcgtttcggctgctggcccagcagagggcgccggagagcggacggagccgcaggcggggttgtgggaagacgctgggatcccgtgcgcgcttgtgctccttccttctgggccagcgcgcagactatcaaccgaggtattcagtccctcggaaacccagttcctccgtttccaggcttctcgcccacacggagacagtcgctctcacacgtacctctcgcgggctcttactcgtggtcccggtctcctcctggtccccaccttccagcccagcgcgcacactagacggcacgtgctctccacgctctttctccagcgccccttgctcacccgccccccgttggagtggcccatcctctccgcttagacacctgcagtcactgtcactagctgaactgcgccctcctgaaagctctatgttgaaaccctaccccccaccctgcaccgaccccgtaccccagaatggggctgtatttggagacagggcctttacaaggtaagtaaggttaaaatgaggacattagggtgggtcctaatccaatctgactgttatatagtggggttgcaccttcatgtgaggacgccgggagaagacagccgtctgggagccaaggagagaggccttggcggaagccaaccctgcagcaccttcatcttgaatttctggtttccagaactgtgagaaaatccattgacgttctatagcgctcccagctggcggtactttgttatgacagccctaacatgaatgcagccatccacactgtctgggggaaggcacacacaccccacagcacccttgctgtctcaccccgtatcgcaaaagctcacgcatgtgtctctcccgagtccctggagggtcctgccacctacatctctctccttggcctgccgcctgtgatgctcctgggccccctgctccagcaccgctcccttccttctgtaatacagacaacagagacaggagatggcctggccccacttcatttctgttccctgggaaataagcatcgcaagtgatccgtagaatggtagacatcatccacttcccaagcatctctggctgaatgctgttctcatccacttcccaagcatctctggctgaatgctgttctacacatgcacgtgggaggcaccagggagcccagaagaaatgaaaagcctgggcagactcgcagttctgccacacagtgaatgtgctactcaagccactcagcctgggctgcagaggttggaagcctcactggcctgaggtttctgagtaagctctgacccaatcattgactattaaacttcagaggtccatggagacctcttaggagtctttgaaggaacttagcatagataccgatagctgctgactgcagggagatggggagatatgttttgtaaacctgtccaggcaacttttttgcctacggaaacacacaaaaacgaaaacaaaccaatgaaaaaaacctctcagaacgatacagaatccagagccactacaacacatttcatgaagtggcgtgagcctgtaattccagcagtttgggaggccggggcgaatggatgacttgaggtcaggagttcgagaccagcctggccaacatgacaaaatcaccatctctactaaaaatacaaaaattagtcatgcatagtggcatgcacctgtagtcccagctactcgggatgctgagatgggagaatcgtttgagcccgggaggtggaggttgcagtgagccgagatcgcaccattgcactccagcatggacaacagagcaagaccctttcttagaaaaaagaaaagtatccccgaacattatcagagtcaagttaataaaggccaaaggtagagaaaatcttgaaagtatcgagaaaatgacatgtcaatcataaggtcaggttcttcaacagtcatactgacattgtggctggaatatttgttgttgtgggatatatatatatatatatatttagagtgttgtgggatatatatatatatttagagacaaggtcttgctctatcactaaagctgcattgcagtgtgtgatcatagctcaccatgggattcttgattttcagtgagtataaagtgtaagacaaaataagtcttagttcaggtatgctggatgggaagccagaggtctgcatagcagttacaaagaaggccttattatctggaagaaaagggaccatagaatgtccattggttggggaacaacccagctttagtttttccagattctctgcatgtgcaggtttatgagactggagaactttgatttcttcttcctcctcctcctctcttttcttcttcctcttcctcctttttctcctcctttcttcctttatttttctttcttcctttcctcctctttcttctcctttttcctcctcttttcttcctttcttctctttttcttcttcttttttttttttttttaaaagaccgtgtttcgctctgtcacccaggctggaatgcagtggcgtactgttttagaaaagtgaaagagggccgggcgtggtggctcatgtctgaaatcctagcactttgggaggctgaggcgggtggatcacctgaggttgggagttcgagaccagcctggccgacatggcaaaaccctgtctctactaaaaatacaaaaattagccgggcatgatggcagatgcctgtaatctcagctcctcagtaggctaaggcgggagaatcgcttgaacccagaggcagaggctgcagtgagccaagattgcagcattgcaggaaagagagaaaaaggagggaaggggaaggaaaaggaaagaaagaaaagaggggaagggaagggagagatttaaaaaacaatagtaaagagagatttaaaaaacaatagtaaagagagattaaaaaaaaaaagtaaatgggccaggtgcgatggcttgtgcctgtaatcccagcagtttgagaggctgaagtgggaggatcacttgaagccaggagtaccagaccagcctgggaaacatagtgagaccccgtctatactaaaaaatatttaaatgggctgagcgcggtggctcaggcctgtaatcccagcactttgggaggccgaggcaggcggattacctcaggtcaggagtttgagaccagcctgaccaacatggcaaaaccccatctctactaaaaataccaaaacaaaaactagcagggcatggtggcgcatgcctgaaatcccagctactcaggtggctgagacaggagaatcacttgaacccaggagacggaggctgcagtgagccgagattgtgccactgcactccagcctgggcgagcaacagagtgaggctgtctctcaaaaaaaaaaaaaaaggaacggtagtgtgcacctgtggtcccagctacacaggaggctgaggcaggagcatcacttgaacccaggagttcaaggctgcagtgagctatgatggcaccactgccctccagactgagccaaaaagcagaccctgactctaaaacaaaagaaagaacaaataacaaatgaaaataaatacccaaaaaccagtcaaatgtgaaactggtgtcaggggtatgttctccatgttgagccccttctgtggaatatgacagtgtctctatttcgggtaaaggaaagaccaaaataactttccaagatgaaaagctaagagtgctgatctcatcacagacatagccagctcttcagttcagaccacctggaaaccctccccatgtcttttcagaacaatgtcctaagaaccataggggaagtggccataaaaaccatctttcctttgcagactggggtggggactctggccaatgccattctgttcttccataatatctttcccatcttgactgagcatcaaatgaggcccacacacaagattctcacccacatggccgtggcaaactccttggttcttctttccactggaatcccccacacaatggtgtcttttgtcctatggaaacccttgtccagtcttgagtgtaaactcgtgtttacaggtcttaaagtcctgacctggtgatccgcccgcgtggacctcccaaagtgctggaattacaggcgtgagccaccactcctggcctatgccagcattctttaaagttgtgggaaaaggccaaaagcaaatagaaaattgggcaaaaaagttcataattgcttaaacatatggaaaacctggaagtaaaattaagcaagtaagtgcgagcactctacattgaagattatagaaaattcagcctcccaaatatccaaagaatccaggagtgtgccaagagatccaagagtaggtccacaatttctcattctcaggagaatctgagattatatttcaatctaatgataactgattatataatccaatttctgcatcatcttgcttttatgttttgtaataaaaattttagaccaggccaataaggcatcagcaatttaccgtagggaactagggaatgtttaattatgacaatgaagtgtttaatattgtgttttgaaatataaacagtgtagatatatttgaataatactgaatttttagaaaaatctattggggtgtcatatataaaaggataagtagagatttggaaatgcttttttattggacaagaaaattgatcaaatcgaaatctggacaaactagaaagtctggatgctagcaatacaatctatagacacattctagcatcacttctgtgtcagaagtatccggattgtggtgcctacaaatgcatgctcctacacaccaagacatccattaagaaaataaagccatgctttccagagcgtttagcacttgtttaacgtacttgtgcttctaaatatcacaaggcaggatgggatttctaaagacaaggggatataggaccgaggcaaagacaatcagcatgtacactgaatcacactccataatcatattgctagaacacttagggagtacctctgaaatcacagccctgctgccatgatgtgcaattacaggatagaggtgccaggtgaaggtcccactgtggccaaggaaagcctttgtgagacgactacttcagggtgttccccatcagaggagcacacccctgatcttgtattcctcgtcaatccaaggtccatgtgaaatggtcagatggggaattttttcttccacagacatcaggatcttctgagtttcttcatcaaagccagatttgtgcagcctgggaaaatagaaataaagtttttttttttgtttttcatttttacacagtattgcctctctacattctgatgtctacctctcctctcctctttattctttcctagaaatcactgggagaattgtactgaatttgaaaaacaagcatgaatctttcctataggataggaagcctctgatttataccataaagtgaaatttcatatacaggatgtatcaattaagatttaattcaaaaaagatgaatttaagttaaaaagaaaaacacaggataacttccattcatctgatgttcatatgccctggcacatctattgcttcttataatgtgcttgcttaaaaaaaaaaaacatgagcttttctcagagacactaatataatgaattcatgtacccatcaccaacttctacaattaccaatattcagcctcttccatttacaacctgcccattttctaagaaataattaaagcacatgctacacccataaa

SEQ ID NO: 130304 - DNA, 2621 bp, Homo sapiens
  Payload ID: 5497
  Gene Symbol: EPN1
  Gene Name: epsin 1
  Uniprot ID: Q9Y6I3
  ENST ID: ENST00000411543
  CDS Start-End: 548-2536
aattctttcatttcagagttgagcaaactgtgtctcaaggaggtgtgcgctgcaggtagctgatgtggccaggatttgaacccacattttatattctttgccattagattccatttttcttatctcttatttctcagcgccaggtctctttttgtttctgggcctctttcttccttggcctcctgcctccctgtcttcccatgttcttgtatctgctgctgcctgtgtttttctcattgtgtctctgcctagctccctctgcccaggtttctatgtgtctctttctgtcagaactgtcttctatttcttctcagtccccttctctgcatttgttacatcatctcttcatcttaatgtattaggctggggctgttttgggactccagagagttactttttaactagctacatctgtcttcaggtgcctggctttctggcctgaggtggaagcagaggccagcctctctccgtcatccctatctcccctgggcttacatcatggcggggctttgaaaatctccctctgtggcttcttggagccgcatagatgggtgatcagagctggctctggaaccaggctgctccaggagtaaggagcccagtctttgcatgcagtgttgaaaaaggtaatgtccctcttgtgctgagcgagcacctggcacacagcagggacccaggcagtggggctgttaggttccttatctctcctgagccttgggcttccgctatccttgggacgtctggtcttctggcttccccggttcttcctgccgccctggatgcggtgacctgccagcacctgccgcagccttcgtccgggagtcgccccatctctccacgcatcggggccctgtgccccttgctgctgcagccgggcaccatgtcgacctcgtccttgaggcgccagatgaagaacatcgtccacaactactcagaggcggagatcaaggttcgagaggccacgagcaatgacccctggggcccatccagctccctcatgtcagagattgccgacctcacctacaacgttgtcgccttctcggagatcatgagcatgatctggaagcggctcaatgaccatggcaagaactggcgtcacgtttacaaggccatgacgctgatggagtacctcatcaagaccggctcggagcgcgtgtcgcagcagtgcaaggagaacatgtacgccgtgcagacgctgaaggacttccagtacgtggaccgcgacggcaaggaccagggcgtgaacgtgcgtgagaaagctaagcagctggtggccctgctgcgcgacgaggaccggctgcgggaagagcgggcgcacgcgctcaagaccaaggaaaagctggcacagaccgccacggcctcatcagcagctgtgggctcaggcccccctcccgaggcggagcaggcgtggccgcagagcagcggggaggaggagctgcagctccagctggccctggccatgagcaaggaggaggccgaccaggaggagcggatccgtcgcggggatgacctgcggctgcagatggcaatcgaggagagcaagagggagactgggggcaaggaggagtcgtccctcatggaccttgctgacgtcttcacggccccagctcctgccccgaccacagacccctgggggggcccagcacccatggctgctgccgtccccacggctgcccccacctcggacccctggggcggcccccctgtccctccagctgctgatccctggggaggtccagcccccacgccggcctctggggacccctggaggcctgctgcccctgcaggaccctcagttgacccttggggtgggaccccagcccctgcagctggggaggggcccacgcctgatccatggggaagttccgatggtggggtcccggtcagtgggccctcagcctccgatccctggacaccggccccggccttctcagatccctggggagggtcacctgccaagcccagcaccaatggcacaacagcagccgggggattcgacacggagcccgacgagttctctgactttgaccgactccgcacggcactgccgacctccgggagcagcgcaggagagctggagctgctggcaggagaggtgccggcccgaagccctggggcgtttgacatgagtggggtcaggggatctctggctgaggctgtgggcagccccccacctgcagccacaccaactcccacgccccccacccggaagacgccggagtcattcctggggcccaatgcagccctcgtcgacctggactcgctggtgagccggccgggccccacgccgcctggagccaaggcctccaaccccttcctgccaggcggaggcccagccactggcccttccgtcaccaaccccttccagcccgcgcctcccgcgacgctcaccctgaaccagctccgtctcagtcctgtgcctcccgtccctggagcgccacccacgtacatctctccccttggcgggggccctggcctgccccccatgatgcccccgggccccccggcccccaacactaatcccttcctcctataatccagggcggaagggggcctggctccatccggctgccccattccggctccctgggagatcagtgttgtgagtgcatgtgaaatgg

SEQ ID NO: 130305 - DNA, 250 bp, Homo sapiens
  Payload ID: 5497
  Gene Symbol: EPN1
  Gene Name: epsin 1
  ENST ID: ENST00000589704
  CDS Start-End: 1-182
ccaagcccagcaccaatggcacaacagcagccgggggattcgacacggagcccgacgagttctctgactttgaccgactccgcacggcactgccgacctccgggagcagcgcagcttactggacacgacttcctcctggcttctactccctcaacagctatcgttcttgctttatacgttgaatctctgtctctttataacttctaaatgttctcagcatcaggaaaatataaaaaataagttcacaaat

SEQ ID NO: 130306 - DNA, 4664 bp, Homo sapiens
  Payload ID: 5498
  Gene Symbol: EPN2
  Gene Name: epsin 2
  Uniprot ID: O95208
  ENST ID: ENST00000347697
  CDS Start-End: 449-2203
gcgccccctcccggccgccatgttggctggtgtgtgggtgtcaaactgagccagacgcggcggtggcggcggctccgcgggctacggtcgctcccgcctctcgagcgctgccggtggccgcagcggcgcacccacgccggcccggaggagcagagtgttcatttctgtgtcgggcacagtgctaagtgctgggtgctcactggtgatgaggcagatgaaggttaccaaacttgtggacaggagcctcatatcagagacgtggacctcactgtagcctggtcatggcttccagcttttcgaatctgaggctccaaaggaggaaatgaccattcagggatcttactccagcttgattacggagactgaaccttcatagggtgcgcacttaccaaggacaggaaggtttctctgtttgaagggctttaaacttataacaaagaaaataaaaatgacgacttcgtctatcagacggcagatgaaaaacatcgtgaacaattactcagaggcagaaatcaaagtccgggaagccacctccaatgacccgtggggcccgtccagttctctgatgaccgagattgccgacctgacctacaacgtggtggccttctcggagatcatgagcatggtgtggaagcggctgaatgaccatggcaagaactggcggcatgtgtacaaggcgctgaccctgctggactacctcatcaagacaggctccgaacgtgtggcccagcagtgccgggagaacatcttcgccatccagaccctgaaggacttccagtacattgaccgagatggcaaggaccagggcatcaatgtgcgtgagaagtcaaagcaactggtggctctcctcaaggacgaggaacggttgaaggctgagagggcccaggctctcaaaaccaaagagcgcatggcccaggttgccactggcatgggcagcaaccagatcacctttgggcgaggctccagccagcccaacctctccaccagccactcggagcaggagtatggcaaggccgggggctccccggcctcctaccatggctccacctccccgcgagtgtcctccgagctggagcaagcccggccccagactagtggagaagaggagcttcagctgcagctggcacttgccatgagcagagaagtggctgagcaggaagaacgcctcaggcggggtgatgacctcagattacagatggccctggaagaaagccgaagggacacagttaaaattccaaaaaagaaagagcatggctctctcccacagcagactacgctgttggatttaatggatgctctccccagctcgggccccgcggcccagaaagcagagccctggggcccgtcagcctccactaaccagaccaacccctggggcgggccagcggctcctgcgagtacttcagacccctggccatcgtttggtaccaagccagctgcctccattgacccatggggggtgcccactggagccaccgtacaatctgtccccaagaactcggacccctgggcagcttcacagcagcctgcctccagtgctgggaaaagagcttctgacgcgtggggcgcagtctccaccaccaagcccgtgtctgtctctgggtcctttgagctcttcagtaatctgaatggtacaattaaagatgacttttctgaatttgacaaccttcggacttcaaaaaaaacagccgaatctgtgacctctctgccatcccaaaacaatggaactaccagccctgacccctttgagtctcaacccctgactgtcgcctcaagcaagcccagcagtgcccggaaaacacctgagtccttcctgggccccaacgcggccctggtgaacctggactcactggtgaccaggcctgccccaccagcccagtccctcaaccctttcctggcaccaggtgctcccgccacctcggcccctgttaaccctttccaggtgaaccagccccagccgctgacactgaaccagcttcgggggagcccagtcctggggaccagcacatcctttgggcctggcccaggagtggagtccatggctgtggcctcgatgacctccgcggccccacagccagctctgggggccactggttcctctctgacaccactgggccctgcaatgatgaacatggtgggcagtgtgggtatacccccatcagcagcccaggccactggcacaaccaaccctttccttctctagtgcctgggcctgggacccacccagagcacctgtgctggaggatgccgagcagggactctcgtctgtgggacgggatccaagagtttggggattaggggtattagggcttttcagctccagcttcctgatgaaagggctgtctttacagccccaaccctcagaccctcgccttccaaggcaggcccctcagcctggcctgctctcaccacctcctccaaagcactgaggtcctggcagggctcctctgaggccttggacgaggacgtggagtcatcagtgttgcccttgcccctaacctcagcccgagggtctccaggatgttgcctggcccaggacttgggacagtggccttgtctttgtcctccccaccccccagccctagggacaccccaggcagtcctgggtgtggacacgatgaagcaccggctccataagacaccttttggggaagtggttgtgcatattttatttttctttgactcgtgtgagttcaaagtaaacaccaccaccgtggacaactcttgaattaaatccactagagcgagctttaaaactaatctgagcataacccccaacgtggctctatgcttgtgtacctttgcacatattttgtttagtacagtttcatatttgagtttgcagaattatctaatagtctttttttggctaatatttttataacgtggttcttatttaactgtctagttttgatagaatttaccaggtctggctgaatgaagatgttggcacgtgtcattttagtggtttaaatcctcttatttatggttttaactctaagaaaattttaaaaggaagagatgtttggatgacaaaaaaatgccttattgaaaaactaaagcaaattctttataggaagaaaatatgggaatttgattacacatagatgatgatgtttatttaaaaaaaaaacaacagcaacaaaaaatcctagcctccagttgccttttcctttctttagctcctgtttttggtgaattactaaactgattgactttcagcctttttggctagatcctgagaggctatttttcttacgaatataccaacatcctgaaagttaaagaaaaaaatctaatgtatgaatgtgactcaccaatttttatcaactaattccttttttttattaaaggcatgcagggattaacaggacttctgtttacaatggaaatctgaaatggaagaaacatctttaaccttgtgtgtctgtgatctcctctgtcttaatccacgctcaggctaaagatggggataatgtggaaatggcagttgtcccgagggcgtggggtggggggtgcttctgtgcccacgggtccctgggcaacagtccctaggctaagacaggggtggggggctaagggaccagggctggccctgatccacctacctgctaactccagatattatttttaagttggagacctaaaaataattctcttgtattttggagatgaagaaaaaagtcattcacctgggagggatttttaacaaacatgcactaatattacctccctcttccaaactcctactgtcctcacctcacccaccactgtaaaagtattacgtcgtgcattaaagaccagaaaagacttgcttttacccagggaggggacattcccccaatcctgtgtctgggcagcttgcctggtggatgtttctggccctttttccaccatgggaatttctcacctctagctctaagggcagctgaccacctgccagcccctctctggttccagaagattacccttcgcaccggcacaggagagatcttaaatggtctctgggctgctgggacatgcaggctctgagtggggactgcacccactcatgctgttcctgaggccgccctctccagtcccaggagccgtgtctagagttcctgaccagccaccttctgccagaactgcaggcctgcggctgggtcttaggctcccgctgccatttgggtaagccggtggctggtctcgtctgccgggggaagggtggggaggtgcaatgggatgggaggcaggatgcttgcccagaaaggtgctttccttcagacggtgcagggcctgggccagccttacaggtcagtagactagactcgactacttggggtcagtgattcttttgtaacgagtctttcatgatgtgactttgaggccccaacatgacagccactgggccaccgggacccaagaagacagccccctgccccatcttctggcacaggccatcccgagtgcatgtccctgttgcccactgcactgatcatgaagccaccggccactgccacgcatgttgcacctgtgccatcgtgctccctcctgatgggcaccgtggtggaggaagtcacccagctgtttctcagtcccagaggccggtggctggttttgaacttgtgttgactgttgatacttatttactgtataaatataatttatcatttgtaccatga

SEQ ID NO: 130307 - DNA, 4871 bp, Homo sapiens
  Payload ID: 5498
  Gene Symbol: EPN2
  Gene Name: epsin 2
  Uniprot ID: O95208
  ENST ID: ENST00000314728
  CDS Start-End: 485-2410
gggggcggggcctgagggcgcgcgcacgcgtccggcgcgccccctcccggccgccatgttggctggtgtgtgggtgtcaaactgagccagacgcggcggtggcggcggctccgcgggctacggtcgctcccgcctctcgagcgctgccggtggccgcagcggcgcacccacgccggcccggaggagcagagtgttcatttctgtgtcgggcacagtgctaagtgctgggtgctcactggtgatgaggcagatgaaggttaccaaacttgtggacaggagcctcatatcagagacgtggacctcactgtagcctggtcatggcttccagcttttcgaatctgaggctccaaaggaggaaatgaccattcagggatcttactccagcttgattacggagactgaaccttcatagggtgcgcacttaccaaggacaggaaggtttctctgtttgaagggctttaaacttataacaaagaaaataaaaatgacgacttcgtctatcagacggcagatgaaaaacatcgtgaacaattactcagaggcagaaatcaaagtccgggaagccacctccaatgacccgtggggcccgtccagttctctgatgaccgagattgccgacctgacctacaacgtggtggccttctcggagatcatgagcatggtgtggaagcggctgaatgaccatggcaagaactggcggcatgtgtacaaggcgctgaccctgctggactacctcatcaagacaggctccgaacgtgtggcccagcagtgccgggagaacatcttcgccatccagaccctgaaggacttccagtacattgaccgagatggcaaggaccagggcatcaatgtgcgtgagaagtcaaagcaactggtggctctcctcaaggacgaggaacggttgaaggctgagagggcccaggctctcaaaaccaaagagcgcatggcccaggttgccactggcatgggcagcaaccagatcacctttgggcgaggctccagccagcccaacctctccaccagccactcggagcaggagtatggcaaggccgggggctccccggcctcctaccatggctcgcctgaggcctcgctgtgcccccagcaccgcacaggggccccgctgggtcagagtgaggagctgcagccactgagccagcgccaccccttcctgccgcacctggggctggcctcccgcccaaatggcgactggtcccagccctgcctcacttgtgaccgcgcagcccgagccacctccccgcgagtgtcctccgagctggagcaagcccggccccagactagtggagaagaggagcttcagctgcagctggcacttgccatgagcagagaagtggctgagcaggaagaacgcctcaggcggggtgatgacctcagattacagatggccctggaagaaagccgaagggacacagttaaaattccaaaaaagaaagagcatggctctctcccacagcagactacgctgttggatttaatggatgctctccccagctcgggccccgcggcccagaaagcagagccctggggcccgtcagcctccactaaccagaccaacccctggggcgggccagcggctcctgcgagtacttcagacccctggccatcgtttggtaccaagccagctgcctccattgacccatggggggtgcccactggagccaccgtacaatctgtccccaagaactcggacccctgggcagcttcacagcagcctgcctccagtgctgggaaaagagcttctgacgcgtggggcgcagtctccaccaccaagcccgtgtctgtctctgggtcctttgagctcttcagtaatctgaatggtacaattaaagatgacttttctgaatttgacaaccttcggacttcaaaaaaaacagccgaatctgtgacctctctgccatcccaaaacaatggaactaccagccctgacccctttgagtctcaacccctgactgtcgcctcaagcaagcccagcagtgcccggaaaacacctgagtccttcctgggccccaacgcggccctggtgaacctggactcactggtgaccaggcctgccccaccagcccagtccctcaaccctttcctggcaccaggtgctcccgccacctcggcccctgttaaccctttccaggtgaaccagccccagccgctgacactgaaccagcttcgggggagcccagtcctggggaccagcacatcctttgggcctggcccaggagtggagtccatggctgtggcctcgatgacctccgcggccccacagccagctctgggggccactggttcctctctgacaccactgggccctgcaatgatgaacatggtgggcagtgtgggtatacccccatcagcagcccaggccactggcacaaccaaccctttccttctctagtgcctgggcctgggacccacccagagcacctgtgctggaggatgccgagcagggactctcgtctgtgggacgggatccaagagtttggggattaggggtattagggcttttcagctccagcttcctgatgaaagggctgtctttacagccccaaccctcagaccctcgccttccaaggcaggcccctcagcctggcctgctctcaccacctcctccaaagcactgaggtcctggcagggctcctctgaggccttggacgaggacgtggagtcatcagtgttgcccttgcccctaacctcagcccgagggtctccaggatgttgcctggcccaggacttgggacagtggccttgtctttgtcctccccaccccccagccctagggacaccccaggcagtcctgggtgtggacacgatgaagcaccggctccataagacaccttttggggaagtggttgtgcatattttatttttctttgactcgtgtgagttcaaagtaaacaccaccaccgtggacaactcttgaattaaatccactagagcgagctttaaaactaatctgagcataacccccaacgtggctctatgcttgtgtacctttgcacatattttgtttagtacagtttcatatttgagtttgcagaattatctaatagtctttttttggctaatatttttataacgtggttcttatttaactgtctagttttgatagaatttaccaggtctggctgaatgaagatgttggcacgtgtcattttagtggtttaaatcctcttatttatggttttaactctaagaaaattttaaaaggaagagatgtttggatgacaaaaaaatgccttattgaaaaactaaagcaaattctttataggaagaaaatatgggaatttgattacacatagatgatgatgtttatttaaaaaaaaaacaacagcaacaaaaaatcctagcctccagttgccttttcctttctttagctcctgtttttggtgaattactaaactgattgactttcagcctttttggctagatcctgagaggctatttttcttacgaatataccaacatcctgaaagttaaagaaaaaaatctaatgtatgaatgtgactcaccaatttttatcaactaattccttttttttattaaaggcatgcagggattaacaggacttctgtttacaatggaaatctgaaatggaagaaacatctttaaccttgtgtgtctgtgatctcctctgtcttaatccacgctcaggctaaagatggggataatgtggaaatggcagttgtcccgagggcgtggggtggggggtgcttctgtgcccacgggtccctgggcaacagtccctaggctaagacaggggtggggggctaagggaccagggctggccctgatccacctacctgctaactccagatattatttttaagttggagacctaaaaataattctcttgtattttggagatgaagaaaaaagtcattcacctgggagggatttttaacaaacatgcactaatattacctccctcttccaaactcctactgtcctcacctcacccaccactgtaaaagtattacgtcgtgcattaaagaccagaaaagacttgcttttacccagggaggggacattcccccaatcctgtgtctgggcagcttgcctggtggatgtttctggccctttttccaccatgggaatttctcacctctagctctaagggcagctgaccacctgccagcccctctctggttccagaagattacccttcgcaccggcacaggagagatcttaaatggtctctgggctgctgggacatgcaggctctgagtggggactgcacccactcatgctgttcctgaggccgccctctccagtcccaggagccgtgtctagagttcctgaccagccaccttctgccagaactgcaggcctgcggctgggtcttaggctcccgctgccatttgggtaagccggtggctggtctcgtctgccgggggaagggtggggaggtgcaatgggatgggaggcaggatgcttgcccagaaaggtgctttccttcagacggtgcagggcctgggccagccttacaggtcagtagactagactcgactacttggggtcagtgattcttttgtaacgagtctttcatgatgtgactttgaggccccaacatgacagccactgggccaccgggacccaagaagacagccccctgccccatcttctggcacaggccatcccgagtgcatgtccctgttgcccactgcactgatcatgaagccaccggccactgccacgcatgttgcacctgtgccatcgtgctccctcctgatgggcaccgtggtggaggaagtcacccagctgtttctcagtcccagaggccggtggctggttttgaacttgtgttgactgttgatacttatttactgtataaatataatttatcatttgtaccatga

SEQ ID NO: 130308 - DNA, 2216 bp, Homo sapiens
  Payload ID: 5498
  Gene Symbol: EPN2
  Gene Name: epsin 2
  Uniprot ID: O95208
  ENST ID: ENST00000395618
  CDS Start-End: 226-1296
atgttggctggtgtgtgggtgtcaaactgagccagacgcggcggtggcggcggctccgcgggctacggtcgctcccgcctctcgagcgctgccggtggccgcagcggcgcacccacgccggcccggaggagcagagccacctccccgcgagtgtcctccgagctggagcaagcccggccccagactagtggagaagaggagcttcagctgcagctggcacttgccatgagcagagaagtggctgagcaggaagaacgcctcaggcggggtgatgacctcagattacagatggccctggaagaaagccgaagggacacagttaaaattccaaaaaagaaagagcatggctctctcccacagcagactacgctgttggatttaatggatgctctccccagctcgggccccgcggcccagaaagcagagccctggggcccgtcagcctccactaaccagaccaacccctggggcgggccagcggctcctgcgagtacttcagacccctggccatcgtttggtaccaagccagctgcctccattgacccatggggggtgcccactggagccaccgtacaatctgtccccaagaactcggacccctgggcagcttcacagcagcctgcctccagtgctgggaaaagagcttctgacgcgtggggcgcagtctccaccaccaagcccgtgtctgtctctgggtcctttgagctcttcagtaatctgaatggtacaattaaagatgacttttctgaatttgacaaccttcggacttcaaaaaaaacagccgaatctgtgacctctctgccatcccaaaacaatggaactaccagccctgacccctttgagtctcaacccctgactgtcgcctcaagcaagcccagcagtgcccggaaaacacctgagtccttcctgggccccaacgcggccctggtgaacctggactcactggtgaccaggcctgccccaccagcccagtccctcaaccctttcctggcaccaggtgctcccgccacctcggcccctgttaaccctttccaggtgaaccagccccagccgctgacactgaaccagcttcgggggagcccagtcctggggaccagcacatcctttgggcctggcccaggagtggagtccatggctgtggcctcgatgacctccgcggccccacagccagctctgggggccactggttcctctctgacaccactgggccctgcaatgatgaacatggtgggcagtgtgggtatacccccatcagcagcccaggccactggcacaaccaaccctttccttctctagtgcctgggcctgggacccacccagagcacctgtgctggaggatgccgagcagggactctcgtctgtgggacgggatccaagagtttggggattaggggtattagggcttttcagctccagcttcctgatgaaagggctgtctttacagccccaaccctcagaccctcgccttccaaggcaggcccctcagcctggcctgctctcaccacctcctccaaagcactgaggtcctggcagggctcctctgaggccttggacgaggacgtggagtcatcagtgttgcccttgcccctaacctcagcccgagggtctccaggatgttgcctggcccaggacttgggacagtggccttgtctttgtcctccccaccccccagccctagggacaccccaggcagtcctgggtgtggacacgatgaagcaccggctccataagacaccttttggggaagtggttgtgcatattttatttttctttgactcgtgtgagttcaaagtaaacaccaccaccgtggacaactcttgaattaaatccactagagcgagctttaaaactaatctgagcataacccccaacgtggctctatgcttgtgtacctttgcacatattttgtttagtacagtttcatatttgagtttgcagaattatctaatagtctttttttggctaatatttttataacgtggttcttatttaactgtctagttttgatagaatttaccaggtctggctgaatgaagatgttggcacgtgtcattttagtggtttaaatcctcttatttatggttttaactctaagaaaattttaaaaggaagagatgtttggatgacaaaaaaatgccttattgaaaaactaaagcaaattctttataggaagaaaatatgggaatttgattacacatagatgatgatgtttattt

SEQ ID NO: 130309 - DNA, 3860 bp, Homo sapiens
  Payload ID: 5498
  Gene Symbol: EPN2
  Gene Name: epsin 2
  Uniprot ID: O95208
  ENST ID: ENST00000395620
  CDS Start-End: 1166-2920
tgttcatttctgtgtcgggcacagtgctaagtgctgggtgctcactggtgatgaggcagatgaaggttaccaaacttgtggacaggagcctcatatcagagacgtggacctcactgtagcctggtaagtgagtgttatctggaggaagagaggggatagatgatgtgtttggttggagcgagttaatagatagccaggggtctcagttttctttgtgaaatgaggggctgggctataaccagattagttttaaggctgtattagcttgggccagatgctggaggcttctgaaagccaagtggaggtctttatcctttttctagaattgctgttaggaatctttataaattcttgaacagggaaggtcaggcgaaaagtggttgtcaaggagaattttctggacattcggaaacacagtggaccaaagcagttttgaaggtattgacaggcatttttgagttaagatagacctgaaattagtctctttcttgtcctcatgtgtatttttttttatttaaataaactttaaaaaaatagagatgggggtattgctgttttgaccaggctggcctcaagtaatcctcccatttcagcttcgcaaagtgctgggattacaggtgtgagccaccatatctggtctcacatgtaattttaaatctgccaagatcagcttcccccagtgtttccgattcttccacagctggcttttgccaggcagtgaaaagacaacccataaaatagccattccagtggaagtgttttgaaaatagagcaatagtcatgatgtttacttcttttctcctaaaggcttaaacttgagtgtaagttttattcattgttgactggtgatattgattttatcttgggttcgtcctaaggaggctgggtatgtccactcagctccccagttttacccagtacctgctgctggaccacagtctcccaccctcacagggggcttacgtcgcagtggaatgggttttctctttctctaggtcatggcttccagcttttcgaatctgaggctccaaaggaggaaatgaccattcagggatcttactccagcttgattacggagactgaaccttcatagggtgcgcacttaccaaggacaggaaggtttctctgtttgaagggctttaaacttataacaaagaaaataaaaatgacgacttcgtctatcagacggcagatgaaaaacatcgtgaacaattactcagaggcagaaatcaaagtccgggaagccacctccaatgacccgtggggcccgtccagttctctgatgaccgagattgccgacctgacctacaacgtggtggccttctcggagatcatgagcatggtgtggaagcggctgaatgaccatggcaagaactggcggcatgtgtacaaggcgctgaccctgctggactacctcatcaagacaggctccgaacgtgtggcccagcagtgccgggagaacatcttcgccatccagaccctgaaggacttccagtacattgaccgagatggcaaggaccagggcatcaatgtgcgtgagaagtcaaagcaactggtggctctcctcaaggacgaggaacggttgaaggctgagagggcccaggctctcaaaaccaaagagcgcatggcccaggttgccactggcatgggcagcaaccagatcacctttgggcgaggctccagccagcccaacctctccaccagccactcggagcaggagtatggcaaggccgggggctccccggcctcctaccatggctccacctccccgcgagtgtcctccgagctggagcaagcccggccccagactagtggagaagaggagcttcagctgcagctggcacttgccatgagcagagaagtggctgagcaggaagaacgcctcaggcggggtgatgacctcagattacagatggccctggaagaaagccgaagggacacagttaaaattccaaaaaagaaagagcatggctctctcccacagcagactacgctgttggatttaatggatgctctccccagctcgggccccgcggcccagaaagcagagccctggggcccgtcagcctccactaaccagaccaacccctggggcgggccagcggctcctgcgagtacttcagacccctggccatcgtttggtaccaagccagctgcctccattgacccatggggggtgcccactggagccaccgtacaatctgtccccaagaactcggacccctgggcagcttcacagcagcctgcctccagtgctgggaaaagagcttctgacgcgtggggcgcagtctccaccaccaagcccgtgtctgtctctgggtcctttgagctcttcagtaatctgaatggtacaattaaagatgacttttctgaatttgacaaccttcggacttcaaaaaaaacagccgaatctgtgacctctctgccatcccaaaacaatggaactaccagccctgacccctttgagtctcaacccctgactgtcgcctcaagcaagcccagcagtgcccggaaaacacctgagtccttcctgggccccaacgcggccctggtgaacctggactcactggtgaccaggcctgccccaccagcccagtccctcaaccctttcctggcaccaggtgctcccgccacctcggcccctgttaaccctttccaggtgaaccagccccagccgctgacactgaaccagcttcgggggagcccagtcctggggaccagcacatcctttgggcctggcccaggagtggagtccatggctgtggcctcgatgacctccgcggccccacagccagctctgggggccactggttcctctctgacaccactgggccctgcaatgatgaacatggtgggcagtgtgggtatacccccatcagcagcccaggccactggcacaaccaaccctttccttctctagtgcctgggcctgggacccacccagagcacctgtgctggaggatgccgagcagggactctcgtctgtgggacgggatccaagagtttggggattaggggtattagggcttttcagctccagcttcctgatgaaagggctgtctttacagccccaaccctcagaccctcgccttccaaggcaggcccctcagcctggcctgctctcaccacctcctccaaagcactgaggtcctggcagggctcctctgaggccttggacgaggacgtggagtcatcagtgttgcccttgcccctaacctcagcccgagggtctccaggatgttgcctggcccaggacttgggacagtggccttgtctttgtcctccccaccccccagccctagggacaccccaggcagtcctgggtgtggacacgatgaagcaccggctccataagacaccttttggggaagtggttgtgcatattttatttttctttgactcgtgtgagttcaaagtaaacaccaccaccgtggacaactcttgaattaaatccactagagcgagctttaaaactaatctgagcataacccccaacgtggctctatgcttgtgtacctttgcacatattttgtttagtacagtttcatatttgagtttgcagaattatctaatagtctttttttggctaatatttttataacgtggttcttatttaactgtctagttttgatagaatttaccaggtctggctgaatgaagatgttggcacgtgtcattttagtggtttaaatcctcttatttatggttttaactctaagaaaattttaaaaggaagagatgtttggatgacaaaaaaatgccttattgaaaaactaaagcaaattctttataggaagaaaatatgggaatttgattacacatagatgatgatgtttatttaaaaaaaaaacaacagcaac

SEQ ID NO: 130310 - DNA, 2863 bp, Homo sapiens
  Payload ID: 5498
  Gene Symbol: EPN2
  Gene Name: epsin 2
  ENST ID: ENST00000395626
  CDS Start-End: 142-1596
gctccaaaggaggaaatgaccattcagggatcttactccagcttgattacggagactgaaccttcatagggtgcgcacttaccaaggacaggaaggtttctctgtttgaagggctttaaacttataacaaagaaaataaaaatgacgacttcgtctatcagacggcagatgaaaaacatcgtgaacaattactcagaggcagaaatcaaagtccgggaagccacctccaatgacccgtggggcccgtccagttctctgatgaccgagattgccgacctgacctacaacgtggtggccttctcggagatcatgagcatggtgtggaagcggctgaatgaccatggcaagaactggcggcatgtgtacaaggcgctgaccctgctggactacctcatcaagacaggctccgaacgtgtggcccagcagtgccgggagaacatcttcgccatccagaccctgaaggacttccagtacattgaccgagatggcaaggaccagggcatcaatgtgcgtgagaagtcaaagcaactggtggctctcctcaaggacgaggaacggttgaaggctgagagggcccaggctctcaaaaccaaagagcgcatggcccaggttgccactggcatgggcagcaaccagatcacctttgggcgaggctccagccagcccaacctctccaccagccactcggagcaggagtatggcaaggccgggggctccccggcctcctaccatggctcgcctgaggcctcgctgtgcccccagcaccgcacaggggccccgctgggtcagagtgaggagctgcagccactgagccagcgccaccccttcctgccgcacctggggctggcctcccgcccaaatggcgactggtcccagccctgcctcacttgtgaccgcgcagcccgagccacctccccgcgagtgtcctccgagctggagcaagcccggccccagactagtggagaagaggagcttcagctgcagctggcacttgccatgagcagagaagtggctgagcaggaagaacgcctcaggcggggtgatgacctcagattacagatggccctggaagaaagccgaagggacacagttaaaattccaaaaaagaaagagcatggctctctcccacagcagactacgctgttggatttaatggatgctctccccagctcgggccccgcggcccagaaagcagagccctggggcccgtcagcctccactaaccagaccaacccctggggcgggccagcggctcctgcgagtacttcagacccctggccatcgtttggtaccaagccagctgcctccattgacccatggggggtgcccactggagccaccgtacaatctgtccccaagaactcggacccctgggcagcttcacagcagcctgcctccagtgctgggaaaagagcttctgacgcgtggggcgcagtctccaccaccaagcccgtgtctgtctctgggtcctttgagctcttcagtaatctgaatggtacaattaaagatgacttttctgaatttgacaaccttcggacttcaaaaaaaacaggcatgcagggattaacaggacttctgtttacaatggaaatctgaaatggaagaaacatctttaaccttgtgtgtctgtgatctcctctgtcttaatccacgctcaggctaaagatggggataatgtggaaatggcagttgtcccgagggcgtggggtggggggtgcttctgtgcccacgggtccctgggcaacagtccctaggctaagacaggggtggggggctaagggaccagggctggccctgatccacctacctgctaactccagatattatttttaagttggagacctaaaaataattctcttgtattttggagatgaagaaaaaagtcattcacctgggagggatttttaacaaacatgcactaatattacctccctcttccaaactcctactgtcctcacctcacccaccactgtaaaagtattacgtcgtgcattaaagaccagaaaagacttgcttttacccagggaggggacattcccccaatcctgtgtctgggcagcttgcctggtggatgtttctggccctttttccaccatgggaatttctcacctctagctctaagggcagctgaccacctgccagcccctctctggttccagaagattacccttcgcaccggcacaggagagatcttaaatggtctctgggctgctgggacatgcaggctctgagtggggactgcacccactcatgctgttcctgaggccgccctctccagtcccaggagccgtgtctagagttcctgaccagccaccttctgccagaactgcaggcctgcggctgggtcttaggctcccgctgccatttgggtaagccggtggctggtctcgtctgccgggggaagggtggggaggtgcaatgggatgggaggcaggatgcttgcccagaaaggtgctttccttcagacggtgcagggcctgggccagccttacaggtcagtagactagactcgactacttggggtcagtgattcttttgtaacgagtctttcatgatgtgactttgaggccccaacatgacagccactgggccaccgggacccaagaagacagccccctgccccatcttctggcacaggccatcccgagtgcatgtccctgttgcccactgcactgatcatgaagccaccggccactgccacgcatgttgcacctgtgccatcgtgctccctcctgatgggcaccgtggtggaggaagtcacccagctgtttctcagtcccagaggccggtggctggttttgaacttgtgttgactgttgatacttatttactgtataaatataatttatcatttgtaccatga

SEQ ID NO: 130311 - DNA, 1657 bp, Homo sapiens
  Payload ID: 5498
  Gene Symbol: EPN2
  Gene Name: epsin 2
  ENST ID: ENST00000395628
  CDS Start-End: 429-1657
tgttggctggtgtgtgggtgtcaaactgagccagacgcggcggtggcggcggctccgcgggctacggtcgctcccgcctctcgagcgctgccggtggccgcagcggcgcacccacgccggcccggaggagcagagtgttcatttctgtgtcgggcacagtgctaagtgctgggtgctcactggtgatgaggcagatgaaggttaccaaacttgtggacaggagcctcatatcagagacgtggacctcactgtagcctggtcatggcttccagcttttcgaatctgaggctccaaaggaggaaatgaccattcagggatcttactccagcttgattacggagactgaaccttcatagggtgcgcacttaccaaggacaggaaggtttctctgtttgaagggctttaaacttataacaaagaaaataaaaatgacgacttcgtctatcagacggcagatgaaaaacatcgtgaacaattactcagaggcagaaatcaaagtccgggaagccacctccaatgacccgtggggcccgtccagttctctgatgaccgagattgccgacctgacctacaacgtggtggccttctcggagatcatgagcatggtgtggaagcggctgaatgaccatggcaagaactggcggcatgtgtacaaggcgctgaccctgctggactacctcatcaagacaggctccgaacgtgtggcccagcagtgccgggagaacatcttcgccatccagaccctgaaggacttccagtacattgaccgagatggcaaggaccagggcatcaatgtgcgtgagaagtcaaagcaactggtggctctcctcaaggacgaggaacggttgaaggctgagagggcccaggctctcaaaaccaaagagcgcatggcccaggttgccactggcatgggcagcaaccagatcacctttgggcgaggctccagccagcccaacctctccaccagccactcggagcaggagtatggcaaggccgggggctccccggcctcctaccatggctccacctccccgcgagtgtcctccgagctggagcaagcccggccccagactagtggagaagaggagcttcagctgcagctggcacttgccatgagcagagaagtggctgagcaggaagaacgcctcaggcggggtgatgacctcagattacagatggccctggaagaaagccgaagggacacagttaaaattccaaaaaagaaagagcatggctctctcccacagcagactacgctgttggatttaatggatgctctccccagctcgggccccgcggcccagaaagcagagccctggggcccgtcagcctccactaaccagaccaacccctggggcgggccagcggctcctgcgagtacttcagacccctggccatcgtttggtaccaagccagctgcctccattgacccatggggggtgcccactggagccaccgtacaatctgtccccaagaactcggacccctgggcagcttcacagcagcctgcctccagtgctgggaaaagagcttctgacgcgtggggcgcagtctccaccaccaagcccgtgtctgtctctgggtcctttgagctcttcagtaatctgaatggtacaattaaagatgacttttctgaatttgacaaccttcggacttc

SEQ ID NO: 130312 - DNA, 1883 bp, Homo sapiens
  Payload ID: 5498
  Gene Symbol: EPN2
  Gene Name: epsin 2
  ENST ID: ENST00000571254
  CDS Start-End: 74-1807
gggtgcgcacttaccaaggacaggaaggtttctctgtttgaagggctttaaacttataacaaagaaaataaaaatgacgacttcgtctatcagacggcagatgaaaaacatcgtgaacaattactcagaggcagaaatcaaagtccgggaagccacctccaatgacccgtggggcccgtccagttctctgatgaccgagattgccgacctgacctacaacgtggtggccttctcggagatcatgagcatggtgtggaagcggctgaatgaccatggcaagaactggcggcatgtgtacaaggcgctgaccctgctggactacctcatcaagacaggctccgaacgtgtggcccagcagtgccgggagaacatcttcgccatccagaccctgaaggacttccagtacattgaccgagatggcaaggaccagggcatcaatgtgcgtgagaagtcaaagcaactggtggctctcctcaaggacgaggaacggttgaaggctgagagggcccaggctctcaaaaccaaagagcgcatggcccaggttgccactggcatgggcagcaaccagatcacctttgggcgaggctccagccagcccaacctctccaccagccactcggagcaggagtatggcaaggccgggggctccccggcctcctaccatggctccacctccccgcgagtgtcctccgagctggagcaagcccggccccagactagtggagaagaggagcttcagctgcagctggcacttgccatgagcagagaagtggctgagcaggaagaacgcctcaggcggggtgatgacctcagattacagatggccctggaagaaagccgaagggacacagttaaaattccaaaaaagaaagagactacgctgttggatttaatggatgctctccccagctcgggccccgcggcccagaaagcagagccctggggcccgtcagcctccactaaccagaccaacccctggggcgggccagcggctcctgcgagtacttcagacccctggccatcgtttggtaccaagccagctgcctccattgacccatggggggtgcccactggagccaccgtacaatctgtccccaagaactcggacccctgggcagcttcacagcagcctgcctccagtgctgggaaaagagcttctgacgcgtggggcgcagtctccaccaccaagcccgtgtctgtctctgggtcctttgagctcttcagtaatctgaatggtacaattaaagatgacttttctgaatttgacaaccttcggacttcaaaaaaaacagccgaatctgtgacctctctgccatcccaaaacaatggaactaccagccctgacccctttgagtctcaacccctgactgtcgcctcaagcaagcccagcagtgcccggaaaacacctgagtccttcctgggccccaacgcggccctggtgaacctggactcactggtgaccaggcctgccccaccagcccagtccctcaaccctttcctggcaccaggtgctcccgccacctcggcccctgttaaccctttccaggtgaaccagccccagccgctgacactgaaccagcttcgggggagcccagtcctggggaccagcacatcctttgggcctggcccaggagtggagtccatggctgtggcctcgatgacctccgcggccccacagccagctctgggggccactggttcctctctgacaccactgggccctgcaatgatgaacatggtgggcagtgtgggtatacccccatcagcagcccaggccactggcacaaccaaccctttccttctctagtgcctgggcctgggacccacccagagcacctgtgctggaggatgccgagcagggactctcgtctgtgggacgggat

SEQ ID NO: 130313 - DNA, 1491 bp, Homo sapiens
  Payload ID: 5498
  Gene Symbol: EPN2
  Gene Name: epsin 2
  ENST ID: ENST00000575595
  CDS Start-End: 206-1255
gtcaaactgagccagacgcggcggtggcggcggctccgcgggctacggtcgctcccgcctctcgagcgctgccggtggccgcagcggcgcacccacgccggcccggaggagcagagccacctccccgcgagtgtcctccgagctggagcaagcccggccccagactagtggagaagaggagcttcagctgcagctggcacttgccatgagcagagaagtggctgagcaggaagaacgcctcaggcggggtgatgacctcagattacagatggccctggaagaaagccgaagggacacagttaaaattccaaaaaagaaagagactacgctgttggatttaatggatgctctccccagctcgggccccgcggcccagaaagcagagccctggggcccgtcagcctccactaaccagaccaacccctggggcgggccagcggctcctgcgagtacttcagacccctggccatcgtttggtaccaagccagctgcctccattgacccatggggggtgcccactggagccaccgtacaatctgtccccaagaactcggacccctgggcagcttcacagcagcctgcctccagtgctgggaaaagagcttctgacgcgtggggcgcagtctccaccaccaagcccgtgtctgtctctgggtcctttgagctcttcagtaatctgaatggtacaattaaagatgacttttctgaatttgacaaccttcggacttcaaaaaaaacagccgaatctgtgacctctctgccatcccaaaacaatggaactaccagccctgacccctttgagtctcaacccctgactgtcgcctcaagcaagcccagcagtgcccggaaaacacctgagtccttcctgggccccaacgcggccctggtgaacctggactcactggtgaccaggcctgccccaccagcccagtccctcaaccctttcctggcaccaggtgctcccgccacctcggcccctgttaaccctttccaggtgaaccagccccagccgctgacactgaaccagcttcgggggagcccagtcctggggaccagcacatcctttgggcctggcccaggagtggagtccatggctgtggcctcgatgacctccgcggccccacagccagctctgggggccactggttcctctctgacaccactgggccctgcaatgatgaacatggtgggcagtgtgggtatacccccatcagcagcccaggccactggcacaaccaaccctttccttctctagtgcctgggcctgggacccacccagagcacctgtgctggaggatgccgagcagggactctcgtctgtgggacgggatccaagagtttggggattaggggtattagggcttttcagctccagcttcctgatgaaagggctgtctttacagccccaaccctcagaccctcgccttccaaggcaggcccctcagcctggcctgctctcaccacctcctccaaagcactgaggtcctggca

SEQ ID NO: 130314 - DNA, 959 bp, Homo sapiens
  Payload ID: 5498
  Gene Symbol: EPN2
  Gene Name: epsin 2
  ENST ID: ENST00000494192
  CDS Start-End: 206-959
gtcaaactgagccagacgcggcggtggcggcggctccgcgggctacggtcgctcccgcctctcgagcgctgccggtggccgcagcggcgcacccacgccggcccggaggagcagagccacctccccgcgagtgtcctccgagctggagcaagcccggccccagactagtggagaagaggagcttcagctgcagctggcacttgccatgagcagagaagtggctgagcaggaagaacgcctcaggcggggtgatgacctcagattacagatggccctggaagaaagccgaagggacacagttaaaattccaaaaaagaaagagcagactacgctgttggatttaatggatgctctccccagctcgggccccgcggcccagaaagcagagccctggggcccgtcagcctccactaaccagaccaacccctggggcgggccagcggctcctgcgagtacttcagacccctggccatcgtttggtaccaagccagctgcctccattgacccatggggggtgcccactggagccaccgtacaatctgtccccaagaactcggacccctgggcagcttcacagcagcctgcctccagtgctgggaaaagagcttctgacgcgtggggcgcagtctccaccaccaagcccgtgtctgtctctgggtcctttgagctcttcagtaatctgaatggtacaattaaagatgacttttctgaatttgacaaccttcggacttcaaaaaaaacagccgaatctgtgacctctctgccatcccaaaacaatggaactaccagccctgacccctttgagtctcaacccctgactgtcgcctcaagcaagcccagcagtgcccggaaaacacctgagtccttcctgggccccaacgcggccctggtgaacctggactcactggtgaccaggcctgccccaccagcccagtccctcaaccctttcctggcaccag

SEQ ID NO: 130315 - DNA, 563 bp, Homo sapiens
  Payload ID: 5498
  Gene Symbol: EPN2
  Gene Name: epsin 2
  ENST ID: ENST00000577195
  CDS Start-End: 377-563
atactgggaagaggtcagctgccccctgtgatttgttttctattcaaggaagcttttggtcccagtctcccatgttccaggtgtgttcatttctgtgtcgggcacagtgctaagtgctgggtgctcactggtgatgaggcagatgaaggttaccaaacttgtggacaggagcctcatatcagagacgtggacctcactgtagcctggtcatggcttccagcttttcgaatctgaggctccaaaggaggaaatgaccattcagggatcttactccagcttgattacggagactgaaccttcatagggtgcgcacttaccaaggacaggaaggtttctctgtttgaagggctttaaacttataacaaagaaaataaaaatgacgacttcgtctatcagacggcagatgaaaaacatcgtgaacaattactcagaggcagaaatcaaagtccgggaagccacctccaatgacccgtggggcccgtccagttctctgatgaccgagattgccgacctgacctacaacgtggtggccttctcggagatcatgagcatggtgtggaagc

SEQ ID NO: 130316 - DNA, 546 bp, Homo sapiens
  Payload ID: 5498
  Gene Symbol: EPN2
  Gene Name: epsin 2
  ENST ID: ENST00000584633
  CDS Start-End: 320-546
gtgtgtacggggtggagtggcctgaaggggattagagtgcgcgcgttcggtgctaagtgctgggtgctcactggtgatgaggcagatgaaggttaccaaacttgtggacaggagcctcatatcagagacgtggacctcactgtagcctggtcatggcttccagcttttcgaatctgaggctccaaaggaggaaatgaccattcagggatcttactccagcttgattacggagactgaaccttcatagggtgcgcacttaccaaggacaggaaggtttctctgtttgaagggctttaaacttataacaaagaaaataaaaatgacgacttcgtctatcagacggcagatgaaaaacatcgtgaacaattactcagaggcagaaatcaaagtccgggaagccacctccaatgacccgtggggcccgtccagttctctgatgaccgagattgccgacctgacctacaacgtggtggccttctcggagatcatgagcatggtgtggaagcggctgaatgaccatggcaagaactggcggcatgtgtacaa

SEQ ID NO: 130317 - DNA, 562 bp, Homo sapiens
  Payload ID: 5498
  Gene Symbol: EPN2
  Gene Name: epsin 2
  ENST ID: ENST00000582015
  CDS Start-End: 465-562
tccttccggccggccccctgctcgcatcttggcttgctgaggctgcgggtcttggccgggccttcgagaatcccccgccgcctccccttctggatgtatctgcgccgcctcctttctccctccccttccttccagcccttcattccctcggggcgggcgggcaggccggcaggccccgcgcaaacctggggaaagtgctaagtgctgggtgctcactggtgatgaggcagatgaaggttaccaaacttgtggacaggagcctcatatcagagacgtggacctcactgtagcctggtcatggcttccagcttttcgaatctgaggctccaaaggaggaaatgaccattcagggatcttactccagcttgattacggagactgaaccttcatagggtgcgcacttaccaaggacaggaaggtttctctgtttgaagggctttaaacttataacaaagaaaataaaaatgacgacttcgtctatcagacggcagatgaaaaacatcgtgaacaattactcagaggcagaaatcaaagtccgggaagccacctccaatgacccgtg

SEQ ID NO: 130318 - DNA, 578 bp, Homo sapiens
  Payload ID: 5498
  Gene Symbol: EPN2
  Gene Name: epsin 2
  ENST ID: ENST00000584150
  CDS Start-End: 518-578
atctgttctctcaagcttgctagccaagttcctccccacaccctaaattgtaatgactgcagcagatgtgagatggatgttccctcctctactccaggccagtttcccaaggcctctgggtaatgtctatgtgattaaacagtctcttgggaatagaactcctttcagttaagcagctctattttccagaaatccctggataattttatgaccatgtggtaaagtgttcatttctgtgtcgggcacagtgctaagtgctgggtgctcactggtgatgaggcagatgaaggttaccaaacttgtggacaggagcctcatatcagagacgtggacctcactgtagcctggtcatggcttccagcttttcgaatctgaggctccaaaggaggaaatgaccattcagggatcttactccagcttgattacggagactgaaccttcatagggtgcgcacttaccaaggacaggaaggtttctctgtttgaagggctttaaacttataacaaagaaaataaaaatgacgacttcgtctatcagacggcagatgaaaaacatcgtgaacaattactcagaggcag

SEQ ID NO: 130319 - DNA, 639 bp, Homo sapiens
  Payload ID: 5498
  Gene Symbol: EPN2
  Gene Name: epsin 2
  ENST ID: ENST00000581024
  CDS Start-End: 526-639
aaactgagccagacgcggcggtggcggcggctccgcgggctacggtcgctcccgcctctcgagcgctgccggtggccgcagcggcgcacccacgccggcccggaggagcagagggtctcactctatcgcccaggctggagtgcagtggcgcaatcttggctcactacaacctccacctctcgggctcaagcagttctcgtgcctcagcctcctgagtaagctgggattacagtgttcatttctgtgtcgggcacagtgctaagtgctgggtgctcactggtgatgaggcagatgaaggttaccaaacttgtggacaggagcctcatatcagagacgtggacctcactgtagcctggtcatggcttccagcttttcgaatctgaggctccaaaggaggaaatgaccattcagggatcttactccagcttgattacggagactgaaccttcatagggtgcgcacttaccaaggacaggaaggtttctctgtttgaagggctttaaacttataacaaagaaaataaaaatgacgacttcgtctatcagacggcagatgaaaaacatcgtgaacaattactcagaggcagaaatcaaagtccgggaagccacctccaatgacccgtggggcccgtccagttct

SEQ ID NO: 130320 - DNA, 637 bp, Homo sapiens
  Payload ID: 5498
  Gene Symbol: EPN2
  Gene Name: epsin 2
  ENST ID: ENST00000583197
  CDS Start-End: 572-637
atgttggctggtgtgtgggtgtcaaactgagccagacgcggcggtggcggcggctccgcgggctacggtcgctcccgcctctcgagcgctgccggtggccgcagcggcgcacccacgccggcccggaggagcagagaaatgaggtctcaccatgttgtccaggctggtcttgaactcctgggctcaagtgatcctcctgccttggcctcccgaagtgctgggattataggcgtgagccactgcacctggccctattcctgtgacagctctcttggaagtgttcatttctgtgtcgggcacagtgctaagtgctgggtgctcactggtgatgaggcagatgaaggttaccaaacttgtggacaggagcctcatatcagagacgtggacctcactgtagcctggtcatggcttccagcttttcgaatctgaggctccaaaggaggaaatgaccattcagggatcttactccagcttgattacggagactgaaccttcatagggtgcgcacttaccaaggacaggaaggtttctctgtttgaagggctttaaacttataacaaagaaaataaaaatgacgacttcgtctatcagacggcagatgaaaaacatcgtgaacaattactcagaggcagaaatc

SEQ ID NO: 130321 - DNA, 591 bp, Homo sapiens
  Payload ID: 5498
  Gene Symbol: EPN2
  Gene Name: epsin 2
  ENST ID: ENST00000577692
  CDS Start-End: 307-591
atgttggctggtgtgtgggtgtcaaactgagccagacgcggcggtggcggcggctccgcgggctacggtcgctcccgcctctcgagcgctgccggtggccgcagcggcgcacccacgccggcccggaggagcagaggtcatggcttccagcttttcgaatctgaggctccaaaggaggaaatgaccattcagggatcttactccagcttgattacggagactgaaccttcatagggtgcgcacttaccaaggacaggaaggtttctctgtttgaagggctttaaacttataacaaagaaaataaaaatgacgacttcgtctatcagacggcagatgaaaaacatcgtgaacaattactcagaggcagaaatcaaagtccgggaagccacctccaatgacccgtggggcccgtccagttctctgatgaccgagattgccgacctgacctacaacgtggtggccttctcggagatcatgagcatggtgtggaagcggctgaatgaccatggcaagaactggcggcatgtgtacaaggcgctgaccctgctggactacctcatcaagacaggctccgaacgtgtggcccagcag

SEQ ID NO: 130322 - DNA, 569 bp, Homo sapiens
  Payload ID: 5498
  Gene Symbol: EPN2
  Gene Name: epsin 2
  ENST ID: ENST00000580579
  CDS Start-End: 272-382
atgttggctggtgtgtgggtgtcaaactgagccagacgcggcggtggcggcggctccgcgggctacggtcgctcccgcctctcgagcgctgccggtggccgcagcggcgcacccacgccggcccggaggagcagagccacctccccgcgagtgtcctccgagctggagcaagcccggccccagactagtggagaagaggagcttcagctgcagctggcacttgccatgagcagagaagtggctgagcaggaagaacgcctcaggcggggtgatgacctcagattacagatggccctggaagaaagccgaagggacacagttaaaattccaaaaaagaaagagcatggctctctcccacagcagactacgctgttggatttaatggatgctctccccagctcgggccccgcggcccagaaagcagagccctggggcccgtcagcctccactaaccagaccaacccctggggcgggccagcggctcctgcgagtacttcagacccctggccatcgtttggtaccaagccagctgcctccattgacccatggggggtgcccactggagccac

SEQ ID NO: 130323 - DNA, 4071 bp, Homo sapiens
  Payload ID: 5499
  Gene Symbol: EPN3
  Gene Name: epsin 3
  Uniprot ID: Q9H201
  ENST ID: ENST00000268933
  CDS Start-End: 580-2478
aaagcagaggggatcaggtcgccagcactggctccagatgtgcacttcctgggggcggccaacaggcaggccccccacctctcaatgcaccacttgcctggccagcaggaaggggttaacctgccctgcacttcctcctgtgtcctgttactgctgaggcagacctgccgggccagctgagcaactttcctcggagtgctgcctggcgctggctaggaggcaaacgcacgcgggaagagctgctacccattccagggaccctgccgctgcccctctgaggggtctgcacctcctgggagcaggtgggtctctgggacgagggtccatggtggatggctctggagacgctcccgaggctgtgccgtcccgctgctgcacaggtcggagggtcaccgcagaggctactcgggctggggctggggccgagggagcccgcactggagccccatgtggaacccaaggatgcagctgctctgctaacacggcagcccatccttcaagactgtgacctcgccacagtggccctcagccctccacctccggcgggggcgagggccacccacctccaagtctccagccatgacgacctccgcactccggcgccaggtgaagaacatcgtgcacaactactccgaggcagaaatcaaggtgcgcgaggccaccagcaatgacccctggggcccccctagttcgctcatgtccgagatcgctgacctgaccttcaacacagtggccttcaccgaagtcatgggcatgctgtggcggcggctcaatgacagcggcaagaactggcggcacgtgtacaaggctctaacattgctggactacctgctcaagacgggctccgagcgggtggcccaccagtgccgcgagaacctctacaccatccagacactcaaggacttccagtacatcgaccgcgacggcaaggaccagggcgtcaacgtgcgcgagaaggtcaagcaggtgatggccctgctcaaggatgaggagcggctgcggcaggagcgaacccacgccctcaagaccaaggagcgcatggcactggagggcatcggcattggcagtgggcagctgggcttcagccgccgctacggcgaggactacagccgctcccggggctccccgtcctcctacaactcctcctcttcgtcaccccgctatacctccgacctggagcaggcccggcctcagacgtcaggggaagaggaactgcagctgcagctggccctcgccatgagccgtgaggaggcagagaagcctgtccccccagcctcccacagggacgaggacctgcagctgcagctggctctgcgcctgagccggcaggagcacgagaaggaggtgaggtcctggcagggtgatggctcccccatggccaatggtgcaggggccgtggtccaccatcagcgggacagagagcctgagagagaagagagaaaggaggaggagaagctaaaaaccagccagtcctccatcctggacttggctgacatcttcgtacctgccctggccccgccctccacacactgctctgctgacccatgggacatcccaggttttaggccgaacacagaggccagtggatcctcctgggggccttctgcagacccctggtctccgatcccctcaggaaccgtcctgtcccgaagccagccctgggatctgactcccatgctctcctcctctgagccctggggcaggaccccagtgctgcctgctgggccccccaccacagacccctgggccctgaactctccccaccacaaactccccagcactggggctgacccttggggagcctccctggagacctccgacacacctggtggtgcctcgacctttgacccatttgccaaacctccagaatccacagagaccaaggaggggctggagcaggccctgccctctgggaagcccagcagccctgtggagctggacctgtttggagaccccagccccagttccaagcaaaatggcacgaaggagccagatgccctggacctgggcatactaggggaagcactaacccagccaagcaaagaggcccgagcttgccggactcccgagtccttcctgggtccctcagcttcctccttggtcaaccttgactcgttggtcaaggcaccccaggttgcaaagacccggaaccccttcctgacaggtctcagcgctccgtcccccaccaacccgttcggcgcgggcgagccgggcaggccgacgctaaaccagatgcgcaccggctcgccggcgctgggcctggcaggcgggcctgtgggggcgcccctgggctccatgacctacagcgcctctctgcccctcccgctcagcagcgtgccagctggcttgaccctccccgcctcggttagcgtcttcccgcaggccggagccttcgcaccgcagccgctgctgcccacgccgagctcagccgggccgcggcccccgcccccgcagaccggcaccaaccccttcctctgagccccgccccgtcccataccggcctgcgcctgcgccggacgctccgcggccccgcctccggacccggggctgggcggggcgccggtgctagtggaacgccgagccagtggcggctggtatcccgcggcggctctggaagctggacgcggaccacggcccgggagctagaaactgaacgcccgcataataaagactggaaccctcgttctcagctctcaccaagtggactttttgcggggtgtggcggccgggtctcgaccacagcgtggatcaccggctgtttaggaaactgcagctgcacaacgtggggtgcaaaactgccccgcttcctttacagctcttctcaaccctcacctccatcccccgtcacccaggcaccttcgcttccagatgctgccaggctgtcactcaattcggtcatttcattcatttatcacacatgggcactggggttgggctaacagcaagagacaataggcctttgttcctatttattgggtactgcttacgtgctaagcagatcagtttatttaatgcttgcaacgactctctgaggtagaaaatattgttaattccgttcaggatcccggctacataatctgtggggctcaatacaaaataaaaatgtaggggctccttgttcaaaatcgtatgaagaatttcaaaacagggacaacagagcatgaaaccaagcgcaaagcccactgcagtgcgattgcacaggtatctcaccttgcagccggcactactcccatttttcaggcaaggaaaccgtggctcagagaggttgaatggcatgctcaaagtcacaaagctggcatggggcggggctggaactcaagagtcagacagtctggctccaaggcctggagatcccaggctgggccccagatttaattcagcaaatattgactgactgctgtggacaaagtgctgggctcaccttggagggatccaacctccaggagctcgagcgcagcagggtagacaagccaggggcacgtgatgcggctgtggcagaagccaagtgcaggagctcccaggctcctttgttttactgagtcaccttaaatgtaactctgccctctcccttgcttcgccaaggctagcgagaaactcagtcttagccacacaggaggaatcggaccccttctgggggtttatgtggagtctgggaaaccaagggtggggtgaggcctggtactcaatccaggaggggcccctatgaccaccctcgcctgtttttcttctcaatgctccctgatcactggaccactggacactgatgtgtcctcagtgcttggggtctggctctgcaggcagcctgcagccagcctccatccccctttcagggacaaatggccttccaccagagtcggtgagtggagaggcacaatgccactccccttcctgaggtgggggtaggggaagggagtcccacaatgcagttacaaacaggatggacaagaacacctgctcaggagtcagacttacagggttcaaagttctgctccaaggtttgaccctaacaagaatcacttagtaataagtggttatgctctgtgaccttgagtaaattacttaccctctcca

SEQ ID NO: 130324 - DNA, 810 bp, Homo sapiens
  Payload ID: 5499
  Gene Symbol: EPN3
  Gene Name: epsin 3
  ENST ID: ENST00000507467
  CDS Start-End: 403-810
agcaagggggagggcaggagttaaacaagttgtggccgtggcattcccacagaaggcccacgacccgctggaaggaaagagatagcagacaaaagggtctcgctctgttgcccagtggcctgaccatggctcactgcagcctccaactactggcctcaagtgatcctcttgccttggcctcctgaagtcctggaattacaggcgtgagccactgcaccgggcccatttaatactctgagccccacctttcccatctgtggatggagccccatgtggaacccaaggatgcagctgctctgctaacacggcagcccatccttcaagactgtgacctcgccacagtggccctcagccctccacctccggcgggggcgagggccacccacctccaagtctccagccatgacgacctccgcactccggcgccaggtgaagaacatcgtgcacaactactccgaggcagaaatcaaggtgcgcgaggccaccagcaatgacccctggggcccccctagttcgctcatgtccgagatcgctgacctgaccttcaacacagtggccttcaccgaagtcatgggcatgctgtggcggcggctcaatgacagcggcaagaactggcggcacgtgtacaaggctctaacattgctggactacctgctcaagacgggctccgagcgggtggcccaccagtgccgcgagaacctctacaccatccagacactcaaggacttccagtacatcgaccgcgacggcaaggaccagggcgtcaacgtgcgcgagaaggtcaagcaggtgatggccctgctcaaggat

SEQ ID NO: 130325 - DNA, 2260 bp, Homo sapiens
  Payload ID: 5499
  Gene Symbol: EPN3
  Gene Name: epsin 3
  Uniprot ID: Q9H201
  ENST ID: ENST00000510045
  CDS Start-End: 365-991
ggaggcaaacgcacgcgggaagagctgctacccattccagggaccctgccgctgcccctctgaggggtctgcacctcctgggagcaggtgggtctctgggacgagggtccatggtggatggctctggagacgctcccgaggctgtgccgtcccgctgctgcacaggtcggagggtcaccgcagaggctactcgggctggggctggggccgagggagcccgcactggagccccatgtggaacccaaggatgcagctgctctgctaacacggcagcccatccttcaagactgtgacctcgccacagtggccctcagccctccacctccggcgggggcgagggccacccacctccaagtctccagccatgacgacctccgcactccggcgccaggtgaagaacatcgtgcacaactactccgaggcagaaatcaaggtgcgcgaggccaccagcaatgacccctggggcccccctagttcgctcatgtccgagatcgctgacctgaccttcaacacagtggccttcaccgaagtcatgggcatgctgtggcggcggctcaatgacagcggcaagaactggcggcacgtgtacaaggctctaacattgctggactacctgctcaagacgggctccgagcgggtggcccaccagtgccgcgagaacctctacaccatccagacactcaaggacttccagtacatcgaccgcgacggcaaggaccagggcgtcaacgtgcgcgagaaggtcaagcaggtgatggccctgctcaaggatgaggagcggctgcggcaggagcgaacccacgccctcaagaccaaggagcgcatggcactggagggcatcggcattggcagtgggcagctgggcttcagccgccgctacggcgaggactacagccgctcccggggctccccgtcctcctacaactgcccggcctcagacgtcaggggaagaggaactgcagctgcagctggccctcgccatgagccgtgaggaggcagagaaggaggtgaggtcctggcagggtgatggctcccccatggccaatggtgcaggggccgtggtccaccatcagcgggacagagagcctgagagagaagagagaaaggaggaggagaagctaaaaaccagccaggttttaggccgaacacagaggccagtggatcctcctgggggccttctgcagacccctggtctccgatcccctcaggaaccgtcctgtcccgaagccagccctgggatctgactcccatgctctcctcctctgagccctggggcaggaccccagtgctgcctgctgggccccccaccacagacccctgggccctgaactctccccaccacaaactccccagcactggggctgacccttggggagcctccctggagacctccgacacacctggtggtgcctcgacctttgacccatttgccaaacctccagaatccacagagaccaaggaggggctggagcaggccctgccctctgggaagcccagcagccctgtggagctggacctgtttggagaccccagccccagttccaagcaaaatggcacgaaggagccagatgccctggacctgggcatactaggggaagcactaacccagccaagcaaagaggcccgagcttgccggactcccgagtccttcctgggtccctcagcttcctccttggtcaaccttgactcgttggtcaaggcaccccaggttgcaaagacccggaaccccttcctgacaggtctcagcgctccgtcccccaccaacccgttcggcgcgggcgagccgggcaggccgacgctaaaccagatgcgcaccggctcgccggcgctgggcctggcaggcgggcctgtgggggcgcccctgggctccatgacctacagcgcctctctgcccctcccgctcagcagcgtgccagctggcttgaccctccccgcctcggttagcgtcttcccgcaggccggagccttcgcaccgcagccgctgctgcccacgccgagctcagccgggccgcggcccccgcccccgcagaccggcaccaaccccttcctctgagccccgccccgtcccataccggcctgcgcctgcgccggacgctccgcggccccgcctccggacccggggctgggcggggcgccggtgctagtggaacgccgagccagtggcggctggtatcccgcggcggctctggaagctggacgcggaccacggcccgggagctagaaactgaacgcccgcataataaagactggaaccctcgtt

SEQ ID NO: 130326 - DNA, 1675 bp, Homo sapiens
  Payload ID: 5499
  Gene Symbol: EPN3
  Gene Name: epsin 3
  ENST ID: ENST00000512291
  CDS Start-End: 244-396
gtgctgcctggcgctggctaggaggcaaacgcacgcgggaagagctgctacccattccagggaccctgccgctgcccctctgaggggtctgcacctcctgggagcagccccatgtggaacccaaggatgcagctgctctgctaacacggcagcccatccttcaagactgtgacctcgccacagtggccctcagccctccacctccggcgggggcgagggccacccacctccaagtctccagccatgacgacctccgcactccggcgccaggtgaagaacatcgtgcacaactactccgaggcagaaatcaagtggccttcaccgaagtcatgggcatgctgtggcggcggctcaatgacagcggcaagaactggcggcacgtgtacaaggctctaacattgctggactacctgctcaagacgggctccgagcgggtggcccaccagtgccgcgagaacctctacaccatccagacactcaaggacttccagtacatcgaccgcgacggcaaggaccagggcgtcaacgtgcgcgagaaggtcaagcaggtgatggccctgctcaaggatgaggagcggctgcggcaggagcgaacccacgccctcaagaccaaggagcgcatggcactggagggcatcggcattggcagtgggcagctgggcttcagccgccgctacggcgaggactacagccgctcccggggctccccgtcctcctacaactcctcctcttcgtcaccccgctatacctccgacctggagcaggcccggcctcagacgtcaggggaagaggaactgcagctgcagctggccctcgccatgagccgtgaggaggcagagaaggaggtgaggtcctggcagggtgatggctcccccatggccaatggtgcaggggccgtggtccaccatcagcgggacagagagcctgagagagaagagagaaaggaggaggagaagctaaaaaccagccaggttttaggccgaacacagaggccagtggatcctcctgggggccttctgcagacccctggtctccgatcccctcaggaaccgtcctgtcccgaagccagccctgggatctgactcccatgctctcctcctctgagccctggggcaggaccccagtgctgcctgctgggccccccaccacagacccctgggccctgaactctccccaccacaaactccccagcactggggctgacccttggggagcctccctggagacctccgacacacctggtggtgcctcgacctttgacccatttgccaaacctccagaatccacagagaccaaggaggggctggagcaggccctgccctctgggaagcccagcagccctgtggagctggacctgtttggagaccccagccccagttccaagcaaaatggcacgaaggagccagatgccctggacctgggcatactaggggaagcactaacccagccaagcaaagaggcccgagcttgccggactcccgagtccttcctgggtccctcagcttcctccttggtcaaccttgactcgttggtcaaggcaccccaggttgcaaagacccggaaccccttcctgacaggtctcagcgctccgtcccccaccaacccgttcggcgcgggcgagccgggcaggccgacgctaaaccagatgcgcaccggctcgccggcgctgggcctg

SEQ ID NO: 130327 - DNA, 2449 bp, Homo sapiens
  Payload ID: 5499
  Gene Symbol: EPN3
  Gene Name: epsin 3
  ENST ID: ENST00000512379
  CDS Start-End: 385-537
gtgctgcctggcgctggctaggaggcaaacgcacgcgggaagagctgctacccattccagggaccctgccgctgcccctctgaggggtctgcacctcctgggagcaggtgggtctctgggacgagggtccatggtggatggctctggagacgctcccgaggctgtgccgtcccgctgctgcacaggtcggagggtcaccgcagaggctactcgggctggggctggggccgagggagcccgcactggagccccatgtggaacccaaggatgcagctgctctgctaacacggcagcccatccttcaagactgtgacctcgccacagtggccctcagccctccacctccggcgggggcgagggccacccacctccaagtctccagccatgacgacctccgcactccggcgccaggtgaagaacatcgtgcacaactactccgaggcagaaatcaagtggccttcaccgaagtcatgggcatgctgtggcggcggctcaatgacagcggcaagaactggcggcacgtgtacaaggctctaacattgctggactacctgctcaagacgggctccgagcgggtggcccaccagtgccgcgagaacctctacaccatccagacactcaaggacttccagtacatcgaccgcgacggcaaggaccagggcgtcaacgtgcgcgagaaggtcaagcaggtgatggccctgctcaaggatgaggagcggctgcggcaggagcgaacccacgccctcaagaccaaggagcgcatggcactggagggcatcggcattggcagtgggcagctgggcttcagccgccgctacggcgaggactacagccgctcccggggctccccgtcctcctacaactcctcctcttcgtcaccccgctatacctccgacctggagcaggcccggcctcagacgtcaggggaagaggaactgcagctgcagctggccctcgccatgagccgtgaggaggcagagaaggaggtgaggtcctggcagggtgatggctcccccatggccaatggtgcaggggccgtggtccaccatcagcgggacagagagcctgagagagaagagagaaaggaggaggagaagctaaaaaccagccagtcctccatcctggacttggctgacatcttcgtacctgccctggccccgccctccacacactgctctgctgacccatgggacatcccaggttttaggccgaacacagaggccagtggatcctcctgggggccttctgcagacccctggtctccgatcccctcaggaaccgtcctgtcccgaagccagccctgggatctgactcccatgctctcctcctctgagccctggggcaggaccccagtgctgcctgctgggccccccaccacagacccctgggccctgaactctccccaccacaaactccccagcactggggctgacccttggggagcctccctggagacctccgacacacctggtggtgcctcgacctttgacccatttgccaaacctccagaatccacagagaccaaggaggggctggagcaggccctgccctctgggaagcccagcagccctgtggagctggacctgtttggagaccccagccccagttccaagcaaaatggcacgaaggagccagatgccctggacctgggcatactaggggaagcactaacccagccaagcaaagaggcccgagcttgccggactcccgagtccttcctgggtccctcagcttcctccttggtcaaccttgactcgttggtcaaggcaccccaggttgcaaagacccggaaccccttcctgacaggtctcagcgctccgtcccccaccaacccgttcggcgcgggcgagccgggcaggccgacgctaaaccagatgcgcaccggctcgccggcgctgggcctggcaggcgggcctgtgggggcgcccctgggctccatgacctacagcgcctctctgcccctcccgctcagcagcgtgccagctggcttgaccctccccgcctcggttagcgtcttcccgcaggccggagccttcgcaccgcagccgctgctgcccacgccgagctcagccgggccgcggcccccgcccccgcagaccggcaccaaccccttcctctgagccccgccccgtcccataccggcctgcgcctgcgccggacgctccgcggccccgcctccggacccggggctgggcggggcgccggtgctagtggaacgccgagccagtggcggctggtatcccgcggcggctctggaagctggacgcggaccacggcccgggagctagaaactgaacgcccgcataataaagactggaaccctcgttctcagctctcaccaagtggactttttgcggggtgtggcggccgggtctcgaccacagcgtggatcaccggctgtttaggaaactgcagctgcacaacgtggggtgcaaaactgccccgcttc

SEQ ID NO: 130328 - DNA, 560 bp, Homo sapiens
  Payload ID: 5499
  Gene Symbol: EPN3
  Gene Name: epsin 3
  ENST ID: ENST00000515126
  CDS Start-End: 235-560
actagcaagggggagggcaggagttaaacaagttgtggccgtggcattcccacagaaggcccacgacccgctggaaggaaagagatagcagacaaaagccccatgtggaacccaaggatgcagctgctctgctaacacggcagcccatccttcaagactgtgacctcgccacagtggccctcagccctccacctccggcgggggcgagggccacccacctccaagtctccagccatgacgacctccgcactccggcgccaggtgaagaacatcgtgcacaactactccgaggcagaaatcaaggtgcgcgaggccaccagcaatgacccctggggcccccctagttcgctcatgtccgagatcgctgacctgaccttcaacacagtggccttcaccgaagtcatgggcatgctgtggcggcggctcaatgacagcggcaagaactggcggcacgtgtacaaggctctaacattgctggactacctgctcaagacgggctccgagcgggtggcccaccagtgccgcgagaacctctacaccatccagacactcaaggactt

SEQ ID NO: 130329 - DNA, 580 bp, Homo sapiens
  Payload ID: 5499
  Gene Symbol: EPN3
  Gene Name: epsin 3
  ENST ID: ENST00000514874
  CDS Start-End: 428-580
aactttcctcggagtgctgcctggcgctggctaggaggcaaacgcacgcgggaagagctgctacccattccagggaccctgccgctgcccctctgaggggtctgcacctcctgggagcagggtctcgctctgttgcccagtggcctgaccatggctcactgcagcctccaactactggcctcaagtgatcctcttgccttggcctcctgaagtcctggaattacaggcgtgagccactgcaccgggcccatttaatactctgagccccacctttcccatctgtggatggagccccatgtggaacccaaggatgcagctgctctgctaacacggcagcccatccttcaagactgtgacctcgccacagtggccctcagccctccacctccggcgggggcgagggccacccacctccaagtctccagccatgacgacctccgcactccggcgccaggtgaagaacatcgtgcacaactactccgaggcagaaatcaaggtgcgcgaggccaccagcaatgacccctggggcccccctagttcgctcatgtccgagatcgctgacctgaccttcaacacagtg

SEQ ID NO: 130330 - DNA, 603 bp, Homo sapiens
  Payload ID: 5499
  Gene Symbol: EPN3
  Gene Name: epsin 3
  ENST ID: ENST00000503690
  CDS Start-End: 569-603
aactttcctcggagtgctgcctggcgctggctaggaggcaaacgcacgcgggaagagctgctacccattccagggaccctgccgctgcccctctgaggggtctgcacctcctgggagcaggtgggtctctgggacgagggtccatggtggatggctctggagacgctcccgaggctgtgccgtcccgctgctgcacaggtcggagggtcaccgcagaggctactcgggctggggctggggccgagggagcccgcactggagggtctcgctctgttgcccagtggcctgaccatggctcactgcagcctccaactactggcctcaagtgatcctcttgccttggcctcctgaagtcctggaattacaggcgtgagccactgcaccgggcccatttaatactctgagccccacctttcccatctgtggatggagccccatgtggaacccaaggatgcagctgctctgctaacacggcagcccatccttcaagactgtgacctcgccacagtggccctcagccctccacctccggcgggggcgagggccacccacctccaagtctccagccatgacgacctccgcactccggcgccaggtgaagaa

SEQ ID NO: 130331 - DNA, 558 bp, Homo sapiens
  Payload ID: 5499
  Gene Symbol: EPN3
  Gene Name: epsin 3
  ENST ID: ENST00000507709
  CDS Start-End: 506-558
atttcccatcttgactctgccacccccagccacgggttggggaggtgaaggcaggtctgagtcactagcaagggggagggcaggagttaaacaagttgtggccgtggcattcccacagaaggcccacgacccgctggaaggaaagagatagcagacaaaagggtctcgctctgttgcccagtggcctgaccatggctcactgcagcctccaactactggcctcaagtgatcctcttgccttggcctcctgaagtcctggaattacaggcgtgagccactgcaccgggcccatttaatactctgagccccacctttcccatctgtggatggaggtaatgataatagcatctttggggtgtggctgtgaagatagatagatgagcatgcaaagctccaagtgcctgctgaattgtaagtgaagaacatcgtgcacaactactccgaggcagaaatcaaggtgcgcgaggccaccagcaatgacccctggggcccccctagttcgctcatgtccgagatcgctgacctgaccttcaacacagtggccttcaccgaagtcat

SEQ ID NO: 130332 - DNA, 804 bp, Homo sapiens
  Payload ID: 5499
  Gene Symbol: EPN3
  Gene Name: epsin 3
  ENST ID: ENST00000503246
  CDS Start-End: 300-804
gtgtcctgttactgctgaggcagacctgccgggccagctgagcaactttcctcggagtgctgcctggcgctggctaggaggcaaacgcacgcgggaagagctgctacccattccagggaccctgccgctgcccctctgaggggtctgcacctcctgggagcagccccatgtggaacccaaggatgcagctgctctgctaacacggcagcccatccttcaagactgtgacctcgccacagtggccctcagccctccacctccggcgggggcgagggccacccacctccaagtctccagccatgacgacctccgcactccggcgccaggtgaagaacatcgtgcacaactactccgaggcagaaatcaaggtgcgcgaggccaccagcaatgacccctggggcccccctagttcgctcatgtccgagatcgctgacctgaccttcaacacagtggccttcaccgaagtcatgggcatgctgtggcggcggctcaatgacagcggcaagaactggcggcacgtgtacaaggctctaacattgctggactacctgctcaagacgggctccgagcgggtggcccaccagtgccgcgagaacctctacaccatccagacactcaaggacttccagtacatcgaccgcgacggcaaggaccagggcgtcaacgtgcgcgagaaggtcaagcaggtgatggccctgctcaaggatgaggagcggctgcggcaggagcgaacccacgccctcaagaccaaggagcgcatggcactggagggcatcggcattggcagtgggcagctgggcttca

SEQ ID NO: 130333 - DNA, 2223 bp, Homo sapiens
  Payload ID: 5499
  Gene Symbol: EPN3
  Gene Name: epsin 3
  ENST ID: ENST00000537145
  CDS Start-End: 131-1087
gtggaacccaaggatgcagctgctctgctaacacggcagcccatccttcaagactgtgacctcgccacagtggccctcagccctccacctccggcgggggcgagggccacccacctccaagtctccagccatgacgacctccgcactccggcgccaggtgaagaacatcgtgcacaactactccgaggcagaaatcaaggtgcgcgaggccaccagcaatgacccctggggcccccctagttcgctcatgtccgagatcgctgacctgaccttcaacacagtggccttcaccgaagtcatgggcatgctgtggcggcggctcaatgacagcggcaagaactggcggcacgtgtacaaggctctaacattgctggactacctgctcaagacgggctccgagcgggtggcccaccagtgccgcgagaacctctacaccatccagacactcaaggacttccagtacatcgaccgcgacggcaaggaccagggcgtcaacgtgcgcgagaaggtcaagcaggtgatggccctgctcaaggatgaggagcggctgcggcaggagcgaacccacgccctcaagaccaaggagcgcatggcactggagggcatcggcattggcagtgggcagctgggcttcagccgccgctacggcgaggactacagccgctcccggggctccccgtcctcctacaactcctcctcttcgtcaccccgctatacctccgacctggagcaggcccggcctcagacgtcaggggaagaggaactgcagctgcagctggccctcgccatgagccgtgaggaggcagagaagcctgtccccccagcctcccacagggacgaggacctgcagctgcagctggctctgcgcctgagccggcaggagcacgagaaggaggtgaggtcctggcagggtgatggctcccccatggccaatggtgcaggggccgtggtccaccatcagcgggacagagagcctgagagagaagagagaaaggaggaggagaagctaaaaaccagccaggccccgcccacttctgagccgcggctgcctctcccctccacagtcctccatcctggacttggctgacatcttcgtacctgccctggccccgccctccacacactgctctgctgacccatgggacatcccaggttttaggccgaacacagaggccagtggatcctcctgggggccttctgcagacccctggtctccgatcccctcaggaaccgtcctgtcccgaagccagccctgggatctgactcccatgctctcctcctctgagccctggggcaggaccccagtgctgcctgctgggccccccaccacagacccctgggccctgaactctccccaccacaaactccccagcactggggctgacccttggggagcctccctggagacctccgacacacctggtggtgcctcgacctttgacccatttgccaaacctccagaatccacagagaccaaggaggggctggagcaggccctgccctctgggaagcccagcagccctgtggagctggacctgtttggagaccccagccccagttccaagcaaaatggcacgaaggagccagatgccctggacctgggcatactaggggaagcactaacccagccaagcaaagaggcccgagcttgccggactcccgagtccttcctgggtccctcagcttcctccttggtcaaccttgactcgttggtcaaggcaccccaggttgcaaagacccggaaccccttcctgacaggtctcagcgctccgtcccccaccaacccgttcggcgcgggcgagccgggcaggccgacgctaaaccagatgcgcaccggctcgccggcgctgggcctggcaggcgggcctgtgggggcgcccctgggctccatgacctacagcgcctctctgcccctcccgctcagcagcgtgccagctggcttgaccctccccgcctcggttagcgtcttcccgcaggccggagccttcgcaccgcagccgctgctgcccacgccgagctcagccgggacgcggaccacggcccgggagctagaaactgaacgcccgcataataaagactggaaccctcgttctcagctctcaccaagtggactttttgcggggtgtggcggccgggtctcgaccacagcgtggatcaccggctgtttaggaaactgcagctgcacaacgtggggtgcaaaactgccccgcttcctttacagct

SEQ ID NO: 130334 - DNA, 2036 bp, Homo sapiens
  Payload ID: 5499
  Gene Symbol: EPN3
  Gene Name: epsin 3
  ENST ID: ENST00000574464
  CDS Start-End: 131-1087
gtggaacccaaggatgcagctgctctgctaacacggcagcccatccttcaagactgtgacctcgccacagtggccctcagccctccacctccggcgggggcgagggccacccacctccaagtctccagccatgacgacctccgcactccggcgccaggtgaagaacatcgtgcacaactactccgaggcagaaatcaaggtgcgcgaggccaccagcaatgacccctggggcccccctagttcgctcatgtccgagatcgctgacctgaccttcaacacagtggccttcaccgaagtcatgggcatgctgtggcggcggctcaatgacagcggcaagaactggcggcacgtgtacaaggctctaacattgctggactacctgctcaagacgggctccgagcgggtggcccaccagtgccgcgagaacctctacaccatccagacactcaaggacttccagtacatcgaccgcgacggcaaggaccagggcgtcaacgtgcgcgagaaggtcaagcaggtgatggccctgctcaaggatgaggagcggctgcggcaggagcgaacccacgccctcaagaccaaggagcgcatggcactggagggcatcggcattggcagtgggcagctgggcttcagccgccgctacggcgaggactacagccgctcccggggctccccgtcctcctacaactcctcctcttcgtcaccccgctatacctccgacctggagcaggcccggcctcagacgtcaggggaagaggaactgcagctgcagctggccctcgccatgagccgtgaggaggcagagaagcctgtccccccagcctcccacagggacgaggacctgcagctgcagctggctctgcgcctgagccggcaggagcacgagaaggaggtgaggtcctggcagggtgatggctcccccatggccaatggtgcaggggccgtggtccaccatcagcgggacagagagcctgagagagaagagagaaaggaggaggagaagctaaaaaccagccaggccccgcccacttctgagccgcggctgcctctcccctccacagtcctccatcctggacttggctgacatcttcgtacctgccctggccccgccctccacacactgctctgctgacccatgggacatcccaggttttaggccgaacacagaggccagtggatcctcctgggggccttctgcagacccctggtctccgatcccctcaggaaccgtcctgtcccgaagccagccctgggatctgactcccatgctctcctcctctgagccctggggcaggaccccagtgctgcctgctgggccccccaccacagacccctgggccctgaactctccccaccacaaactccccagcactggggctgacccttggggagcctccctggagacctccgacacacctggtggtgcctcgacctttgacccatttgccaaacctccagaatccacagagaccaaggaggggctggagcaggccctgccctctgggaagcccagcagccctgtggagctggacctgtttggagaccccagccccagttccaagcaaaatggcacgaaggagccagatgccctggacctgggcatactaggggaagcactaacccagccaagcaaagaggcccgagcttgccggactcccgagtccttcctgggtccctcagcttcctccttggtcaaccttgactcgttggtcaaggcaccccaggttgcaaagacccggaaccccttcctgacaggtctcagcgctccgtcccccaccaacccgttcggcgcgggcgagccgggcaggccgacgctaaaccagatgcgcaccggctcgccggcgctgggcctggcaggcgggcctgtgggggcgcccctgggctccatgacctacagcgcctctctgcccctcccgctcagcagcgtgccagctggcttgaccctccccgcctcggttagcgtcttcccgcaggccggagccttcgcaccgcagccgctgctgcccacgccgagctcagccgggccgcggccc

SEQ ID NO: 130335 - DNA, 1186 bp, Homo sapiens
  Payload ID: 5500
  Gene Symbol: EBI3
  Gene Name: Epstein-Barr virus induced 3
  Uniprot ID: Q14213
  ENST ID: ENST00000221847
  CDS Start-End: 54-743
caagtctcccacgacgttcccacccactcctgagagcagagctggccgcagccatgaccccgcagcttctcctggcccttgtcctctgggccagctgcccgccctgcagtggaaggaaagggcccccagcagctctgacactgccccgggtgcaatgccgagcctctcggtacccgatcgccgtggattgctcctggaccctgccgcctgctccaaactccaccagccccgtgtccttcattgccacgtacaggctcggcatggctgcccggggccacagctggccctgcctgcagcagacgccaacgtccaccagctgcaccatcacggatgtccagctgttctccatggctccctacgtgctcaatgtcaccgccgtccacccctggggctccagcagcagcttcgtgcctttcataacagagcacatcatcaagcccgaccctccagaaggcgtgcgcctaagccccctcgctgagcgccagctacaggtgcagtgggagcctcccgggtcctggcccttcccagagatcttctcactgaagtactggatccgttacaagcgtcagggagctgcgcgcttccaccgggtggggcccattgaagccacgtccttcatcctcagggctgtgcggccccgagccaggtactacgtccaagtggcggctcaggacctcacagactacggggaactgagtgactggagtctccccgccactgccacaatgagcctgggcaagtagcaagggcttcccgctgcctccagacagcacctgggtcctcgccaccctaagccccgggacacctgttggagggcggatgggatctgcctagcctgggctggagtccttgctttgctgctgctgagctgccgggcaacctcagatgaccgacttttccctttgagcctcagtttctctagctgagaaatggagatgtactactctctcctttacctttacctttaccacagtgcagggctgactgaactgtcactgtgagatattttttattgtttaattagaaaagaattgttgttgggctgggcgcagtggatcgcacctgtaatcccagtcactgggaagccgacgtgggagggtagcttgaggccaggagctcgaaaccagtccgggccacacagcaagaccccatctctaaaaaattaatataaatataaaataaatta

SEQ ID NO: 130336 - DNA, 725 bp, Homo sapiens
  Payload ID: 5501
  Gene Symbol: EQTN
  Gene Name: equatorin, sperm acrosome associated
  Uniprot ID: Q9NQ60
  ENST ID: ENST00000380031
  CDS Start-End: 82-465
agacacaggacctgctgggccacagaaaggaggctctgggtagacgcactagattactggataaatcacttcaatttcccaatgaattttatattgtttatttttatacctggagttttttccttaaaaagtagcactttgaagcctactattgaagcattgcctaatgtgctacctttaaatgaagatgttaataagcaggaagaaaagaatgaagatcatactcccaattatgctcctgctaatgagaaaaatggcaattattataaagatataaaacaatatgtgttcacaacacaaaatccaaatggcactgagtctgaaatatctgtgagagccacaactgacctgaattttgctctaaaaaacgataaaactgtcaatgcaactacatatgaaaaatccaccattgaagaagaaacaactactagcgaaccctctcataaaaatattcaaagtatttaaattactacactgtattcatacctggagaatatcattatgtgacttaaaaatttaagtttcactactctgagcattacataaagccatagcatgcttaaagaatttatactgctaccttttaaagtcactaaaatcttttaaatggtgaatgtctaacagtcagtcttcaggtatacctgacaaaggatgagaaatgagcttttgtagaaatagaactttattttaataaaaatgtgttacatttgtgtctatattaaata

SEQ ID NO: 130337 - DNA, 1033 bp, Homo sapiens
  Payload ID: 5501
  Gene Symbol: EQTN
  Gene Name: equatorin, sperm acrosome associated
  Uniprot ID: Q9NQ60
  ENST ID: ENST00000380032
  CDS Start-End: 85-969
gttagacacaggacctgctgggccacagaaaggaggctctgggtagacgcactagattactggataaatcacttcaatttcccaatgaattttatattgtttatttttatacctggagttttttccttaaaaagtagcactttgaagcctactattgaagcattgcctaatgtgctacctttaaatgaagatgttaataagcaggaagaaaagaatgaagatcatactcccaattatgctcctgctaatgagaaaaatggcaattattataaagatataaaacaatatgtgttcacaacacaaaatccaaatggcactgagtctgaaatatctgtgagagccacaactgacctgaattttgctctaaaaaacgataaaactgtcaatgcaactacatatgaaaaatccaccattgaagaagaaacaactactagcgaaccctctcataaaaatattcaaagatcaaccccaaacgtgcctgcattttggacaatgttagctaaagctataaatggaacagcagtggtcatggatgataaagatcaattatttcacccaattccagagtctgatgtgaatgctacacagggagaaaatcagccagatctagaggatctgaagatcaaaataatgctgggaatctcgttgatgaccctcctcctctttgtggtcctcttggcattctgtagtgctacactgtacaaactgaggcatctgagttataaaagttgtgagagtcagtactctgtcaacccagagctggccacgatgtcttactttcatccatcagaaggtgtttcagatacatccttttccaagagtgcagagagcagcacatttttgggtaccacttcttcagatatgagaagatcaggcacaagaacatcagaatctaagataatgacggatatcatttccataggctcagataatgagatgcatgaaaacgatgagtcggttacccggtgaagaaatcaaggaacccggtgaagaaatcttattgatgaataaataactttaattattttgtcat

SEQ ID NO: 130338 - DNA, 879 bp, Homo sapiens
  Payload ID: 5501
  Gene Symbol: EQTN
  Gene Name: equatorin, sperm acrosome associated
  Uniprot ID: Q9NQ60
  ENST ID: ENST00000537675
  CDS Start-End: 82-879
agacacaggacctgctgggccacagaaaggaggctctgggtagacgcactagattactggataaatcacttcaatttcccaatgaattttatattgtttatttttatacctggagttttttccttaaaaagtagcactttgaagcctactattgaagcattgcctaatgtgctacctttaaatgaagatgttaataagcaggaagaaaagaatgaagatcatactcccaattatgctcctgctaatgagaaaaatggcaattattataaagatataaaacaatatgtgttcacaacacaaaatccaaatggcactgagtctgaaatatctgtgagagccacaactgacctgaattttgctctaaaaaacggatcaaccccaaacgtgcctgcattttggacaatgttagctaaagctataaatggaacagcagtggtcatggatgataaagatcaattatttcacccaattccagagtctgatgtgaatgctacacagggagaaaatcagccagatctagaggatctgaagatcaaaataatgctgggaatctcgttgatgaccctcctcctctttgtggtcctcttggcattctgtagtgctacactgtacaaactgaggcatctgagttataaaagttgtgagagtcagtactctgtcaacccagagctggccacgatgtcttactttcatccatcagaaggtgtttcagatacatccttttccaagagtgcagagagcagcacatttttgggtaccacttcttcagatatgagaagatcaggcacaagaacatcagaatctaagataatgacggatatcatttccataggctcagataatgagatgcatgaaaacgatgagtcggttacccggtga

SEQ ID NO: 130339 - DNA, 6146 bp, Homo sapiens
  Payload ID: 5502
  Gene Symbol: EDEM1
  Gene Name: ER degradation enhancer, mannosidase alpha-like 1
  Uniprot ID: Q92611
  ENST ID: ENST00000256497
  CDS Start-End: 134-2107
ggctagttcctggtgcgtcacgggggagttccttaaaggggaagcgagccgggctacggggcgagcgcggggtgcggtggtcggcggggaggcccccgcgctttaaaataatgcccgcggcgcccgcgcgaccatgcaatggcgagcgctcgtcctggggctggtgctcctccggcttggcctccatggagtattgtggctcgtcttcgggctggggcccagcatgggcttctaccagcgctttccgctcagcttcggcttccagcgtctgaggagccccgacggccccgcgtcgcccacctcggggcccgtgggccggcctgggggggtatccgggccgtcgtggctgcagccgccggggaccggggcagcgcagagcccgcgcaaggctccgcggcgtcctgggccggggatgtgcggcccagccaactggggctacgtgctgggcggccggggccgcggcccggacgagtacgagaagcgctacagcggcgccttccctccgcagctgcgtgcccagatgcgcgacctggcacggggcatgttcgtctttggctacgacaactacatggctcacgccttcccccaggacgagctcaaccccatccactgccgcggccgtgggcccgaccgcggggacccttcaaatctgaacatcaatgatgtactagggaactactcattgactcttgttgatgcattggatacacttgcaataatgggaaattcatccgagttccagaaagccgtcaagttagtgatcaacacagtttcatttgacaaagattccaccgtccaagtctttgaggccacgataagggtcctgggaagcctcctttctgctcacagaataataactgactccaagcagccctttggtgacatgacaattaaggactatgataatgagttgttatacatggcccatgacctggcggtgcggctcctccctgcttttgaaaacaccaagacagggattccatatcctcgggtgaatctaaagacaggagttcctcctgacaccaataatgagacatgcacagcgggagccggttccctcctggtggaatttgggattctgagtcgactcctgggggactccacatttgagtgggtggccagacgagcagtgaaagccctttggaacctccggagcaatgatacaggattactaggcaatgtcgtgaacattcagacgggccactgggttggaaagcagagtggcctgggtgccgggctggactccttctatgaatacctcttgaaatcttacattctctttggagaaaaagaagacctagaaatgtttaatgctgcatatcagagtattcagaactacttaagaagagggcgggaagcctgcaatgaaggagaaggagaccctccactctatgtcaacgtgaacatgttcagtgggcagctgatgaacacctggattgactctctgcaggcctttttccctggactgcaggtgctgataggagatgtggaagatgccatctgccttcatgccttctactatgccatatggaaacgatatggtgccctccctgagagatataactggcagctgcaggcccctgacgttctcttctacccactgagaccagagttagtggaatccacatatctcctctaccaggcaaccaagaatcccttctacctccatgtaggaatggatattctgcagagtctggaaaagtacacaaaagtcaagtgtgggtacgccacgctgcatcacgtcattgacaagtccacagaagaccggatggagagcttctttctcagtgagacctgtaaatatttgtatctgctgtttgatgaagacaatccagtacacaagtctggaaccagatacatgttcacaacagagggacacattgtatctgtggatgagcatcttcgggaattgccatggaaggaattcttctctgaagagggagggcaggaccaagggggaaagtctgtgcacaggccgaaacctcatgagttaaaagtcatcaactccagctccaactgcaatcgtgtacctgatgagaggaggtactccctgcccttaaagagcatctacatgcgacagattgaccagatggttggtttgatttgatctgctctctgtgaggcctcatcttgaaccagaccttaacgaccaaacccagaccatgccaaagtccagtctgaaatgaaaggggacagaagtcttgctgtccatggtggtgtaggaatttctgtgcaacacctcaccacgtctggttaatccttgcacacttcagtgtttctctcctgttcaataaaatgccctgttaaggatataatttgaagtgagaagatacatggaaattgccctcttatgacatgttgatgttataagcacaatagatggggcatctttggattgatgttcacagctttatacttcagaacctaagtctcttcactttgctggcacctgctatactggagtattgctatgtctttaaaaaattttttttattatattttatttttttgagacagggtcttgatatttttttgggacagggttacctgggctcaagtgatccttctgcctcagcctcccgagtagctgggattacaggtgagcaccactgtacctggctagctacttctttgttagaggattgagaatgaaatttctgcaaaagggcccatggttcatttggtatccctatttaattgcattgaaaatgtcatcctttctgttgttagataattggggtcttcccctgatatccaaccgtgattttggatcacatgggagaaaaagtcatccagtttttcatgtttgcctcaagtaatctttacagtgttacaaattatttgcttaagaagaatggtcttaaccagaattcttaacagatagtctcttaggttattatgttatggtctaagaggttaactgacatcttttgggtggtattttgcattttgaatatgaacttacctgaggaactcccatagttccagaatcaggtgccttttagggagagaacaatacctaagattgtctgagcttccatctttctcatatttcctaagcaaggattctcacttctgaccatatttgggttagagttctgttttgtttctgttttctgtgtctagtgccaattagctaaatcagggagaaagaaatgatcacatgacttttagcatccttgagccatttctctgtgtaatacaggctttagattagtgccttatattggttttggtttggggcactggatgtcgcagctactgctatggtttcaggaggcctgtttagccacatggtgagaccgtggtgaaagggggatggaaattgcttggccagtctttgcctttcatcctgtaaaagtaagcatgtagaaggaggaagttgtgctaaaatgcctttgtttttttgttattattttcttagccagaacatctctctttgaactcacactgatacacacctgctactcttacacagtgcagcagggttgactcttagtctggcttccatgaagcgtcatgggtggaaacgcattctagtaaaaaaggtaggaaatccctaaaacttccagcctcacatagcacggttctcacctgtcactgttttcccacctctaaggatttcatgtacatcttttcaaagctagaaataagcactgtctaagtttatgttgcatttttagtcaaaagggagaaatcttattccttcttgaaaattttaagtgttatggttttatatagttcagttctttgagatttttgaaaagagtattttcagtaataaacgtgccatctctatctcttaaacatttattacaacaattgttttaaaatagaaaaaataaaatgcttctattttaccttttttcatttcagaagcattattctgtttattaacagtgtcccatctactgaatagaaaactttgagaataatatatatatatattttaaatgttttcactgactcattgaaaatgttaattacacacacatgcatgcatgcacacacgagcatacttgtacctttgtctctgggcaaacaggtgggactgttagtgacccatttgggaaaatagagcatctcagagaaggaggtgagttcttcctgcctgtgatttctcttggcgctcccctcctctcccgctctggcttctgtggcggcagtggtgggtaagcactccagtgttctcttaatgaggcactttgcctgtcactcgagcaagcctgggtgttccttcctcctcatgctcctggaatagggaatagggatctcatgcttgcaaactacacaatgctgcaggtgcttcccaggggccacaggctgtcaggaaacgtgttttatgttaagtcacaaacccacttgacttctgggtactggaattaataccagtgggtgagactgagggtgagtgagttagtacatattaatcctggttgttgagcttccagactaccccgtccaaagtttgatgctatgtagtcagtggtttgtggggctggatgccagaaggttctttgagccagtttcaaaggttacttgttttttttttttttttttaaagtcagaatgttaacagctgtgatatatcctgcagggcttttgcagtttcttctgttctgtgttctgaaatactgggtagagaatggctgaggaggagattaccagagaagttgctttgctcagtgctttgccccaggattgcctcaaatctgagtggacttcatcctttgcggcggctctgagcctggcccatcttcctattcccacgtgtagctagtgtctagtgtcagctttgctcagtgtggtggaaacattttgcagaactgttgtagaaagctgccttatagttggcttgacaaagcataattctctcataacaaactttcaaatcattacagtagcttagctactttagttgatgtgaccgaggaatcccttctagaatcataggtggcaagggagggtttgctagctctccatttgcactggccattgtgaaaaaccagcttctgtattcaaatctttccttcatttttttaaattttttttttggcagcgcttgtgctggaacttactcattgtaactgaatcctcagggcttttcttgttttagatcatggactgtgcacgtgacacttaaataattttctatgtatttaaagaaaaatgcaccaggatggtgtctgtgcacgtgactattagaggagcgtctgtagaagtacctggtttggtcagtgcagttgtgcaatctgagggccttgtttcctcctcccctttccccttctccccaccaaaggaaaatatccctcttaatgatttcgtagttcagtttactgaatgattaccacctgtaattcctctttggattgtgtagactcaacatgagacattcctttctgctttctggagggcaccaggggcctttctctttgataaattttttttgtctgttgacaaaaacaaaaatcttttttcaaatgtagtgctggtgaaaaggtagggctgagtgattaccttagccacagggtggctgagcaggaactttagaagaaaatcctgagctttcctgtccattcccagcatccagctcctattctagtgcctcttccctgcagggcagggaccccttgggaaatcgaggaggtgggacgggctgggccctgtgtcccaggtttcacagggctcagggttatgctcccgcttgaatctggacgtgaatctggtaaaaatatcaagtacctgtggaactccctgattctataccctcttccttctttctgcaaggcagaggaataatatttttaaaggttattttgttttagttttaaatagcaaaacacaagctgcatttttatttattttgcataagaaaggtaaatctttttacaaaaaaaagtatagagttggaaactctgggaaaacttacggaaatacacaaatgcttctctgtaatgtgcaatatgctttgcaactgtagatgatattttatgtttaatctgtaaataagaaatgtatttaaattaaaagggatctttttgtaaaaggaccaaatgttcttttataaatgtaataaggaatatcttgctctttaaaatttattaggatttttatgagtaatttttattaaaagatttctttttttg

SEQ ID NO: 130340 - DNA, 978 bp, Homo sapiens
  Payload ID: 5502
  Gene Symbol: EDEM1
  Gene Name: ER degradation enhancer, mannosidase alpha-like 1
  ENST ID: ENST00000434243
  CDS Start-End: 52-288
cggagagcctgggggttggggacgatgggctagttcctgctgcgtgcccagatgcgcgacctggcacggggcatgttcgtctttggctacgacaactacatggctcacgccttcccccaggacgagctcaaccccatccactgccgcggccgtgggcccgaccgcggggacccttcaaatctgaacatcaatgatgtactagggaactactcattgactcttgttgatgcattggatacacttgcaggtcctgggaagcctcctttctgctcacagaataataactgactccaagcagccctttggtgacatgacaattaaggactatgataatgagttgttatacatggcccatgacctggcggtgcggctcctccctgcttttgaaaacaccaagacagggattccatatcctcgggtgaatctaaagacaggagttcctcctgacaccaataatgagacatgcacagcgggagccggttccctcctggtggaatttgggattctgagtcgactcctgggggactccacatttgagtgggtggccagacgagcagtgaaagccctttggaacctccggagcaatgatacaggattactaggcaatgtcgtgaacattcagacgggccactgggttggaaagcagagtggcctgggtgccgggctggactccttctatgaatacctcttgaaatcttacattctctttggagaaaaagaagacctagaaatgtttaatgctgcatatcagagtattcagaactacttaagaagagggcgggaagcctgcaatgaaggagaaggagaccctccactctatgtcaacgtgaacatgttcagtgggcagctgatgaacacctggattgactctctgcaggcctttttccctggactgcaggtgctgataggagatgtggaagatgccatctgccttcatgccttctactatgccatatggaaacgatatggtgccctccc

SEQ ID NO: 130341 - DNA, 1363 bp, Homo sapiens
  Payload ID: 5502
  Gene Symbol: EDEM1
  Gene Name: ER degradation enhancer, mannosidase alpha-like 1
  Uniprot ID: Q92611
  ENST ID: ENST00000445686
  CDS Start-End: 187-1317
acgcgcttccttccgccctccgcgccggggtgcagccctctgtcctccggggcccccgagggcgccagggccgttagggtcccgggcagcgctcccgcgccctgtcccgtttcaaatctgaacatcaatgatgtactagggaactactcattgactcttgttgatgcattggatacacttgcaataatgggaaattcatccgagttccagaaagccgtcaagttagtgatcaacacagtttcatttgacaaagattccaccgtccaagtctttgaggccacgataagggtcctgggaagcctcctttctgctcacagaataataactgactccaagcagccctttggtgacatgacaattaaggactatgataatgagttgttatacatggcccatgacctggcggtgcggctcctccctgcttttgaaaacaccaagacagggattccatatcctcgggtgaatctaaagacaggagttcctcctgacaccaataatgagacatgcacagcgggagccggttccctcctggtggaatttgggattctgagtcgactcctgggggactccacatttgagtgggtggccagacgagcagtgaaagccctttggaacctccggagcaatgatacaggattactaggcaatgtcgtgaacattcagacgggccactgggttggaaagcagagtggcctgggtgccgggctggactccttctatgaatacctcttgaaatcttacattctctttggagaaaaagaagacctagaaatgtttaatgctgcatatcagagtattcagaactacttaagaagagggcgggaagcctgcaatgaaggagaaggagaccctccactctatgtcaacgtgaacatgttcagtgggcagctgatgaacacctggattgactctctgcaggcctttttccctggactgcaggtgctgataggagatgtggaagatgccatctgccttcatgccttctactatgccatatggaaacgatatggtgccctccctgagagatataactggcagctgcaggcccctgacgttctcttctacccactgagaccagagttagtggaatccacatatctcctctaccaggcaaccaagaatcccttctacctccatgtaggaatggatattctgcagagtctggaaaagtacacaaaagtcaagtgtgggtacgccacgctgcatcacgtcattgacaagtccacagaagaccggatggagagcttctttctcagtgagacctgtaaatatttgtatctggtatgtgtgttgcaagatgaacccaggaatatttagtattgcttagagcaagcattcgcatagtcttccatctgacaggtac

SEQ ID NO: 130342 - DNA, 730 bp, Homo sapiens
  Payload ID: 5502
  Gene Symbol: EDEM1
  Gene Name: ER degradation enhancer, mannosidase alpha-like 1
  ENST ID: ENST00000443790
  CDS Start-End: 20-181
gcccccgcgctttaaaataatgcccgcggcgcccgcgcgaccatgcaatggcgagcgctcgtcctggggctggtgctcctccggcttggcctccatggagtattgtggctcgtcttcgggctggggcccagcatgggcttctaccagcgctttccgctcagcttcggcttccagcgtctgaggagccccgacggccccgcgtcgcccacctcggggcccgtgggccggcctgggggggtatccgggccgtcgtggctgcagccgccggggaccggggcagcgcagagcccgcgcaaggctccgcggcgtcctgggccggggatgtgcggcccagccaactggggctacgtgctgggcggccggggccgcggcccggacgagtacgagaagcgctacagcggcgccttccctccgcagctgcgtgcccagatgcgcgacctggcacggggcatgttcgtctttggctacgacaactacatggctcacgccttcccccaggacgagctcaaccccatccactgccgcggccgtgggcccgaccgcggggaccctttgagagcatgatttctaccgaagcaaggggacatcccaagctaaattcaaaggactgagccttttcaaaattctaggaaaccgatgagtttttcttgcttaaccatagcgtttatacgtataagtgtattttctatctcaatttttttgagaaaaaatattaaattttgaaaaaaaa

SEQ ID NO: 130343 - DNA, 1756 bp, Homo sapiens
  Payload ID: 5503
  Gene Symbol: EDEM2
  Gene Name: ER degradation enhancer, mannosidase alpha-like 2
  Uniprot ID: Q9BV94
  ENST ID: ENST00000374491
  CDS Start-End: 62-1687
caggatgaactggttgcagtggctgctgctgctgcgggggcgctgagaggacacgagctctatgcctttccggctgctcatcccgctcggcctcctgtgcgcgctgctgcctcagcaccatggtgcgccaggtcccgacggctccgcgccagatcccgcccactacagtttttctctgactctaattgatgcactggacaccttgctgattttggggaatgtctcagaattccaaagagtggttgaagtgctccaggacagcgtggactttgatattgatgtgaacgcctctgtgtttgaaacaaacattcgagtggtaggaggactcctgtctgctcatctgctctccaagaaggctggggtggaagtagaggctggatggccctgttccgggcctctcctgagaatggctgaggaggcggcccgaaaactcctcccagcctttcagacccccactggcatgccatatggaacagtgaacttacttcatggcgtgaacccaggagagacccctgtcacctgtacggcagggattgggaccttcattgttgaatttgccaccctgagcagcctcactggtgacccggtgttcgaagatgtggccagagtggctttgatgcgcctctgggagagccggtcagatatcgggctggtcggcaaccacattgatgtgctcactggcaagtgggtggcccaggacgcaggcatcggggctggcgtggactcctactttgagtacttggtgaaaggagccatcctgcttcaggataagaagctcatggccatgttcctagagtataacaaagccatccggaactacacccgcttcgatgactggtacctgtgggttcagatgtacaaggggactgtgtccatgccagtcttccagtccttggaggcctactggcctggtcttcagagcctcattggagacattgacaatgccatgaggaccttcctcaactactacactgtatggaagcagtttggggggctcccggaattctacaacattcctcagggatacacagtggagaagcgagagggctacccacttcggccagaacttattgaaagcgcaatgtacctctaccgtgccacgggggatcccaccctcctagaactcggaagagatgctgtggaatccattgaaaaaatcagcaaggtggagtgcggatttgcaacaatcaaagatctgcgagaccacaagctggacaaccgcatggagtcgttcttcctggccgagactgtgaaatacctctacctcctgtttgacccaaccaacttcatccacaacaatgggtccaccttcgacgcggtgatcaccccctatggggagtgcatcctgggggctggggggtacatcttcaacacagaagctcaccccatcgaccctgccgccctgcactgctgccagaggctgaaggaagagcagtgggaggtggaggacttgatgagggaattctactctctcaaacggagcaggtcgaaatttcagaaaaacactgttagttcggggccatgggaacctccagcaaggccaggaacactcttctcaccagaaaaccatgaccaggcaagggagaggaagcctgccaaacagaaggtcccacttctcagctgccccagtcagcccttcacctccaagttggcattactgggacaggttttcctagactcctcataaccactggataatttttttatttttatttttttgaggctaaactataataaattgcttttggctatcata

SEQ ID NO: 130344 - DNA, 1919 bp, Homo sapiens
  Payload ID: 5503
  Gene Symbol: EDEM2
  Gene Name: ER degradation enhancer, mannosidase alpha-like 2
  Uniprot ID: Q9BV94
  ENST ID: ENST00000374492
  CDS Start-End: 107-1843
gcaggcgcagtggcgcggattcccggaagaacccgcagcagctcccaggatgaactggttgcagtggctgctgctgctgcgggggcgctgagaggacacgagctctatgcctttccggctgctcatcccgctcggcctcctgtgcgcgctgctgcctcagcaccatggtgcgccaggtcccgacggctccgcgccagatcccgcccactacagggagcgagtcaaggccatgttctaccacgcctacgacagctacctggagaatgcctttcccttcgatgagctgcgacctctcacctgtgacgggcacgacacctggggcagtttttctctgactctaattgatgcactggacaccttgctgattttggggaatgtctcagaattccaaagagtggttgaagtgctccaggacagcgtggactttgatattgatgtgaacgcctctgtgtttgaaacaaacattcgagtggtaggaggactcctgtctgctcatctgctctccaagaaggctggggtggaagtagaggctggatggccctgttccgggcctctcctgagaatggctgaggaggcggcccgaaaactcctcccagcctttcagacccccactggcatgccatatggaacagtgaacttacttcatggcgtgaacccaggagagacccctgtcacctgtacggcagggattgggaccttcattgttgaatttgccaccctgagcagcctcactggtgacccggtgttcgaagatgtggccagagtggctttgatgcgcctctgggagagccggtcagatatcgggctggtcggcaaccacattgatgtgctcactggcaagtgggtggcccaggacgcaggcatcggggctggcgtggactcctactttgagtacttggtgaaaggagccatcctgcttcaggataagaagctcatggccatgttcctagagtataacaaagccatccggaactacacccgcttcgatgactggtacctgtgggttcagatgtacaaggggactgtgtccatgccagtcttccagtccttggaggcctactggcctggtcttcagagcctcattggagacattgacaatgccatgaggaccttcctcaactactacactgtatggaagcagtttggggggctcccggaattctacaacattcctcagggatacacagtggagaagcgagagggctacccacttcggccagaacttattgaaagcgcaatgtacctctaccgtgccacgggggatcccaccctcctagaactcggaagagatgctgtggaatccattgaaaaaatcagcaaggtggagtgcggatttgcaacaatcaaagatctgcgagaccacaagctggacaaccgcatggagtcgttcttcctggccgagactgtgaaatacctctacctcctgtttgacccaaccaacttcatccacaacaatgggtccaccttcgacgcggtgatcaccccctatggggagtgcatcctgggggctggggggtacatcttcaacacagaagctcaccccatcgaccctgccgccctgcactgctgccagaggctgaaggaagagcagtgggaggtggaggacttgatgagggaattctactctctcaaacggagcaggtcgaaatttcagaaaaacactgttagttcggggccatgggaacctccagcaaggccaggaacactcttctcaccagaaaaccatgaccaggcaagggagaggaagcctgccaaacagaaggtcccacttctcagctgccccagtcagcccttcacctccaagttggcattactgggacaggttttcctagactcctcataaccactggataatttttttatttttatttttttgaggctaaactataataaattgcttttggctatcatattttggt

SEQ ID NO: 130345 - DNA, 6898 bp, Homo sapiens
  Payload ID: 5504
  Gene Symbol: EDEM3
  Gene Name: ER degradation enhancer, mannosidase alpha-like 3
  Uniprot ID: Q9BZQ6
  ENST ID: ENST00000318130
  CDS Start-End: 268-3066
agtaacgttggggaggcggtttcctagactacgacaccggaaagctgggggaggcgctccgggatactgagggcggagggcggtggcagcgctggcgctggggaccggcttggtggcttcgggaaacagtttggcgccggcggccgtccgtgttactccgcatcccgccccgtctcggcacggctagcagccccctggccaccagcgtccagcaatgtgtctcaccggccgggcgtagcagctgcgcgtgcgcggaaccgcggggccatgagcgaagccggcggccggggctgtgggtccccggttccccagcgagcgcgatggagactagtggcggcgacggccgcgttctgcctggtgtcggccacctccgtgtggacggcgggggccgagcccatgagtagggaggagaaacagaagcttgggaatcaagtactggaaatgtttgatcatgcttatggtaactatatggaacatgcttaccctgctgatgaactcatgcctttaacctgtagaggtcgagttagaggccaagagccaagtcgcggtgacgttgatgatgccttgggaaaattttctctgacactgattgattctttggacactcttgtggttttaaataaaactaaagaatttgaagatgcagtgagaaaagttttaagagatgttaatttagataacgatgtagtcgtatcagtctttgaaacaaacatcagagttcttgggggtcttttgggtgggcactccctggcaatcatgctgaaagaaaaaggtgaatatatgcagtggtacaatgatgaacttctccaaatggcaaagcagttaggttacaaacttttaccggctttcaacactaccagtggccttccttatccaagaattaatttaaagtttggcatcagaaaaccagaagctcggacaggaactgagacagatacctgtacagcttgtgcaggtaccttgatccttgaatttgctgctttaagtcgattcacaggagcaacaatatttgaggaatatgccagaaaagctcttgattttctctgggaaaaaagacagcgaagtagtaatttagtgggcgtgactataaatattcatactggagattgggtacgaaaagatagtggagttggagcagggattgattcatattatgaatatctgttgaaagcctatgtcttgcttggagatgacagttttctggaaagatttaacacacactatgatgccataatgaggtatattagccagccacctcttctacttgatgtgcatatccacaaaccaatgctgaatgctcggacttggatggatgctttgcttgccttcttcccaggcttgcaggtgttaaagggggatattagacctgctattgaaactcatgaaatgttatatcaggtgattaaaaaacacaattttctaccagaggcatttaccacagatttcagagtacactgggctcaacatcctttaaggccagaatttgcagaaagtacctacttcttatataaagctacaggagatccttactaccttgaagtagggaagacacttattgaaaatttaaataaatatgctagagtgccttgcggatttgctgccatgaaggatgttcgtactggaagtcatgaggacagaatggattctttcttcttggctgaaatgtttaaatatctttacctgttatttgctgataaagaagacattatttttgacatagaagattacatctttacaacagaagctcatctgttacctctttggctctctactacaaatcaaagcatctctaaaaagaacacaacctcggaatatacagaactggatgacagtaacttcgattggacttgtccaaatactcagatcctctttcctaatgacccattgtatgctcaaagtattcgtgagcccttgaaaaatgtggtggataagagctgtcctagaggcatcatcagagtagaggagagtttcaggagtggagctaaaccccctctgagagccagagatttcatggccactaaccctgagcatttagaaatcctgaagaagatgggggtgagtttgattcacctcaaagatgggagagtccagttggtccaacatgcaatccaagctgctagttcaatcgacgctgaagatgggttgaggttcatgcaggagatgattgaattgtcaagtcagcaacaaaaagaacagcagctgcctccacgagctgtacaaattgtttcccacccattttttggcagggtagtattgactgctggaccagctcagtttgggctggatctgtctaaacataaagagacaagaggatttgttgcaagcagtaaaccatccaatggttgttcagagcttactaacccagaggcagtgatgggaaaaatcgcactgatacaaagaggacagtgcatgtttgcagaaaaggcacgcaacatccagaatgctggagccattggtggcattgttattgatgacaatgaggggagcagcagtgatactgcccctctgttccagatggcaggtgatggaaaggatacagatgacatcaagatccccatgctgttcttattcagcaaagaaggaagtatcatactggatgccatccgggaatatgaggaggtagaagtgctcctctctgataaagcaaaagatcgagatcctgaaatggaaaatgaagaacaaccatcctctgaaaatgattctcagaatcagagtggtgaacagatttcatcaagttctcaggaggttgatttggttgatcaagagtcttctgaggaaaattctctaaattctcacccagaatcattatctctagcagatatggacaatgctgcaagcatttccccttctgaacagacttctaatcccacagaaaaccatgagactacaaatcttaatggtgaatgtacagatttagataaccagcttcaagaacaatcagaaactgaggaagattccaatcctaatgttagctggggtaaaaaggtccagcctatagactccatattagcagactggaatgaagatatagaagcatttgaaatgatggagaaggatgagctatgacttgctaaacaatctgttggtaggtatttaaaaagaaaaggtaaactgtgtgtggttaatagacatcctaatactaagcaggctttctaatgggaggctttaagtatggtgatgaacaaccacgttctgactggcgtagttatcgtaggaatctggagcatgctgtgttagaattgaccttgtttaaaactgtcccatcaaaaatggaaatccacagttcccccttcaaatgcagcactgcaccaccctgcaacacctcaggccagggaaagattactgagcattcctgcgaaccagatttctgttgtctctggatagacaagaaacaaaattcatttagtagtggagtggggaataggagtttggatagccttctaattaaaggaagctcgcctttcttggttttgggggttagaggctcttttgggaagatgcatccgagtattgtggcattctgattatgctgccttcacaaaacactctaagtgacctaagtggttatgaagcaaatgcatttatggtgaaaacagtctttgctcattgctttctcttgtttcatttagtgacaaatgatcaagatgacttgattttttttccttcttaacaatgtcttttttatttaaaccaaaggtgaagccagtgtactttctcagtgagttctctgcataaagactaatcagtgggaccaggtaaaaaggtcatataatacattgtggagattgcttacttaatacttctgaaaaatggagtaagggagaaactgtaatgttgcaatatgaacctcccattgggccttccatagggaaagctgtgactactctgaaatggaacctagcattatatccttgtagggtagattataaatcatttccagttcatttctcttagaggtgattacctctagccatcagccttactccatcccatgtttggtatgcaatttgagccacaaggctcgtatcgccaacagctatatacattttgttccatttttctgtcttacagagccatgatagaactgtggttagtgagttaaaattcctggagtaactactgtttttctcctttgaaacttaggtttctaaagttgcacctaaggaatctgtcacattttctgttgaatcatggtttttgtttttgtttttaacagatattccttctgatacggacttgaaaattagtgtatggtgacctgtgtttaaaaaaaaaagtacaatacaactacatatagctatatagcttaatgagacttccaccccccccctttttttttttggtttgttgttgttgtagtagtctggtgctggccacatttaagtcttaaaaatttttaaattttgttgttgatgtttgtagacagccctgttgttgaaatcatggctttattcattttatttattttttaaacttgcctgaatttgttctaaaggaatatttaagagacataattttcttctctttaccataacattacacaaaactttttcctaaaacacggttgtgaggtactgatgaggtgtaagtggagctgttaaaaacagcagtgctgtattgcagttatgtatattcgtgtacagtatgtttagatcccaggtaaacatattcttttctgagaggataaatacctgcattcagatattccaggtaaatataattgagtcagggagtagtaaatctgatggagaattcactttggggaggggaaaaagaatagtatgcaagacccttattggcttttaattatacctgaaaccaaaatggatatttttagtctctctgcatgtgagatttggtgtaacaagatagaactataatatatacagtatatggaaggatagatatagtgctttgttcattttaattgcaaagctgccaaaatagttgaagcttaattacttgacttgccttgatttataggactggggcttggagaaaatgagcagatgttcctctaagacatcgattacagaagccttatatacatggatttgattttgtatttgtagctgaaagtcactgttgtctaaaactaacttttctaagttatcaaaacaacctaatttcttttccaacaaggagaacttaatggcatgaaggattgtgtgacacattggaaaagccagcttactgccactctcttcctttggccattagagggaggtgttgcctttcattgacgcttagaagcaaattgttcacttgttaagaaaagtaaatccttaaaaaaagaaaaggaaaaaatttaaccaatttttcttaatacccagaaggaattatactcaatatttccctagttaagaaaagaggagataatgttcgtctaaaaaactccaacgttgtaattacaactctacattcatttacttacttgacatactgccacaaagtagtttttgagttcattaaaaattccaaaggcattagttgttttttttttttttagtgttttgttttttagttaacttttatagacattttagtaacttgctaaagattcaggggattctatgaaaccccgaatttagaaacatctggtctacctcagttaaatgttgactgcttagaaatatagctgaagtgatcaccacagccataaaattgtttaagaaagatttatataatgtttacaaatctggaatcaaggattttagctgaaatcctttaagagatattagagcaagtatttaattcaggtattttcaagttttaaaacttaacctgtttacctactaaaaataaaatagctagtttttttctgcatataaaagttcattgaaatgatatgcccttatttgcaatacttttcccataaagttttaagtgtgaaagaattgtaatttactagatatgtttggtatgggatattttgttaggcaagttttcttttttcttcttaaattgcaataggcttccaaaaagagtataattgtttcagaacaaattaactcttggcattatacgtctccctttttctttacagtattagtaaaaagaaaaattgtacactttctgattttaacttcactaatgtaattactctctcaagaagcttttaaaatttaaattaccatcacacaaccttttttatagtaaagccaacatttgttctctcaccaaaccccatgccaaattcatcatgaagaaagctcagcataagtaattcaaatactgcttataattttagaggggggtagaatttagtaaatattccagccggtcgttttatgcacaaggcttcagtcagaacatagaaaaaaaaaacattctgtgaatgaaatattgtatgttcagattttataaaagacatttttaaaagcccaatttacagccgtatattttcttatgatgtaatttatgaaaaagatgtctgtactaacaggtgctgtaacactactgttgttggattttattgtttggtgataaatgtatacaatatttctaagggaaactatgtactgtgatgtaaaagtctgggcaaaatgtatataatcctgtatataattatgtatttgattataattactgattgtaaagatttaataaaatatgtaaatattccagtttagttttaatttgaatttttagaatcactgtgcatatcctcatacttttatgtcttgatgtttatcactctgttttccttttttttttaaactcattttatcctccggggattgaattctggggacattttaggctgtagaaacccaagcttgtgggctaaagtaaggattttgttctaagaaatcactgaaagtttttcaacaagtcagtagcatgcacaaaggtaatgctaagtgaataaaactctagaattgtgtataaattatga

SEQ ID NO: 130346 - DNA, 6678 bp, Homo sapiens
  Payload ID: 5504
  Gene Symbol: EDEM3
  Gene Name: ER degradation enhancer, mannosidase alpha-like 3
  Uniprot ID: Q9BZQ6
  ENST ID: ENST00000367512
  CDS Start-End: 391-3108
gttggggaggcggtttcctagactacgacaccggaaagctgggggaggcgctccgggatactgagggcggagggcggtggcagcgctggcgctggggaccggcttggtggcttcgggaaacagtttggcgccggcggccgtccgtgttactccgcatcccgccccgtctcggcacggctagcagccccctggccaccagcgtccagcaatgtgtctcaccggccgggcgtagcagctgcgcgtgcgcggaaccgcggggccatgagcgaagccggcggccggggctgtgggtccccggttccccagcgagcgcgatggagactagtggcggcgacggccgcgttctgcctggtgtcggccacctccgtgtggacggcgggggccgagcccatgagtagggaggagaaacagaagcttgggaatcaagtactggaaatgtttgatcatgcttatggtaactatatggaacatgcttaccctgctgatgaactcatgcctttaacctgtagaggtcgagttagaggccaagagccaagtcgcggtgacgttgatgatgccttgggaaaattttctctgacactgattgattctttggacactcttgtggttttaaataaaactaaagaatttgaagatgcagtgagaaaagttttaagagatgttaatttagataacgatgtagtcgtatcagtctttgaaacaaacatcagagttcttgggggtcttttgggtgggcactccctggcaatcatgctgaaagaaaaaggtgaatatatgcagtggtacaatgatgaacttctccaaatggcaaagcagttaggttacaaacttttaccggctttcaacactaccagtggccttccttatccaagaattaatttaaagtttggcatcagaaaaccagaagctcggacaggaactgagacagatacctgtacagcttgtgcaggtaccttgatccttgaatttgctgctttaagtcgattcacaggagcaacaatatttgaggaatatgccagaaaagctcttgattttctctgggaaaaaagacagcgaagtagtaatttagtgggcgtgactataaatattcatactggagattgggtacgaaaagatagtggagttggagcagggattgattcatattatgaatatctgttgaaagcctatgtcttgcttggagatgacagttttctggaaagatttaacacacactatgatgccataatgaggtatattagccagccacctcttctacttgatgtgcatatccacaaaccaatgctgaatgctcggacttggatggatgctttgcttgccttcttcccaggcttgcaggtgttaaagggggatattagacctgctattgaaactcatgaaatgttatatcaggtgattaaaaaacacaattttctaccagaggcatttaccacagatttcagagtacactgggctcaacatcctttaaggccagaatttgcagaaagtacctacttcttatataaagctacaggagatccttactaccttgaagtagggaagacacttattgaaaatttaaataaatatgctagagtgccttgcggatttgctgccatgaaggatgttcgtactggaagtcatgaggacagaatggattctttcttcttggctgaaatgtttaaatatctttacctgttatttgctgataaagaagacattatttttgacatagaagattacatctttacaacagaagctcatctgttacctctttggctctctactacaaatcaaagcatctctaaaaagaacacaacctcggaatatacagaactggatgacagtaacttcgattggacttgtccaaatactcagatcctctttcctaatgacccattgtatgctcaaagtattcgtgagcccttgaaaaatgtggtggataagagctgtcctagaggcatcatcagagtagaggagagtttcaggagtggagctaaaccccctctgagagccagagatttcatggccactaaccctgagcatttagaaatcctgaagaagatgggggtgagtttgattcacctcaaagatgggagagtccagttggtccaacatgcaatccaagctgctagttcaatcgacgctgaagatgggttgaggttcatgcaggagatgattgaattgtcaagtcagcaacaaaaagaacagcagctgcctccacgagctgtacaaattgtttcccacccattttttggcagggtagtattgactgctggaccagctcagtttgggctggatctgtctaaacataaagagacaagaggatttgttgcaagcagtaaaccatccaatggttgttcagagcttactaacccagaggcagtgatgggaaaaatcgcactgatacaaagaggacagtgcatgtttgcagaaaaggcacgcaacatccagaatgctggagccattggtggcattgttattgatgacaatgaggggagcagcagtgatactgcccctctgttccagatggcaggtgatggaaaggatacagatgacatcaagatccccatgctgttcttattcagcaaagaaggaagtatcatactggatgccatccgggaatatgaggaggtagaagtgctcctctctgataaagcaaaagatcgagcagcaatattaaaaggtaaaatgattccaagctacattattaatagtaatcctgaaatggaaaatgaagaacaaccatcctctgaaaatgattctcagaatcagagtggtgaacagatttcatcaagttctcaggaggttgatttggttgatcaagagtcttctgaggaaaattctctaaattctcacccagaatcattatctctagcagatatggacaatgctgcaagcatttccccttctgaacagacttctaatcccacagaaaaccatgagactacaaatcttaatggtgaatgtacagatttagataaccagcttcaagaacaatcagaaactgaggaagattccaatcctaatgttagctggggtaaaaaggtccagcctatagactccatattagcagactggaatgaagatatagaagcatttgaaatgatggagaaggatgagctatgacttgctaaacaatctgttggtaggtatttaaaaagaaaaggtaaactgtgtgtggttaatagacatcctaatactaagcaggctttctaatgggaggctttaagtatggtgatgaacaaccacgttctgactggcgtagttatcgtaggaatctggagcatgctgtgttagaattgaccttgtttaaaactgtcccatcaaaaatggaaatccacagttcccccttcaaatgcagcactgcaccaccctgcaacacctcaggccagggaaagattactgagcattcctgcgaaccagatttctgttgtctctggatagacaagaaacaaaattcatttagtagtggagtggggaataggagtttggatagccttctaattaaaggaagctcgcctttcttggttttgggggttagaggctcttttgggaagatgcatccgagtattgtggcattctgattatgctgccttcacaaaacactctaagtgacctaagtggttatgaagcaaatgcatttatggtgaaaacagtctttgctcattgctttctcttgtttcatttagtgacaaatgatcaagatgacttgattttttttccttcttaacaatgtcttttttatttaaaccaaaggtgaagccagtgtactttctcagtgagttctctgcataaagactaatcagtgggaccaggtaaaaaggtcatataatacattgtggagattgcttacttaatacttctgaaaaatggagtaagggagaaactgtaatgttgcaatatgaacctcccattgggccttccatagggaaagctgtgactactctgaaatggaacctagcattatatccttgtagggtagattataaatcatttccagttcatttctcttagaggtgattacctctagccatcagccttactccatcccatgtttggtatgcaatttgagccacaaggctcgtatcgccaacagctatatacattttgttccatttttctgtcttacagagccatgatagaactgtggttagtgagttaaaattcctggagtaactactgtttttctcctttgaaacttaggtttctaaagttgcacctaaggaatctgtcacattttctgttgaatcatggtttttgtttttgtttttaacagatattccttctgatacggacttgaaaattagtgtatggtgacctgtgtttaaaaaaaaaagtacaatacaactacatatagctatatagcttaatgagacttccaccccccccctttttttttttggtttgttgttgttgtagtagtctggtgctggccacatttaagtcttaaaaatttttaaattttgttgttgatgtttgtagacagccctgttgttgaaatcatggctttattcattttatttattttttaaacttgcctgaatttgttctaaaggaatatttaagagacataattttcttctctttaccataacattacacaaaactttttcctaaaacacggttgtgaggtactgatgaggtgtaagtggagctgttaaaaacagcagtgctgtattgcagttatgtatattcgtgtacagtatgtttagatcccaggtaaacatattcttttctgagaggataaatacctgcattcagatattccaggtaaatataattgagtcagggagtagtaaatctgatggagaattcactttggggaggggaaaaagaatagtatgcaagacccttattggcttttaattatacctgaaaccaaaatggatatttttagtctctctgcatgtgagatttggtgtaacaagatagaactataatatatacagtatatggaaggatagatatagtgctttgttcattttaattgcaaagctgccaaaatagttgaagcttaattacttgacttgccttgatttataggactggggcttggagaaaatgagcagatgttcctctaagacatcgattacagaagccttatatacatggatttgattttgtatttgtagctgaaagtcactgttgtctaaaactaacttttctaagttatcaaaacaacctaatttcttttccaacaaggagaacttaatggcatgaaggattgtgtgacacattggaaaagccagcttactgccactctcttcctttggccattagagggaggtgttgcctttcattgacgcttagaagcaaattgttcacttgttaagaaaagtaaatccttaaaaaaagaaaaggaaaaaatttaaccaatttttcttaatacccagaaggaattatactcaatatttccctagttaagaaaagaggagataatgttcgtctaaaaaactccaacgttgtaattacaactctacattcatttacttacttgacatactgccacaaagtagtttttgagttcattaaaaattccaaaggcattagttgttttttttttttttagtgttttgttttttagttaacttttatagacattttagtaacttgctaaagattcaggggattctatgaaaccccgaatttagaaacatctggtctacctcagttaaatgttgactgcttagaaatatagctgaagtgatcaccacagccataaaattgtttaagaaagatttatataatgtttacaaatctggaatcaaggattttagctgaaatcctttaagagatattagagcaagtatttaattcaggtattttcaagttttaaaacttaacctgtttacctactaaaaataaaatagctagtttttttctgcatataaaagttcattgaaatgatatgcccttatttgcaatacttttcccataaagttttaagtgtgaaagaattgtaatttactagatatgtttggtatgggatattttgttaggcaagttttcttttttcttcttaaattgcaataggcttccaaaaagagtataattgtttcagaacaaattaactcttggcattatacgtctccctttttctttacagtattagtaaaaagaaaaattgtacactttctgattttaacttcactaatgtaattactctctcaagaagcttttaaaatttaaattaccatcacacaaccttttttatagtaaagccaacatttgttctctcaccaaaccccatgccaaattcatcatgaagaaagctcagcataagtaattcaaatactgcttataattttagaggggggtagaatttagtaaatattccagccggtcgttttatgcacaaggcttcagtcagaacatagaaaaaaaaaacattctgtgaatgaaatattgtatgttcagattttataaaagacatttttaaaagcccaatttacagccgtatattttcttatgatgtaatttatgaaaaagatgtctgtactaacaggtgctgtaacactactgttgttggattttattgtttggtgataaatgtatacaatatttctaagggaaactatgtactgtgatgtaaaagtctgggcaaaatgtatataatcctgtatataattatgtatttgattataattactgattgtaaagatttaataaaatatgtaaatattccagtttagtttt

SEQ ID NO: 130347 - DNA, 2872 bp, Homo sapiens
  Payload ID: 5504
  Gene Symbol: EDEM3
  Gene Name: ER degradation enhancer, mannosidase alpha-like 3
  ENST ID: ENST00000439962
  CDS Start-End: 1-1143
gtggataagagctgtcctagaggcatcatcagagtagaggagagtttcaggagtggagctaaaccccctctgagagccagagatttcatggccactaaccctgagcatttagaaatcctgaagaagatgggggtgagtttgattcacctcaaagatgggagagtccagttggtccaacatgcaatccaagctgctagttcaatcgacgctgaagatgggttgaggttcatgcaggagatgattgaattgtcaagtcagcaacaaaaagaacagcagctgcctccacgagctgtacaaattgtttcccacccattttttggcagggtagtattgactgctggaccagctcagtttgggctggatctgtctaaacataaagagacaagaggatttgttgcaagcagtaaaccatccaatggttgttcagagcttactaacccagaggcagtgatgggaaaaatcgcactgatacaaagaggacagtgcatgtttgcagaaaaggcacgcaacatccagaatgctggagccattggtggcattgttattgatgacaatgaggggagcagcagtgatactgcccctctgttccagatggcaggtgatggaaaggatacagatgacatcaagatccccatgctgttcttattcagcaaagaaggaagtatcatactggatgccatccgggaatatgaggaggtagaagtgctcctctctgataaagcaaaagatcgagatcctgaaatggaaaatgaagaacaaccatcctctgaaaatgattctcagaatcagagtggtgaacagatttcatcaagttctcaggaggttgatttggttgatcaagagtcttctgaggaaaattctctaaattctcacccagaatcattatctctagcagatatggacaatgctgcaagcatttccccttctgaacagacttctaatcccacagaaaaccatgagactacaaatcttaatggtgaatgtacagatttagataaccagcttcaagaacaatcagaaactgaggaagattccaatcctaatgttagctggggtaaaaaggtccagcctatagactccatattagcagactggaatgaagatatagaagcatttgaaatgatggagaaggatgagctatgacttgctaaacaatctgttggtgaagccagtgtactttctcagtgagttctctgcataaagactaatcagtgggaccaggtaaaaaggactggggcttggagaaaatgagcagatgttcctctaagacatcgattacagaagccttatatacatggatttgattttgtatttgtagctgaaagtcactgttgtctaaaactaacttttctaagttatcaaaacaacctaatttcttttccaacaaggagaacttaatggcatgaaggattgtgtgacacattggaaaagccagcttactgccactctcttcctttggccattagagggaggtgttgcctttcattgacgcttagaagcaaattgttcacttgttaagaaaagtaaatccttaaaaaaagaaaaggaaaaaatttaaccaatttttcttaatacccagaaggaattatactcaatatttccctagttaagaaaagaggagataatgttcgtctaaaaaactccaacgttgtaattacaactctacattcatttacttacttgacatactgccacaaagtagtttttgagttcattaaaaattccaaaggcattagttgttttttttttttttagtgttttgttttttagttaacttttatagacattttagtaacttgctaaagattcaggggattctatgaaaccccgaatttagaaacatctggtctacctcagttaaatgttgactgcttagaaatatagctgaagtgatcaccacagccataaaattgtttaagaaagatttatataatgtttacaaatctggaatcaaggattttagctgaaatcctttaagagatattagagcaagtatttaattcaggtattttcaagttttaaaacttaacctgtttacctactaaaaataaaatagctagtttttttctgcatataaaagttcattgaaatgatatgcccttatttgcaatacttttcccataaagttttaagtgtgaaagaattgtaatttactagatatgtttggtatgggatattttgttaggcaagttttcttttttcttcttaaattgcaataggcttccaaaaagagtataattgtttcagaacaaattaactcttggcattatacgtctccctttttctttacagtattagtaaaaagaaaaattgtacactttctgattttaacttcactaatgtaattactctctcaagaagcttttaaaatttaaattaccatcacacaaccttttttatagtaaagccaacatttgttctctcaccaaaccccatgccaaattcatcatgaagaaagctcagcataagtaattcaaatactgcttataattttagaggggggtagaatttagtaaatattccagccggtcgttttatgcacaaggcttcagtcagaacatagaaaaaaaaaacattctgtgaatgaaatattgtatgttcagattttataaaagacatttttaaaagcccaatttacagccgtatattttcttatgatgtaatttatgaaaaagatgtctgtactaacaggtgctgtaacactactgttgttggattttattgtttggtgataaatgtatacaatatttctaagggaaactatgtactgtgatgtaaaagtctgggcaaaatgtatataatcctgtatataattatgtatttgattataattactgattgtaaagatttaataaaatatgtaaatattcca

SEQ ID NO: 130348 - DNA, 962 bp, Homo sapiens
  Payload ID: 5505
  Gene Symbol: ERLIN1
  Gene Name: ER lipid raft associated 1
  ENST ID: ENST00000370408
  CDS Start-End: 138-962
gttggcggcggttggctcggcgcgggagtcggctgcacgtgcgggcgggggcgatgcgtcactgatcggtgaggcgcggccgaggggtcggctttcctcgcgagcctgcggctgggcttcttctcagaggaacgagaatgaatatgactcaagcccgggttctggtggctgcagtggtggggttggtggctgtcctgctctacgcctccatccacaagattgaggagggccatctggctgtgtactacaggggaggagctttactaactagccccagtggaccaggctatcatatcatgttgcctttcattactacgttcagatctgtgcagacaacactacaaactgatgaagttaaaaatgtgccttgtggaacaagtggtggggtcatgatctatattgaccgaatagaagtggttaatatgttggctccttatgcagtgtttgatatcgtgaggaactatactgcagattatgacaagaccttaatcttcaataaaatccaccatgagctgaaccagttctgcagtgcccacacacttcaggaagtttacattgaattgtttgatcaaatagatgaaaacctgaagcaagctctgcagaaagacttaaacctcatggccccaggtctcactatacaggctgtgcgtgttacaaaacccaaaatcccagaagccataagaagaaattttgagttaatggaggctgagaagacaaaactccttatagctgcacagaaacaaaaggttgtggaaaaagaagctgagacagagaggaaaaaggcagttatagaagcagagaagattgcacaagtggcaaaaattcggtttcagcagaaagtgatggaaaaagaaactgaaaagcgcatttctgaaatcgaagatgctgcattcctggcccgagagaaagcgaaagcagatgctgaatattatgctgcacacaaatatgccacctcaaacaag

SEQ ID NO: 130349 - DNA, 1453 bp, Homo sapiens
  Payload ID: 5505
  Gene Symbol: ERLIN1
  Gene Name: ER lipid raft associated 1
  Uniprot ID: O75477
  ENST ID: ENST00000407654
  CDS Start-End: 84-1130
ggctgttggcggcggttggctcggcgcgggagtcggctgcacgtgcgggcgggggcgatgcgtcactgatcggaggaacgagaatgaatatgactcaagcccgggttctggtggctgcagtggtggggttggtggctgtcctgctctacgcctccatccacaagattgaggagggccatctggctgtgtactacaggggaggagctttactaactagccccagtggaccaggctatcatatcatgttgcctttcattactacgttcagatctgtgcagacaacactacaaactgatgaagttaaaaatgtgccttgtggaacaagtggtggggtcatgatctatattgaccgaatagaagtggttaatatgttggctccttatgcagtgtttgatatcgtgaggaactatactgcagattatgacaagaccttaatcttcaataaaatccaccatgagctgaaccagttctgcagtgcccacacacttcaggaagtttacattgaattgtttgatcaaatagatgaaaacctgaagcaagctctgcagaaagacttaaacctcatggccccaggtctcactatacaggctgtgcgtgttacaaaacccaaaatcccagaagccataagaagaaattttgagttaatggaggctgagaagacaaaactccttatagctgcacagaaacaaaaggttgtggaaaaagaagctgagacagagaggaaaaaggcagttatagaagcagagaagattgcacaagtggcaaaaattcggtttcagcagaaagtgatggaaaaagaaactgaaaagcgcatttctgaaatcgaagatgctgcattcctggcccgagagaaagcgaaagcagatgctgaatattatgctgcacacaaatatgccacctcaaacaagcacaagttgaccccggaatatctggagctcaaaaagtaccaggccattgcttctaacagtaagatctattttggcagcaacatccctaacatgttcgtggactcctcatgtgctttgaaatattcagatattaggactggaagagaaagctcactcccctctaaggaggctcttgaaccctctggagagaacgtcatccaaaacaaagagagcacaggttgatgcaagaggtggaaatgttctccatatcaagatgtggcccaaggggttaagtgggaacaatcattatacggactcttcagatttacagagaacttacacttcatctgttccacctctcctgcgatagtcctgggtgctccactgattggaggatagagccagctgtctgacacacaaatggtcttttcagccacagtcttatcaagtatcctatatgtattcctttctaaactgctactcatgaatgaggaaagtctgatgctaagatactgcctgcactggaatgttaaacactaaatatataacaagctgtgttttcctaa

SEQ ID NO: 130350 - DNA, 5792 bp, Homo sapiens
  Payload ID: 5505
  Gene Symbol: ERLIN1
  Gene Name: ER lipid raft associated 1
  Uniprot ID: O75477
  ENST ID: ENST00000421367
  CDS Start-End: 2709-3755
attataataaaacagttgaatatggcttaggaaaatatgaaggttccatgaagtggaattaagagcatagaataactgtactttccttaggaataataggacttatggtaaaggtagtattgggcaacttctttaagagtgttttcctctgagatgtcctatcaccactatctacatctaaaaaacatgctcgattcttgccctataaactgatgtcacagccccaccatccccatttttgctagtggtatcattttcctagtcaaccaaattttttagtcatcacatatcactgttcgtcatctattataataggcagtctctctcttgtttccctggttttagaagattttagtaataaacatttattgggtacctgttacttggagggtattaagctagatggcaagatctgaaacaacataggcagtatagtaaaagtgcttatctgggagtctgaacattacaagccatccaagcattgcaattattgttaaggattattttcaatggtcatgcattttctaatattttaataattggttaaagatttgttatagcgtgggggccgctgctggtgtgtggctggggttatgtcagggcagcctgatctatataatttgggcagatggtgtgagtcagaacagactattatagtgggatccccaaacttgcttttgatgcatgagttggaccactattttttggtgggtaacaacttttcagaggggaatggcagttgtgaattgtatacatttcattctttaagcaatattatgaaaaacttcagagaatgtctacagaaaacagggtatggagcaagttattttccattctttttgctttttggaagttaaaatagctaagctctgcaaatatcatttatttggaacagataaggtcccagacattcctagataataaaaatcaaatgaatgatacaggtaagtgtatttattgaagggtgtgggtagagtggtctgggaagtcttgctttaatgaagacggattgattctatttacctcttcttacttccactactaagtaaccctgggcctgcagtttcctaaccacttgacttccttgccaacagtctgtctccactttcagccgttttatagattcattggccctaaagcactgctttcccatacttccctacccaagagggcaggggtccccaagccctgggccgcggaccggaaccagacagtggcctgttaggaaccaagccggatagcaggaggtgagcggcgggcgagtgagcattatcgccttgagctctgcctgctgtcagattagcgagtggcatcagattctcataggcacgcgaaccctattgtgaactgcacatgtgaggtttgccggctccctgtgagaatctaatgcctgatgatctgaagtggaacagtttcatccccaacccacacacacccccaccccgtccgctgggttagaggactttacaaccctagtccaccttgtccagttatagttccacctctagcctttcaaggcttaaaccattaatgtccttaatttctcttgtattcatctatctcccaactatacctttttccttcccttttttatttttggcaatatgtgcccatggttttttaatttaaaacgaacagaatatgtagtgacgcctaccatagcactccttcccatcacacaagccttcaaggaaactgaagtacttactttggtctccctggaggattccctccgcctcccgccccatgtgcttagcaattctgttcctgtagtctggatggccttcataaagccctcactggaccagcattctggcacataataggaacacttaaaaaacgagagaatgatgccgttatatctaatatcttcctcttctgaactttcacagcactttatttgcaacaagtttagttgctcctgaagggcaggatctctgccggaagcaagtgcgtgccacacagtggggctccgcatacactgcaaaaggacaaataaaccgaacagctaccgtttgagagtgagcgagtgggttctctgcacaagaacaaaccaaccagtcccttgtccgaaagggcgtctccttttctctgcttcgctgctcactccagactgcgggctgtcctcttccgaagcagttaaccagcagtgtacagaaagcgacttgcctccaaaggagcctgcgcggcccgcggctaggagaattttgtcccatgcgctccccgtctcactagccgcgggccggggctacgccgtgtgcgtccccgcgcagccgcagtgctgggcgagtgggcggggccggctgttggcggcggttggctcggcgcgggagtcggctgcacgtgcgggcgggggcgatgcgtcactgatcggtgaggcgcggccgaggggtcggctttcctcgcgagcctgcggctgggcttcttctcagttagtgccttccacccgggagcgacccttgggagagggagtttcaggaagctcaccgagcaggggcggcccactggcctccgggggcggaggagttggcaaggggtcagcgggctcagccagaagggaagaatgaggggacaggggtactggactccccggctcagcctgcgagagagcgccaagtttccggagggagagggtagaaactggagggggtggacctgtcactcacgggactgagggtccttttctcccgctcccaggaggaacgagaatgaatatgactcaagcccgggttctggtggctgcagtggtggggttggtggctgtcctgctctacgcctccatccacaagattgaggagggccatctggctgtgtactacaggggaggagctttactaactagccccagtggaccaggctatcatatcatgttgcctttcattactacgttcagatctgtgcagacaacactacaaactgatgaagttaaaaatgtgccttgtggaacaagtggtggggtcatgatctatattgaccgaatagaagtggttaatatgttggctccttatgcagtgtttgatatcgtgaggaactatactgcagattatgacaagaccttaatcttcaataaaatccaccatgagctgaaccagttctgcagtgcccacacacttcaggaagtttacattgaattgtttgatcaaatagatgaaaacctgaagcaagctctgcagaaagacttaaacctcatggccccaggtctcactatacaggctgtgcgtgttacaaaacccaaaatcccagaagccataagaagaaattttgagttaatggaggctgagaagacaaaactccttatagctgcacagaaacaaaaggttgtggaaaaagaagctgagacagagaggaaaaaggcagttatagaagcagagaagattgcacaagtggcaaaaattcggtttcagcagaaagtgatggaaaaagaaactgaaaagcgcatttctgaaatcgaagatgctgcattcctggcccgagagaaagcgaaagcagatgctgaatattatgctgcacacaaatatgccacctcaaacaagcacaagttgaccccggaatatctggagctcaaaaagtaccaggccattgcttctaacagtaagatctattttggcagcaacatccctaacatgttcgtggactcctcatgtgctttgaaatattcagatattaggactggaagagaaagctcactcccctctaaggaggctcttgaaccctctggagagaacgtcatccaaaacaaagagagcacaggttgatgcaagaggtggaaatgttctccatatcaagatgtggcccaaggggttaagtgggaacaatcattatacggactcttcagatttacagagaacttacacttcatctgttccacctctcctgcgatagtcctgggtgctccactgattggaggatagagccagctgtctgacacacaaatggtcttttcagccacagtcttatcaagtatcctatatgtattcctttctaaactgctactcatgaatgaggaaagtctgatgctaagatactgcctgcactggaatgttaaacactaaatatataacaagctgtgttttcctaagctgagatctgttgaataatgtttacattcgtcccccggggaaatgtatgctcagccaccattcaagagatgactgagaaggagatggtaagttcaagaagactgattgcacctgggacccaggccctttctttgggatccagtcccagccttcatccatgtgattaagatccaggccgctgaagttccccaggaaatgatcttccacttgagcaaccttttacttgatacgatttgcacctttctgttttcctgcagtcagggtggtggcctgcagggacctgagctttgctacccaaccagattcctcatagagattcctaatcactagtttcttgtattcataaactcagagatacagagggcttggtttgaagttggggtgagatgaaacctttgctctgagccaaagctctggggccttgcattccctgcattgggttgatgactgtcagcatcactgccgcaggccatgcttgactaaggtacctggttttagccacagccacctccttgtatgttacctttcagctctggccaagagtgggacagggttttaaccacaaataggagcagcatgcaattcctagtgacttgctgcacagtattgtatcataattacaggaagtttttatttttaaaactggatctggggtatattcatttgccccatcacctctgtctaaaggcccaagtcctagggctgccatggtcacaagcacactgatgctccttaagattgtttatctggagcccacatagtgtggaacaaaaagtcacctagaaagcatccttggtcatcattgtctccttcccacctggcccagagatgcttaaatccaagttgtttctccagctgtcacctcccccaggagatcaggattccactgacgtcctgggcagccagtgaatttaattttccatgagaaacaacagagttaacctgtggcattaggagacctacttcatgtggaccctttttttccttcagtttaacttttctggagcagtgtgctgcgtagttcggcctgagtttgtgcagcttgttaagacaactcttgtgtacgctatgttgaagctcaacaaaaaagtcatgggaccacttctagaaatctttcagctgtcaggcctgtcagtctcatgacagtttgttggttgtgccaaacactttatttgggaaaggaaagcccagatttgaatgggtctttcccctgggccttatcctatagaggcatttgtaatatggagaaaataatttttcatttttgctcatttaattctataaattctctttataaatgaattttgtgttctttagttctccttaaaagaacttttgaattataaaaataaaatctttacctgtcgaattgttgctgcagatgattgttgtggaaaatctggatcattgacctctgtgctttcattcctagagatgttttatagttacatgagcaaaagctgttgccccaaagtgatggccctggaggcggggctgaggaacagggaaatgccgctgtgaagtcttaaagcacttctgcttaaactcccatgtgtgaggagtgtgcctccctgtgccctctcagctctgaggctggccgtctttcggggtgttccttttggcaaatatacactgtaatcttgagtctaaatttatatgttgaaatgctaccttttttaaaataagaaactaaataaaattattttactatca

SEQ ID NO: 130351 - DNA, 6073 bp, Homo sapiens
  Payload ID: 5506
  Gene Symbol: ERLIN2
  Gene Name: ER lipid raft associated 2
  Uniprot ID: O94905
  ENST ID: ENST00000276461
  CDS Start-End: 68-1087
ttttcttgctcgtgggctcggacgagtacggagcgcctgcagggacagcctggataaaggctcactgatggctcagttgggagcagttgtggctgtggcttccagtttcttttgtgcatctctcttctcagctgtgcacaagatagaagagggacatattggggtatattacagaggcggtgccctgctgacttcgaccagcggccctggtttccatctcatgctccctttcatcacatcatataagtctgtgcagaccacactccagacagatgaggtgaagaatgtaccttgtgggactagtggtggtgtgatgatctactttgacagaattgaagtggtgaacttcctggtcccgaacgcagtgtatgatatagtgaagaactatactgctgactatgacaaggccctcatcttcaacaagatccaccacgaactgaaccagttctgcagtgtgcacacgcttcaagaggtctacattgagctgtttgatcagattgatgaaaatctcaaactggctttgcaacaggacctgacctccatggcccctgggctggtcattcaagctgtgcgggtaacaaagcccaacataccagaggcaatccgcagaaactacgagttgatggaaagtgagaagacaaagcttctcattgccgcccagaaacagaaggtggtggaaaaggaagcagagacagagcggaagaaggcgctcattgaggcagaaaaagtggcccaggtggctgagatcacctacgggcagaaggtgatggagaaggagactgagaagaagatttcagaaattgaagatgctgcatttctggcccgggagaaggcaaaggcagatgctgagtgctacactgctatgaaaatagccgaagccaataagctgaagctaacccctgaatatctgcagctgatgaagtacaaggccattgcttccaacagcaagatttactttggcaaagacattcctaacatgttcatggactctgcgggcagtgtgagcaagcagtttgaggggctagctgacaagctaagctttggcttagaagatgaacccttggagacggccactaaggagaattgaaaaaaacttgatatgactgcaaatgatacttaagcagatctttattttttaagatgaatcagaatgttcctccctccccgactaccttctctgactgtcttccagttactgtggtgaaaaagaagaaatgaacttaaatccactccctttctagggaaaggagggtggggactgatgatggggggttttatttcaggtaagcagtttatatgacttccaataagatttgtaaatcatgggcttgacctttgacctctagacactaattttatcctttgaggctggcttaattagggatgctgtcattaaggagagggagaaatgtagagtgttacctccaactcatttgatttcccttacttgggaaaatgcagtccagtgttctcacctctgcctccaaggtaggagatgtctgtgggtgaggctcagcaactgagcaaatatgtgcctgtgagtttgccagtagagctgtgaagaaacagctgcagagaacatttgaccttcctggcattcttgtctgcatgtgtgtgagttattttagaggtgtgctttcttgagccctcataaggaagtactggtgctaggttttgcaagattttgtatacactttgctccttgccctagggctcagagtggtggtttctgactacatttctagagtcagagcttgatcaccacaactcaattatttcggcatcttttcacctatgctgtgatttgttttttttttttcttctcaaaaattctgttcattggttccactcagcatcaagaagacagggacaaacaactcaagtgtcttaacagctgctggagtgggatccttgttatctcttagccactgcaggacctgcctgacaggttatgtgtgcacctcgagatgaagtgtctttctattattgtagagattctgtagtgaagaggtctgacaccatgtgtggaggaggaggaacgatcagtcaagagatgtcctggtcttaatgcctgtggcttgtgctgggagtgggtctgacttagtgataaaaggactctattcactaagtagcctgtgtttttaaatccagggctgcaggcagcaacgcaagtcaggctgaacattcagtctccagagacagctgtgtggagcaaatcagagttcatgcccaagtccccaggttggaatggctgtgccaaaatccattcaaagggttttctttttcattactaggtcagaacattttgagtcaccttgggagattcaggatggggagagcaaatttgaacaaaaggtttttcttatatcctgagattgaggggtagggggtgtccaacctgtatagcccatgggttgtgtctagaattaagtggagggcagctatctggagttaacttgcaagcatattggtgccctccatgaccacctctggcttaggacttggccctgttatgagctgacccccaccccccaccccccaccccccccccccgccaactcctatacccatcttccctaggtgaatctgtgaatggtcctttctggcagcaatccctgccttctttttgggcccatgcccagacttctggtttaaggaatggtcccagagcttgggccagcttgctcagaagttttgggagcattgagcctgcctagaaagatacagtgttagctccccttacttcaaagttgcccttctctgttctgactcctgggacttctggtcctgggcacactttttgcaggcaacaaaatgtgcctgggagtgatggattttaatgtgctccagagtcctttcagaaggtggtcatttcccttggccgggcgcggtggctcacacctgtaatcccagcactttgggaggccaaggcaggcggatcacctgaggttaggagttcgagaccaccctggccaacatgcgaaaccccatctctacgaaaaatagaaatattagccgggcatggtgtcaggcacctgtaatcccagctacttgggaggctgaggcaggagaattgcttgaactcgggaggcagaggttgcagtgagccaagatcatgccatcccactctagcttgggcaatagagcaaggctccgtctcaagaaaagaaggtcatttcccaagactagcatagggagtatccatttaaaatacattcatcttcctcccatttccgtgctattaatcacttgttagagcaacatgacatgcccagcatcccacttcccgaaaatgtctactccttctactctgagctcttgttgcctagacctcagaaaacaccaattcaccacagtagaaccgggagcagggatagctcagcttctctgaatagcacactttgctcaggtcttaacttgagggcctctccggtactaacatcctgcgatagcttgtcccatgagcacagaagagcctcagtagagtcaagtcctgctgcagctgccccaccccaagtttctatcatttcctctttaaacaaaaaatatgttatcctacacattagtgtcaatccaatggttgtctcttatctgtctaaatagcaaaatcatgaaaatcagctgttttatttgcataggacaactaacctgtctgtgtaactttgtttttattttaactcttactagaaaatctaatcttaaaacatttgaattctaaacatgtaaaatgtgacagcctgcaattttgtagacagtgaagtaatggctgctatttataaatggaacatctatcaaaataagtaactgtttataaaattcagtttttgtagggttttccaaggaaaaatcaccttggttgaatgtttctcactcattaaactttgcagaagtgattcatattcagtactgtttttaatcactttttaaaatataaggaccgaatgcaaggaaaccaaagtttattaataatttttatataactaaaataaaatagatgtggagggatctgtgatcatataaaaagggagggttactgaaagaattttagcaatatattgattcaggaaaaggagctgttttataaatgatcattcactgttcctatggttctatgtatctttcaaaccgatacctttactatttaaagagcgtaaatagtgaaagtaagatggtcatacttactgactttatctatttaagtttgatggagataaactatatcttggctagtggctactgtgtctgtgaatgtaaccagtacttctttaagctctattcagtagggttccagccactgcttttttgttgtttctagccactgttttttttttcttgtttccttataaaacaggtaataaccaatcattttgtgtttgtatttccattcctttttatttctgcctttgtgtagactgatgattaagtaggcaaactacttctactttcaaagagccccaagggcttaatgaccccatttgtaactgagaaatgattcttgttttagtaatcattctataaatgatactgctggattgattgccgtgggttgatagctggaggaattgttttggacaatactaacatgtgaatttatgtcttagttttatttgcagtcttgctaagtaaaatgagtctttgtatctacttttttattaaagtgaaatttagcaatagttaatattaggtgacataaataaaacatcccagactagtgagttaagtacaagatctctctaaaaataaacagatgaaaatctatccccattatcgatacagaatttgtgaacgtggcataattcttggtaggtgctatagagatttatcattttaaacagttcacacaccactgcaattctgctccaaaggacaaagatattttcaagtgaaccaaaattcattttgatatcagttcagtggacgaactcccagtctttactctggaaagctgcccagcttagggttgccagataaaacataagatacctagttaaatatgaatttcaacaatgtacaatttttagtctaagtactatgtgtcctaaacactgcatgagacatactcataccaaagtatttgttgcttatgtgtaattcatatttaactgggtatcctgtatttttacttgttaagtccggcaaccctagcccaggctttctcaggttttttttaacagggatcccaagctttttctattggtttgagagcctgctacacaaataatatgatcttaacaattgaatagttatgttaagagtgtagttactgcagttagactgccaaagttcaaatcactgctctactacttcttaggtgtgtggtcttgaataagttttttgacctctctaagcctcagtttcttcattaataaaatgagttgcatggcttatatgaaataatgcatacgaagggctttcacactgtaccttgcatgtatgtattcaaaaacttcaatctggagaaacgggctaaaaaacatacagctattaaatgggagccactaagtagaaagccaaacacgtgaaaaaaaatggaataagattacaaatgggatagcacatagaagaagggaatgacattgcaatgcagcaaacacagtattgaggatacatacctctacaaaaatgttgtgtagaaaataacctggtttaaagaaagaaaagaaaagaaaagaagccaggcacggtggttcacacctgtaatcctagcactttgggaggctgaggtgggtggatcacctgaggtcgggagttcaagaccagcctgaccaacatagagaaaccccatctcgactaaaaatagaaaattaaccgggcatggtggtgcatgcctgaaatcccagctacttgggaggctaaggcaggagaatcacttgaacctgggaggtagaggatgcagtgagccaaaatcacgccactgcactccagcctgggcaacaagagcaaaactctatctccaaaaaaaagaaaagaatctgatttggccctgttgagaggaactgtccagttctggtctccaattttaaaaatgaaaaaaatttgaagaagctagaaagaaaatgttaaaaccaaaaag

SEQ ID NO: 130352 - DNA, 1742 bp, Homo sapiens
  Payload ID: 5506
  Gene Symbol: ERLIN2
  Gene Name: ER lipid raft associated 2
  Uniprot ID: O94905
  ENST ID: ENST00000335171
  CDS Start-End: 339-797
ggcccccgccccttcgtgcgcgcgctgggcctagctgccgctcagggtcggggctgacccgtcactttcgggaacctcagtcccagcagcttctctccctcagccggcccgctcctggagagagacagaaacccttttctgtcgcgtcctctccttgcgagccgcagggggaccgagcggaggctattggagccgcagccccagaccagggcgcttgaccctctctcggaacggggcggggaaggggcgcgagtgacctcggggagggaagggcactggcaggaaaggacgcaactgcagatcggtagccggaggccgccacggataaaggctcactgatggctcagttgggagcagttgtggctgtggcttccagtttcttttgtgcatctctcttctcagctgtgcacaagatagaagagggacatattggggtatattacagaggcggtgccctgctgacttcgaccagcggccctggtttccatctcatgctccctttcatcacatcatataagtctgtgcagaccacactccagacagatgaggtgaagaatgtaccttgtgggactagtggtggtgtgatgatctactttgacagaattgaagtggtgaacttcctggtcccgaacgcagtgtatgatatagtgaagaactatactgctgactatgacaaggccctcatcttcaacaagatccaccacgaactgaaccagttctgcagtgtgcacacgcttcaagaggtctacattgagctgtttggactggaaaatgatttttcccaggaatcttcataaaagggaccctgagcaagaacatttttcatagcagacaggaggactcatccacatcgccagcaatcataattaagcaaaccgccttttgcaccatttaagatttaggaaatcatccaaattacttttaatgtttctgcagtagaaaatgaatctaaattcattttatagggtttgtagtcttttatctgttttggattcactgtgcttttaagaaaaagttggtaaatttgccgttgatttttctttttaacctcaaactaatagaattttataaaatattaattttctctagccattgtcttaggacttgtgacattacatgaacatttcaaagcactgaaaaaagacaaaggatccctaatgtccctgaagaggaaattaaaatacaaagttgtttttcattagcaaacttcttactttcttacagctaaacttggtagcttagtgaagtacagctgcttgtatggaggagctggggaaatatatttgctttgaaacttttttatttttacatctcagtcttgctagcaagcactacttggcttagaatctgtcatatccataaaggaggagctcatgtctctagtcctggcccttcaactcagaaggttcttctatactttccttctctcaggactcttatagcccagactttaaacatgaagctgcataattttcatcacttcttactctgccgcatcctctttgcccatgttattaaagtattatctaatactttgaagtttacctgaagaacctctttgtgtgtacttagtaatacaactttttttcctgtcccaacaccttttaatacagttgaatggataaaaacatggatacaaacacatggatatagttatcactgaagcagtgtgacataaaataatacctatgtatacaacactcctctgtaaatagcaaatgtaaagtaaaagatacacaaca

SEQ ID NO: 130353 - DNA, 1473 bp, Homo sapiens
  Payload ID: 5506
  Gene Symbol: ERLIN2
  Gene Name: ER lipid raft associated 2
  Uniprot ID: O94905
  ENST ID: ENST00000397228
  CDS Start-End: 96-554
ggaagtcgcgtgctgaggggtgtgacggttttcttgctcgtgggctcggacgagtacggagcgcctgcagggacagcctggataaaggctcactgatggctcagttgggagcagttgtggctgtggcttccagtttcttttgtgcatctctcttctcagctgtgcacaagatagaagagggacatattggggtatattacagaggcggtgccctgctgacttcgaccagcggccctggtttccatctcatgctccctttcatcacatcatataagtctgtgcagaccacactccagacagatgaggtgaagaatgtaccttgtgggactagtggtggtgtgatgatctactttgacagaattgaagtggtgaacttcctggtcccgaacgcagtgtatgatatagtgaagaactatactgctgactatgacaaggccctcatcttcaacaagatccaccacgaactgaaccagttctgcagtgtgcacacgcttcaagaggtctacattgagctgtttggactggaaaatgatttttcccaggaatcttcataaaagggaccctgagcaagaacatttttcatagcagacaggaggactcatccacatcgccagcaatcataattaagcaaaccgccttttgcaccatttaagatttaggaaatcatccaaattacttttaatgtttctgcagtagaaaatgaatctaaattcattttatagggtttgtagtcttttatctgttttggattcactgtgcttttaagaaaaagttggtaaatttgccgttgatttttctttttaacctcaaactaatagaattttataaaatattaattttctctagccattgtcttaggacttgtgacattacatgaacatttcaaagcactgaaaaaagacaaaggatccctaatgtccctgaagaggaaattaaaatacaaagttgtttttcattagcaaacttcttactttcttacagctaaacttggtagcttagtgaagtacagctgcttgtatggaggagctggggaaatatatttgctttgaaacttttttatttttacatctcagtcttgctagcaagcactacttggcttagaatctgtcatatccataaaggaggagctcatgtctctagtcctggcccttcaactcagaaggttcttctatactttccttctctcaggactcttatagcccagactttaaacatgaagctgcataattttcatcacttcttactctgccgcatcctctttgcccatgttattaaagtattatctaatactttgaagtttacctgaagaacctctttgtgtgtacttagtaatacaactttttttcctgtcccaacaccttttaatacagttgaatggataaaaacatggatacaaacacatggatatagttatcactgaagcagtgtgacataaaataatacctatgtatacaacactcctctgtaaatagc

SEQ ID NO: 130354 - DNA, 2623 bp, Homo sapiens
  Payload ID: 5506
  Gene Symbol: ERLIN2
  Gene Name: ER lipid raft associated 2
  Uniprot ID: O94905
  ENST ID: ENST00000518586
  CDS Start-End: 343-963
acgcggcccccgccccttcgtgcgcgcgctgggcctagctgccgctcagggtcggggctgacccgtcactttcgggaacctcagtcccagcagcttctctccctcagccggcccgctcctggagagagacagaaacccttttctgtcgcgtcctctccttgcgagccgcagggggaccgagcggaggctattggagccgcagccccagaccagggcgcttgaccctctctcggaacggggcggggaaggggcgcgagtgacctcggggagggaagggcactggcaggaaaggacgcaactgcagatcggtagccggaggccgccacggataaaggctcactgatggctcagttgggagcagttgtggctgtggcttccagtttcttttgtgcatctctcttctcagctgtgcacaagatagaagagggacatattggggtatattacagaggcggtgccctgctgacttcgaccagcggccctggtttccatctcatgctccctttcatcacatcatataagtctgtgcagaccacactccagacagatgaggtgaagaatgtaccttgtgggactagtggtggtgtgatgatctactttgacagaattgaagtggtgaacttcctggtcccgaacgcagtgtatgatatagtgaagaactatactgctgactatgacaaggccctcatcttcaacaagatccaccacgaactgaaccagttctgcagtgtgcacacgcttcaagaggtctacattgagctgtttggtaagaaagtctctcctgagcatgccgtgcttaagcagggttcctggaaccccgcgtctctccactgcctaaagcctggctgcctgcagggtgtgatggtcacttatggacaggaaatgttaaagaatcttgtgctcaggagctggtcacaaaggagttcatggagaatgctgatagctatgcaacaagatccttagagggctggagctttgggcacagggaccatagtggagtagagtattcacttctggcctcaatcagaggctggagtggaaatgtgttcccactgttcctaaactatcattctataatgaagacaaggtccattctagaagaaccttagagattgtccagaccagcatcctcattttaagctgagggtactgtgacccaaagcaagaaagtcacagagccagatgccaattagtagtggggctgaaacaggagccttcctctcctggctcttcagcattcttctcaccatgcaacactgaatggagggcccccaggaatgggtgatgaaaaagacatgattcatagttaattctagaagtgagatgagaaccatagctccttccagttctcagaacctttgtgattattatttttttactctgtacctgtagcaacgaatagaaaaacactttaaacaaaaagattccacgtgcctaagtagatatgttttgtcctttttacctttttcaaagtaaaggcaacctgacttagcagcaaaggaaggacacagttgggtaactgttataacttgtttgcagtcaagtattctgtttaaactcactgccagaaattctctaatagccaatgccaaaagtaaatgaatttttaaccaatagtataactgttcttgacactaggactggaaaatgatttttcccaggaatcttcataaaagggaccctgagcaagaacatttttcatagcagacaggaggactcatccacatcgccagcaatcataattaagcaaaccgccttttgcaccatttaagatttaggaaatcatccaaattacttttaatgtttctgcagtagaaaatgaatctaaattcattttatagggtttgtagtcttttatctgttttggattcactgtgcttttaagaaaaagttggtaaatttgccgttgatttttctttttaacctcaaactaatagaattttataaaatattaattttctctagccattgtcttaggacttgtgacattacatgaacatttcaaagcactgaaaaaagacaaaggatccctaatgtccctgaagaggaaattaaaatacaaagttgtttttcattagcaaacttcttactttcttacagctaaacttggtagcttagtgaagtacagctgcttgtatggaggagctggggaaatatatttgctttgaaacttttttatttttacatctcagtcttgctagcaagcactacttggcttagaatctgtcatatccataaaggaggagctcatgtctctagtcctggcccttcaactcagaaggttcttctatactttccttctctcaggactcttatagcccagactttaaacatgaagctgcataattttcatcacttcttactctgccgcatcctctttgcccatgttattaaagtattatctaatactttgaagtttacctgaagaacctctttgtgtgtacttagtaatacaactttttttcctgtcccaacaccttttaatacagttgaatggataaaaacatggatacaaacacatggatatagttatcactgaagcagtgtgacataaaataatacctatgtatacaacactcctctgtaaatagcaaatgtaaagtaaaagatacacaacagatca

SEQ ID NO: 130355 - DNA, 1718 bp, Homo sapiens
  Payload ID: 5506
  Gene Symbol: ERLIN2
  Gene Name: ER lipid raft associated 2
  Uniprot ID: O94905
  ENST ID: ENST00000519638
  CDS Start-End: 358-1377
tactggtaggaaaggttcagtgacagcacattcgtgttcacaggaagacaaggctgtgttctgaaccctacccagctggcacgggttctcccttgagcaacggctgtatccggagccagtgcttcctcagtgcggtgggggctctaattttacagttaaagaaaggggaacgttgactgagaacgaggaggaagcgagttgtagatctagccttgtgttcacacgacaccaggctggatatgagtcactcgcagggagctcagcttggtgaggtcctctcgctgttgtggccttttctcctgcacgttggaccacacacattttcccgtgtcttttccctaggataaaggctcactgatggctcagttgggagcagttgtggctgtggcttccagtttcttttgtgcatctctcttctcagctgtgcacaagatagaagagggacatattggggtatattacagaggcggtgccctgctgacttcgaccagcggccctggtttccatctcatgctccctttcatcacatcatataagtctgtgcagaccacactccagacagatgaggtgaagaatgtaccttgtgggactagtggtggtgtgatgatctactttgacagaattgaagtggtgaacttcctggtcccgaacgcagtgtatgatatagtgaagaactatactgctgactatgacaaggccctcatcttcaacaagatccaccacgaactgaaccagttctgcagtgtgcacacgcttcaagaggtctacattgagctgtttgatcagattgatgaaaatctcaaactggctttgcaacaggacctgacctccatggcccctgggctggtcattcaagctgtgcgggtaacaaagcccaacataccagaggcaatccgcagaaactacgagttgatggaaagtgagaagacaaagcttctcattgccgcccagaaacagaaggtggtggaaaaggaagcagagacagagcggaagaaggcgctcattgaggcagaaaaagtggcccaggtggctgagatcacctacgggcagaaggtgatggagaaggagactgagaagaagatttcagaaattgaagatgctgcatttctggcccgggagaaggcaaaggcagatgctgagtgctacactgctatgaaaatagccgaagccaataagctgaagctaacccctgaatatctgcagctgatgaagtacaaggccattgcttccaacagcaagatttactttggcaaagacattcctaacatgttcatggactctgcgggcagtgtgagcaagcagtttgaggggctagctgacaagctaagctttggcttagaagatgaacccttggagacggccactaaggagaattgaaaaaaacttgatatgactgcaaatgatacttaagcagatctttattttttaagatgaatcagaatgttcctccctccccgactaccttctctgactgtcttccagttactgtggtgaaaaagaagaaatgaacttaaatccactccctttctagggaaaggagggtggggactgatgatggggggttttatttcaggtaagcagtttatatgacttccaataagatttgtaaatcatgggcttgacctttgacctctagacactaattttatcctttgaggctggcttaattagggatgctgtcattaaggagagggagaaatgtagagtgttacctccaa

SEQ ID NO: 130356 - DNA, 663 bp, Homo sapiens
  Payload ID: 5506
  Gene Symbol: ERLIN2
  Gene Name: ER lipid raft associated 2
  ENST ID: ENST00000518526
  CDS Start-End: 72-663
acggttttcttgctcgtgggctcggacgagtacggagcgcctgcagggacagcctggataaaggctcactgatggctcagttgggagcagttgtggctgtggcttccagtttcttttgtgcatctctcttctcagctgtgcacaagatagaagagggacatattggggtatattacagtggtggtgtgatgatctactttgacagaattgaagtggtgaacttcctggtcccgaacgcagtgtatgatatagtgaagaactatactgctgactatgacaaggccctcatcttcaacaagatccaccacgaactgaaccagttctgcagtgtgcacacgcttcaagaggtctacattgagctgtttgatcagattgatgaaaatctcaaactggctttgcaacaggacctgacctccatggcccctgggctggtcattcaagctgtgcgggtaacaaagcccaacataccagaggcaatccgcagaaactacgagttgatggaaagtgagaagacaaagcttctcattgccgcccagaaacagaaggtggtggaaaaggaagcagagacagagcggaagaaggcgctcattgaggcagaaaaagtggcccaggtggctgagatcacctacgggcagaaggtgatggagaaggagactgagaaga

SEQ ID NO: 130357 - DNA, 1602 bp, Homo sapiens
  Payload ID: 5506
  Gene Symbol: ERLIN2
  Gene Name: ER lipid raft associated 2
  ENST ID: ENST00000521644
  CDS Start-End: 587-1602
gccccttcgtgcgcgcgctgggcctagctgccgctcagggtcggggctgacccgtcactttcgggaacctcagtcccagcagcttctctccctcagccggcccgctcctggagagagacagaaacccttttctgtcgcgtcctctccttgcgagccgcagggggaccgagcggaggctattggagccgcagccccagaccagggcgcttgaccctctctcggaacggggcggggaaggggcgcgagtgacctcggggagggaagggcactggcaggaaaggacgcaactgcagatcggtagccggaggccgccacggtaaaataagcgcctcgcagatgtccgcgccccggttacgttagacctgggaggcagaatccacgccctgcgctcacgggcccacgcacgcacagctgaactttgcagtcagtcaccatagttccagatcattcagcgttcaggatcccactcctccgcgtcctggtgcctgaacgcggttggacctaggagcctagaggctcgcagtttgggacattgcctttctctctgaccacgggcttggggatctgtcaggataaaggctcactgatggctcagttgggagcagttgtggctgtggcttccagtttcttttgtgcatctctcttctcagctgtgcacaagatagaagagggacatattggggtatattacagaggcggtgccctgctgacttcgaccagcggccctggtttccatctcatgctccctttcatcacatcatataagtctgtgcagaccacactccagacagatgaggtgaagaatgtaccttgtgggactagtggtggtgtgatgatctactttgacagaattgaagtggtgaacttcctggtcccgaacgcagtgtatgatatagtgaagaactatactgctgactatgacaaggccctcatcttcaacaagatccaccacgaactgaaccagttctgcagtgtgcacacgcttcaagaggtctacattgagctgtttgatcagattgatgaaaatctcaaactggctttgcaacaggacctgacctccatggcccctgggctggtcattcaagctgtgcgggtaacaaagcccaacataccagaggcaatccgcagaaactacgagttgatggaaagtgagaagacaaagcttctcattgccgcccagaaacagaaggtggtggaaaaggaagcagagacagagcggaagaaggcgctcattgaggcagaaaaagtggcccaggtggctgagatcacctacgggcagaaggtgatggagaaggagactgagaagaagatttcagaaattgaagatgctgcatttctggcccgggagaaggcaaaggcagatgctgagtgctacactgctatgaaaatagccgaagccaataagctgaagctaacccctgaatatctgcagctgatgaagtacaaggccattgcttccaacagcaagatttactttggcaaagacattcctaacatgttcatggactctgcgggcagtgtgagcaagcagtttgaggggctagctgacaagctaagctttggcttagaagatgaacccttggagacggccactaaggagaa

SEQ ID NO: 130358 - DNA, 2347 bp, Homo sapiens
  Payload ID: 5506
  Gene Symbol: ERLIN2
  Gene Name: ER lipid raft associated 2
  Uniprot ID: O94905
  ENST ID: ENST00000523887
  CDS Start-End: 70-690
ggttttcttgctcgtgggctcggacgagtacggagcgcctgcagggacagcctggataaaggctcactgatggctcagttgggagcagttgtggctgtggcttccagtttcttttgtgcatctctcttctcagctgtgcacaagatagaagagggacatattggggtatattacagaggcggtgccctgctgacttcgaccagcggccctggtttccatctcatgctccctttcatcacatcatataagtctgtgcagaccacactccagacagatgaggtgaagaatgtaccttgtgggactagtggtggtgtgatgatctactttgacagaattgaagtggtgaacttcctggtcccgaacgcagtgtatgatatagtgaagaactatactgctgactatgacaaggccctcatcttcaacaagatccaccacgaactgaaccagttctgcagtgtgcacacgcttcaagaggtctacattgagctgtttggtaagaaagtctctcctgagcatgccgtgcttaagcagggttcctggaaccccgcgtctctccactgcctaaagcctggctgcctgcagggtgtgatggtcacttatggacaggaaatgttaaagaatcttgtgctcaggagctggtcacaaaggagttcatggagaatgctgatagctatgcaacaagatccttagagggctggagctttgggcacagggaccatagtggagtagagtattcacttctggcctcaatcagaggctggagtggaaatgtgttcccactgttcctaaactatcattctataatgaagacaaggtccattctagaagaaccttagagattgtccagaccagcatcctcattttaagctgagggtactgtgacccaaagcaagaaagtcacagagccagatgccaattagtagtggggctgaaacaggagccttcctctcctggctcttcagcattcttctcaccatgcaacactgaatggagggcccccaggaatgggtgatgaaaaagacatgattcatagttaattctagaagtgagatgagaaccatagctccttccagttctcagaacctttgtgattattatttttttactctgtacctgtagcaacgaatagaaaaacactttaaacaaaaagattccacgtgcctaagtagatatgttttgtcctttttacctttttcaaagtaaaggcaacctgacttagcagcaaaggaaggacacagttgggtaactgttataacttgtttgcagtcaagtattctgtttaaactcactgccagaaattctctaatagccaatgccaaaagtaaatgaatttttaaccaatagtataactgttcttgacactaggactggaaaatgatttttcccaggaatcttcataaaagggaccctgagcaagaacatttttcatagcagacaggaggactcatccacatcgccagcaatcataattaagcaaaccgccttttgcaccatttaagatttaggaaatcatccaaattacttttaatgtttctgcagtagaaaatgaatctaaattcattttatagggtttgtagtcttttatctgttttggattcactgtgcttttaagaaaaagttggtaaatttgccgttgatttttctttttaacctcaaactaatagaattttataaaatattaattttctctagccattgtcttaggacttgtgacattacatgaacatttcaaagcactgaaaaaagacaaaggatccctaatgtccctgaagaggaaattaaaatacaaagttgtttttcattagcaaacttcttactttcttacagctaaacttggtagcttagtgaagtacagctgcttgtatggaggagctggggaaatatatttgctttgaaacttttttatttttacatctcagtcttgctagcaagcactacttggcttagaatctgtcatatccataaaggaggagctcatgtctctagtcctggcccttcaactcagaaggttcttctatactttccttctctcaggactcttatagcccagactttaaacatgaagctgcataattttcatcacttcttactctgccgcatcctctttgcccatgttattaaagtattatctaatactttgaagtttacctgaagaacctctttgtgtgtacttagtaatacaactttttttcctgtcccaacaccttttaatacagttgaatggataaaaacatggatacaaacacatggatatagttatcactgaagcagtgtgacataaaataatacctatgtatacaacactcctctgtaaatagcaaatgtaaagtaaaagatacacaacaga

SEQ ID NO: 130359 - DNA, 771 bp, Homo sapiens
  Payload ID: 5506
  Gene Symbol: ERLIN2
  Gene Name: ER lipid raft associated 2
  Uniprot ID: O94905
  ENST ID: ENST00000523107
  CDS Start-End: 123-743
gtaaaataagcgcctcgcagatgtccgcgccccggttacgttagacctgggaggcagaatccacgccctgcgctcacgggcccacgcacgcacagctgaactttgcagataaaggctcactgatggctcagttgggagcagttgtggctgtggcttccagtttcttttgtgcatctctcttctcagctgtgcacaagatagaagagggacatattggggtatattacagaggcggtgccctgctgacttcgaccagcggccctggtttccatctcatgctccctttcatcacatcatataagtctgtgcagaccacactccagacagatgaggtgaagaatgtaccttgtgggactagtggtggtgtgatgatctactttgacagaattgaagtggtgaacttcctggtcccgaacgcagtgtatgatatagtgaagaactatactgctgactatgacaaggccctcatcttcaacaagatccaccacgaactgaaccagttctgcagtgtgcacacgcttcaagaggtctacattgagctgtttggtaagaaagtctctcctgagcatgccgtgcttaagcagggttcctggaaccccgcgtctctccactgcctaaagcctggctgcctgcagggtgtgatggtcacttatggacaggaaatgttaaagaatcttgtgctcaggagctggtcacaaaggagttcatggagaatgctgatagctatgcaacaagatccttagagggctggagctttgggcacagggacca

SEQ ID NO: 130360 - DNA, 355 bp, Homo sapiens
  Payload ID: 5507
  Gene Symbol: EMC1
  Gene Name: ER membrane protein complex subunit 1
  ENST ID: ENST00000356068
  CDS Start-End: 19-246
ggtgcatgcgctcgcatcatggcggctgagtgggcttctcgtttctggctttgggctacgctgctgattcctgcggccgcggtctacgaagaccaagtgggcaagtttgattggagacagcaatatgttgggaaggtcaagtttgcctccttggaattttcccctggatccaagaagttggttgtagccacagagaagaatgtgattgcagcattaaattcccgaactggggagatctgtgagtgaactgagaactgtgtctactggctgcctcagggatgaaagacttaccattgccaactctgcctggctgattcctgaataaggaacatgttggccaaaagatgcctctcct

SEQ ID NO: 130361 - DNA, 5408 bp, Homo sapiens
  Payload ID: 5507
  Gene Symbol: EMC1
  Gene Name: ER membrane protein complex subunit 1
  Uniprot ID: Q8N766
  ENST ID: ENST00000375199
  CDS Start-End: 1-2979
atggcggctgagtgggcttctcgtttctggctttgggctacgctgctgattcctgcggccgcggtctacgaagaccaagtgggcaagtttgattggagacagcaatatgttgggaaggtcaagtttgcctccttggaattttcccctggatccaagaagttggttgtagccacagagaagaatgtgattgcagcattaaattcccgaactggggagatcttgtggcgccatgttgacaagggcacggcagaaggggctgtggatgccatgctgctgcacggacaggatgtgatcactgtgtccaatggaggccgaatcatgcgttcctgggagactaacatcgggggcctgaactgggagataaccctggacagtggcagtttccaggcacttgggctggttggcctgcaggagtctgtaaggtacatcgcagtcctgaagaagactacacttgccctccatcacctctccagtgggcacctcaagtgggtggaacatctcccagaaagtgacagcatccactaccagatggtgtattcttacggctctggggtggtgtgggccctcggagttgttcccttcagccatgtgaacattgtcaagtttaatgtggaagatggagagattgttcagcaggttagggtttcaactccgtggctgcagcacctgtctggagcctgtggtgtggtggatgaggctgtcctggtgtgtcctgacccgagctcacgttccctccaaactttggctctggagacggaatgggagttgagacagatcccactgcagtctctcgacttagaatttggaagtggattccaaccccgggtcctgcctacccagcccaacccagtggacgcttcccgggcccagttcttcctgcacttgtccccaagccactatgctctgctgcagtaccattatggaacgctgagtttgcttaaaaacttcccacagactgccctagtgagctttgccaccactggggagaagacggtggctgcagtcatggcctgtcggaatgaagtgaaaagtagcagttctgaagatgggtcaatggggagcttttcggagaagtctagttcaaaggactctctggcttgcttcaatcagacctacaccattaacctatacctcgtggagacaggtcggcggctgctggacaccacgataacatttagcctggaacagagcggcactcggcctgagcggctgtatatccaggtgttcttgaagaaggatgactcagtgggctaccgggctttggtgcagacagaggatcatctgctacttttcctgcagcagttggcagggaaggtggtgctgtggagccgtgaggagtccctggcagaagtggtgtgcctagagatggtggacctccccctgactggggcacaggccgagctggaaggagaatttggcaaaaaggcagatggcttgctggggatgttcctgaaacgcctctcgtctcagcttatcctgctgcaagcatggacttcccacctctggaaaatgttttatgatgctcggaagccccggagtcagattaagaatgagatcaacattgacaccctggccagagatgaattcaacctccagaagatgatggtgatggtaacagcctcaggcaagctttttggcattgagagcagctctggcaccatcctgtggaaacagtatctacccaatgtcaagccagactcctcctttaaactgatggtccagagaactactgctcatttcccccatcccccacagtgcaccctgctggtgaaggacaaggagtcgggaatgagttctctgtatgtcttcaatcccatttttgggaagtggagtcaggtagctcccccagtgctgaagcgccccatcttgcagtccttgcttctcccagtcatggatcaagactacgccaaggtgttgctgttgatagatgatgaatacaaggtcacagcttttccagccactcggaatgtcttgcgacagctacatgagcttgccccttccatcttcttctatttggtggatgcagagcagggacggctgtgtggatatcggcttcgaaaggatctcaccactgagctgagttgggagctgaccattcccccagaagtacagcggatcgtcaaggtgaaggggaaacgcagcagtgagcacgttcattcccagggccgtgtgatgggggaccgcagtgtgctctacaagagcctgaaccccaacctgctggccgtggtgacagagagcacagacgcgcaccatgagcgcacctttattggcatcttcctcattgatggcgtcactgggcgtatcattcactcctctgtgcagaagaaagccaaaggccctgtccatatcgtgcattcagagaactgggtggtgtaccagtactggaacaccaaggctcggcgcaacgagtttaccgtactggagctctatgagggcactgagcaatacaacgccaccgccttcagctccctggaccgcccccagctgccccaggtcctccagcagtcctatatcttcccgtcctccatcagtgccatggaggccaccatcaccgaacggggcatcaccagccgacacctgctgattggactaccttctggagcaattctttcccttcctaaggctttgctggatccccgccgccccgagatcccaacagaacaaagcagagaggagaacttaatcccgtattctccagatgtacagatacacgcagagcgattcatcaactataaccagacagtttctcgaatgcgaggtatctacacagctccctcgggtctggagtccacttgtttggttgtggcctatggtttggacatttaccaaactcgagtctacccatccaagcagtttgacgttctgaaggatgactatgactacgtgttaatcagcagcgtcctctttggcctggtttttgccaccatgatcactaagagactggcacaggtgaagctcctgaatcgggcctggcgataaagaacaaagactgtgcctaaaagtggagagccaggggagtgtgggtcagataagcagctacagctgcagtttggtggattggtggagtatgtgtgtgtgtcagtgctcagctaagaactgtagggaagatggatgaccttcacgcagaactccttttgggatatacatgatgcagaaaggatcctacatggagagagacagaactctctcagctgacactctcagagattcctgatgggctttctcttgaagtccaaaggcgtctgcattgtttcctttctttgcccatccatgaatgttctgttttgttttttttaataagaattccggctgatttttgtgaggcctgtttaaattgactttactttgccttttgtgtttctcaattttatctagaaatctttctgactttttccatctcttgcttcaaagtaagaggggaactctccttgccgactccaccttataggtacatttggtgttttgcactgggaagaaataggatccatccttagctgaggcttgaggactgatccagcctctcatggcttccctccaaagtaacttagggttgagggatctatatgtgatgtcaaaacttactttaaacctctagtttcgtgctgtcatttattaggctgggccaccaaatctttgtttcaatttatcagaagccaagtgcatactagcgtcttgtttgttgcccattgcctatacttttcacctgagatgtgtgagttggggccttttaaaaactactgaattgtctgagccttgaagacatttccagggagaagagataatctctcatttcacccacaggctggtctaatcataacctagttaaagatgtccttgtttaagaaccccattatttatttttagtttttaatataaattaacatgtgggtcattatatttctccttaaatgaggaaattttaaattttattgatctaacctttgaagctttaaaaaaggagaaagagggtaggggtgggaaactggcatactgtgtgtatagcactgccgattggctaggccactgtgtctctgctacaaattaaagaaatcctaaaagttttccttggtcatagagttggggaatgacagaatttttctttgttgtgaaatgtatgtacagagtagaccatctctagccctgtggtgaaagaggtacactcgaatgtttgcataaagcaagtgacaaatgacactgtttaagtcctcttttgtgtcttagaagatcattttgaggctattttcacattagaggggataaaagcagtgaagacatggagtaagtgtattttattttagtaaggaaaggtcagtttaatcatatatgggttggttaggttatctaaaaatttgtcatctttctatggtcatatgctgatggtagattatggcagagaaggaagaggaaatgacaaccattttattaattgtcagtttgatattgagtgactgaatgtctaagaatctccagaaaaaaacaggcatctatcatcctgacccaaggcatattttaacataacctgggagaagagagttaagtacaagttaaaaaaaattctgccctagttttgagaaagcctggctggaattctgactgtcttacatacatatgtgcaaggttagcctgcaagattctagtttttatttaccagtgtgccagaatctgaaacaagctactgggagggaaggtatttgtcctttagtaaaattccctgtatttcagctgtaatcaaagttacctcaaagcaggtgctttttttttttttgagacagaatctcactctgttgcccaggctggagtgcagtggcacgatcttggctcacggcaacctccacctcacaagcagctgggactataggcatgtgccaccacgctcagctaattttttgtatttttagtagagacggggtttcattgtgttggccaggctggtctcgaactcctggcctcaagtgatctgctggccttggcctcccaaagtgctgggattacaggtgtgagccaccgagcttggccaagtgcttaaaatagttaatgctaatgccacagtccaatttaaatcttttcttagttctcaactttccttaatcttaaagcagcattcggttctgagcagctacactcagtctccactaatggctgctgagactatgtttcctctctcaattctctgatctatttgctttcttgtcattccttgttttttgtgtgtattccttgacttacctcttctcctgtcttcattaattaggttaattttggggccccatggtgtttcacgtaaaaagatttggctgggcgtgatggctcatgcctataatcccagcactttgggaggccatagtggaggatctcttgagcccaggagttccagaccagcctgggcaacatagcaagactctatctac

SEQ ID NO: 130362 - DNA, 4084 bp, Homo sapiens
  Payload ID: 5507
  Gene Symbol: EMC1
  Gene Name: ER membrane protein complex subunit 1
  Uniprot ID: Q8N766
  ENST ID: ENST00000375208
  CDS Start-End: 14-2929
atgcgctcgcatcatggcggctgagtgggcttctcgtttctggctttgggctacgctgctgattcctgcggccgcggtctacgaagaccaagtgggcaagtttgattggagacagcaatatgttgggaaggtcaagtttgcctccttggaattttcccctggatccaagaagttggttgtagccacagagaagaatgtgattgcagcattaaattcccgaactggggagatctatgtgatcactgtgtccaatggaggccgaatcatgcgttcctgggagactaacatcgggggcctgaactgggagataaccctggacagtggcagtttccaggcacttgggctggttggcctgcaggagtctgtaaggtacatcgcagtcctgaagaagactacacttgccctccatcacctctccagtgggcacctcaagtgggtggaacatctcccagaaagtgacagcatccactaccagatggtgtattcttacggctctggggtggtgtgggccctcggagttgttcccttcagccatgtgaacattgtcaagtttaatgtggaagatggagagattgttcagcaggttagggtttcaactccgtggctgcagcacctgtctggagcctgtggtgtggtggatgaggctgtcctggtgtgtcctgacccgagctcacgttccctccaaactttggctctggagacggaatgggagttgagacagatcccactgcagtctctcgacttagaatttggaagtggattccaaccccgggtcctgcctacccagcccaacccagtggacgcttcccgggcccagttcttcctgcacttgtccccaagccactatgctctgctgcagtaccattatggaacgctgagtttgcttaaaaacttcccacagactgccctagtgagctttgccaccactggggagaagacggtggctgcagtcatggcctgtcggaatgaagtgcagaaaagtagcagttctgaagatgggtcaatggggagcttttcggagaagtctagttcaaaggactctctggcttgcttcaatcagacctacaccattaacctatacctcgtggagacaggtcggcggctgctggacaccacgataacatttagcctggaacagagcggcactcggcctgagcggctgtatatccaggtgttcttgaagaaggatgactcagtgggctaccgggctttggtgcagacagaggatcatctgctacttttcctgcagcagttggcagggaaggtggtgctgtggagccgtgaggagtccctggcagaagtggtgtgcctagagatggtggacctccccctgactggggcacaggccgagctggaaggagaatttggcaaaaaggcagatggcttgctggggatgttcctgaaacgcctctcgtctcagcttatcctgctgcaagcatggacttcccacctctggaaaatgttttatgatgctcggaagccccggagtcagattaagaatgagatcaacattgacaccctggccagagatgaattcaacctccagaagatgatggtgatggtaacagcctcaggcaagctttttggcattgagagcagctctggcaccatcctgtggaaacagtatctacccaatgtcaagccagactcctcctttaaactgatggtccagagaactactgctcatttcccccatcccccacagtgcaccctgctggtgaaggacaaggagtcgggaatgagttctctgtatgtcttcaatcccatttttgggaagtggagtcaggtagctcccccagtgctgaagcgccccatcttgcagtccttgcttctcccagtcatggatcaagactacgccaaggtgttgctgttgatagatgatgaatacaaggtcacagcttttccagccactcggaatgtcttgcgacagctacatgagcttgccccttccatcttcttctatttggtggatgcagagcagggacggctgtgtggatatcggcttcgaaaggatctcaccactgagctgagttgggagctgaccattcccccagaagtacagcggatcgtcaaggtgaaggggaaacgcagcagtgagcacgttcattcccagggccgtgtgatgggggaccgcagtgtgctctacaagagcctgaaccccaacctgctggccgtggtgacagagagcacagacgcgcaccatgagcgcacctttattggcatcttcctcattgatggcgtcactgggcgtatcattcactcctctgtgcagaagaaagccaaaggccctgtccatatcgtgcattcagagaactgggtggtgtaccagtactggaacaccaaggctcggcgcaacgagtttaccgtactggagctctatgagggcactgagcaatacaacgccaccgccttcagctccctggaccgcccccagctgccccaggtcctccagcagtcctatatcttcccgtcctccatcagtgccatggaggccaccatcaccgaacggggcatcaccagccgacacctgctgattggactaccttctggagcaattctttcccttcctaaggctttgctggatccccgccgccccgagatcccaacagaacaaagcagagaggagaacttaatcccgtattctccagatgtacagatacacgcagagcgattcatcaactataaccagacagtttctcgaatgcgaggtatctacacagctccctcgggtctggagtccacttgtttggttgtggcctatggtttggacatttaccaaactcgagtctacccatccaagcagtttgacgttctgaaggatgactatgactacgtgttaatcagcagcgtcctctttggcctggtttttgccaccatgatcactaagagactggcacaggtgaagctcctgaatcgggcctggcgataaagaacaaagactgtgcctaaaagtggagagccaggggagtgtgggtcagataagcagctacagctgcagtttggtggattggtggagtatgtgtgtgtgtcagtgctcagctaagaactgtagggaagatggatgaccttcacgcagaactccttttgggatatacatgatgcagaaaggatcctacatggagagagacagaactctctcagctgacactctcagagattcctgatgggctttctcttgaagtccaaaggcgtctgcattgtttcctttctttgcccatccatgaatgttctgttttgttttttttaataagaattccggctgatttttgtgaggcctgtttaaattgactttactttgccttttgtgtttctcaattttatctagaaatctttctgactttttccatctcttgcttcaaagtaagaggggaactctccttgccgactccaccttataggtacatttggtgttttgcactgggaagaaataggatccatccttagctgaggcttgaggactgatccagcctctcatggcttccctccaaagtaacttagggttgagggatctatatgtgatgtcaaaacttactttaaacctctagtttcgtgctgtcatttattaggctgggccaccaaatctttgtttcaatttatcagaagccaagtgcatactagcgtcttgtttgttgcccattgcctatacttttcacctgagatgtgtgagttggggccttttaaaaactactgaattgtctgagccttgaagacatttccagggagaagagataatctctcatttcacccacaggctggtctaatcataacctagttaaagatgtccttgtttaagaaccccattatttatttttagtttttaatataaattaacatgtgggtcattatatttctccttaaatgaggaaattttaaattttattgatctaacctttgaagctttaaaaaaggagaaagagggtaggggtgggaaactggcatactgtgtgtatagcactgccgattggctaggccactgtgtctctgctacaaattaaagaaatcctaaaagttttccttggtcatagagttggggaatgacagaatttttctttgttgtgaaatgtatgtacagagtagaccatct

SEQ ID NO: 130363 - DNA, 425 bp, Homo sapiens
  Payload ID: 5507
  Gene Symbol: EMC1
  Gene Name: ER membrane protein complex subunit 1
  ENST ID: ENST00000486238
  CDS Start-End: 1-260
acaacgccaccgccttcagctccctggaccgcccccagctgccccaggtcctccagcagtcctatatcttcccgtcctccatcagtgccatggaggccaccatcaccgaacggggcatcaccagccgacacctgctgattggactaccttctggagcaattctttcccttcctaaggctttgctggatccccgccgccccgagatcccaacagaacaaagcagatgtacagatacacgcagagcgattcatcaactataaccagacagtttctcgaatgcgaggtatctacacagctccctcgggtctggagtccacttgtttggttgtggcctatggtttggacatttaccaaactcgagtctacccatccaagcagtttgacgttctgaaggatgactatgactacgtgttaatcagcagcgt

SEQ ID NO: 130364 - DNA, 557 bp, Homo sapiens
  Payload ID: 5507
  Gene Symbol: EMC1
  Gene Name: ER membrane protein complex subunit 1
  ENST ID: ENST00000475079
  CDS Start-End: 17-244
tgcatgcgctcgcatcatggcggctgagtgggcttctcgtttctggctttgggctacgctgctgattcctgcggccgcggtctacgaagaccaagtgggcaagtttgattggagacagcaatatgttgggaaggtcaagtttgcctccttggaattttcccctggatccaagaagttggttgtagccacagagaagaatgtgattgcagcattaaattcccgaactggggagatctgtgagtgaactgagaactgtgtctactggctgcctcagggatgaaagacttaccattgccaactctgcctggctgattcctgaataaggaacatgttggccaaaagatgcctctcctagtggattctgatactttttttttttcagtcttaccatctttgaatattttgtggcgccatgttgacaagggcacggcagaaggggctgtggatgccatgctgctgcacggacaggatgtgatcactgtgtccaatggaggccgaatcatgcgttcctgggagactaacatcgggggcctgaactgggagataaccctggacag

SEQ ID NO: 130365 - DNA, 583 bp, Homo sapiens
  Payload ID: 5507
  Gene Symbol: EMC1
  Gene Name: ER membrane protein complex subunit 1
  ENST ID: ENST00000486405
  CDS Start-End: 1-537
tttattggcatcttcctcattgatggcgtcactgggcgtatcattcactcctctgtgcagaagaaagccaaaggccctgtccatatcgtgcattcagagaactgggtggtgtaccagtactggaacaccaaggctcggcgcaacgagtttaccgtactggagctctatgagggcactgagcaatacaacgccaccgccttcagctccctggaccgcccccagctgccccaggtcctccagcagtcctatatcttcccgtcctccatcagtgccatggaggccaccatcaccgaacggggcatcaccagccgacacctgctgagctttgctggatccccgccgccccgagatcccaacagaacaaagcagatgtacagatacacgcagagcgattcatcaactataaccagacagtttctcgaatgcgaggtatctacacagctccctcgggtctggagtccacttgtttggttgtggcctatggtttggacatttaccaaactcgagtctacccatccaagcagtttgacgttctgaaggatgactatgactacgtgttaatcagcagcgtcctctttggcct

SEQ ID NO: 130366 - DNA, 6664 bp, Homo sapiens
  Payload ID: 5507
  Gene Symbol: EMC1
  Gene Name: ER membrane protein complex subunit 1
  Uniprot ID: Q8N766
  ENST ID: ENST00000477853
  CDS Start-End: 44-3025
ggtgcatgccgggacggcggtgggtggtgcatgcgctcgcatcatggcggctgagtgggcttctcgtttctggctttgggctacgctgctgattcctgcggccgcggtctacgaagaccaagtgggcaagtttgattggagacagcaatatgttgggaaggtcaagtttgcctccttggaattttcccctggatccaagaagttggttgtagccacagagaagaatgtgattgcagcattaaattcccgaactggggagatcttgtggcgccatgttgacaagggcacggcagaaggggctgtggatgccatgctgctgcacggacaggatgtgatcactgtgtccaatggaggccgaatcatgcgttcctgggagactaacatcgggggcctgaactgggagataaccctggacagtggcagtttccaggcacttgggctggttggcctgcaggagtctgtaaggtacatcgcagtcctgaagaagactacacttgccctccatcacctctccagtgggcacctcaagtgggtggaacatctcccagaaagtgacagcatccactaccagatggtgtattcttacggctctggggtggtgtgggccctcggagttgttcccttcagccatgtgaacattgtcaagtttaatgtggaagatggagagattgttcagcaggttagggtttcaactccgtggctgcagcacctgtctggagcctgtggtgtggtggatgaggctgtcctggtgtgtcctgacccgagctcacgttccctccaaactttggctctggagacggaatgggagttgagacagatcccactgcagtctctcgacttagaatttggaagtggattccaaccccgggtcctgcctacccagcccaacccagtggacgcttcccgggcccagttcttcctgcacttgtccccaagccactatgctctgctgcagtaccattatggaacgctgagtttgcttaaaaacttcccacagactgccctagtgagctttgccaccactggggagaagacggtggctgcagtcatggcctgtcggaatgaagtgcagaaaagtagcagttctgaagatgggtcaatggggagcttttcggagaagtctagttcaaaggactctctggcttgcttcaatcagacctacaccattaacctatacctcgtggagacaggtcggcggctgctggacaccacgataacatttagcctggaacagagcggcactcggcctgagcggctgtatatccaggtgttcttgaagaaggatgactcagtgggctaccgggctttggtgcagacagaggatcatctgctacttttcctgcagcagttggcagggaaggtggtgctgtggagccgtgaggagtccctggcagaagtggtgtgcctagagatggtggacctccccctgactggggcacaggccgagctggaaggagaatttggcaaaaaggcagatggcttgctggggatgttcctgaaacgcctctcgtctcagcttatcctgctgcaagcatggacttcccacctctggaaaatgttttatgatgctcggaagccccggagtcagattaagaatgagatcaacattgacaccctggccagagatgaattcaacctccagaagatgatggtgatggtaacagcctcaggcaagctttttggcattgagagcagctctggcaccatcctgtggaaacagtatctacccaatgtcaagccagactcctcctttaaactgatggtccagagaactactgctcatttcccccatcccccacagtgcaccctgctggtgaaggacaaggagtcgggaatgagttctctgtatgtcttcaatcccatttttgggaagtggagtcaggtagctcccccagtgctgaagcgccccatcttgcagtccttgcttctcccagtcatggatcaagactacgccaaggtgttgctgttgatagatgatgaatacaaggtcacagcttttccagccactcggaatgtcttgcgacagctacatgagcttgccccttccatcttcttctatttggtggatgcagagcagggacggctgtgtggatatcggcttcgaaaggatctcaccactgagctgagttgggagctgaccattcccccagaagtacagcggatcgtcaaggtgaaggggaaacgcagcagtgagcacgttcattcccagggccgtgtgatgggggaccgcagtgtgctctacaagagcctgaaccccaacctgctggccgtggtgacagagagcacagacgcgcaccatgagcgcacctttattggcatcttcctcattgatggcgtcactgggcgtatcattcactcctctgtgcagaagaaagccaaaggccctgtccatatcgtgcattcagagaactgggtggtgtaccagtactggaacaccaaggctcggcgcaacgagtttaccgtactggagctctatgagggcactgagcaatacaacgccaccgccttcagctccctggaccgcccccagctgccccaggtcctccagcagtcctatatcttcccgtcctccatcagtgccatggaggccaccatcaccgaacggggcatcaccagccgacacctgctgattggactaccttctggagcaattctttcccttcctaaggctttgctggatccccgccgccccgagatcccaacagaacaaagcagagaggagaacttaatcccgtattctccagatgtacagatacacgcagagcgattcatcaactataaccagacagtttctcgaatgcgaggtatctacacagctccctcgggtctggagtccacttgtttggttgtggcctatggtttggacatttaccaaactcgagtctacccatccaagcagtttgacgttctgaaggatgactatgactacgtgttaatcagcagcgtcctctttggcctggtttttgccaccatgatcactaagagactggcacaggtgaagctcctgaatcgggcctggcgataaagaacaaagactgtgcctaaaagtggagagccaggggagtgtgggtcagataagcagctacagctgcagtttggtggattggtggagtatgtgtgtgtgtcagtgctcagctaagaactgtagggaagatggatgaccttcacgcagaactccttttgggatatacatgatgcagaaaggatcctacatggagagagacagaactctctcagctgacactctcagagattcctgatgggctttctcttgaagtccaaaggcgtctgcattgtttcctttctttgcccatccatgaatgttctgttttgttttttttaataagaattccggctgatttttgtgaggcctgtttaaattgactttactttgccttttgtgtttctcaattttatctagaaatctttctgactttttccatctcttgcttcaaagtaagaggggaactctccttgccgactccaccttataggtacatttggtgttttgcactgggaagaaataggatccatccttagctgaggcttgaggactgatccagcctctcatggcttccctccaaagtaacttagggttgagggatctatatgtgatgtcaaaacttactttaaacctctagtttcgtgctgtcatttattaggctgggccaccaaatctttgtttcaatttatcagaagccaagtgcatactagcgtcttgtttgttgcccattgcctatacttttcacctgagatgtgtgagttggggccttttaaaaactactgaattgtctgagccttgaagacatttccagggagaagagataatctctcatttcacccacaggctggtctaatcataacctagttaaagatgtccttgtttaagaaccccattatttatttttagtttttaatataaattaacatgtgggtcattatatttctccttaaatgaggaaattttaaattttattgatctaacctttgaagctttaaaaaaggagaaagagggtaggggtgggaaactggcatactgtgtgtatagcactgccgattggctaggccactgtgtctctgctacaaattaaagaaatcctaaaagttttccttggtcatagagttggggaatgacagaatttttctttgttgtgaaatgtatgtacagagtagaccatctctagccctgtggtgaaagaggtacactcgaatgtttgcataaagcaagtgacaaatgacactgtttaagtcctcttttgtgtcttagaagatcattttgaggctattttcacattagaggggataaaagcagtgaagacatggagtaagtgtattttattttagtaaggaaaggtcagtttaatcatatatgggttggttaggttatctaaaaatttgtcatctttctatggtcatatgctgatggtagattatggcagagaaggaagaggaaatgacaaccattttattaattgtcagtttgatattgagtgactgaatgtctaagaatctccagaaaaaaacaggcatctatcatcctgacccaaggcatattttaacataacctgggagaagagagttaagtacaagttaaaaaaaattctgccctagttttgagaaagcctggctggaattctgactgtcttacatacatatgtgcaaggttagcctgcaagattctagtttttatttaccagtgtgccagaatctgaaacaagctactgggagggaaggtatttgtcctttagtaaaattccctgtatttcagctgtaatcaaagttacctcaaagcaggtgctttttttttttttgagacagaatctcactctgttgcccaggctggagtgcagtggcacgatcttggctcacggcaacctccacctcacaagcagctgggactataggcatgtgccaccacgctcagctaattttttgtatttttagtagagacggggtttcattgtgttggccaggctggtctcgaactcctggcctcaagtgatctgctggccttggcctcccaaagtgctgggattacaggtgtgagccaccgagcttggccaagtgcttaaaatagttaatgctaatgccacagtccaatttaaatcttttcttagttctcaactttccttaatcttaaagcagcattcggttctgagcagctacactcagtctccactaatggctgctgagactatgtttcctctctcaattctctgatctatttgctttcttgtcattccttgttttttgtgtgtattccttgacttacctcttctcctgtcttcattaattaggttaattttggggccccatggtgtttcacgtaaaaagatttggctgggcgtgatggctcatgcctataatcccagcactttgggaggccatagtggaggatctcttgagcccaggagttccagaccagcctgggcaacatagcaagactctatctacaaaaaataaaaaaaaattagccgggcctggtggcatgtgcctgtggtcctagctactcaggaggctgaggtaggaggatcacttgagcctgggaggtcgaggctgcagtgagccatgaacatgctactgcattccagcctgggcaacagagtgagaccctggctcaaaaacaaaaacaaaaactagtttgttttagtattcattaattacgtatatgagcactggtagtctagtgtttgttcttgtatacagtgttttcttaaatgagatgatgctatttaattctgttacttgttttttcaactaatggatcttttaaagttttttatttaaattttttgtgggtacatattaggtacatatacttatggggtacatgagatgtttttataaaggctcagctaatgtatcttgaatatcatgtattcataaagatgactgaaatagtttctggaacaaagtctgatagaaaaaatactcaattcctaatttaagtgttagagactttaatgtaagctatctaatctgaactagtttcattatttgtgtgtgggtacatgttatgtgctccgtaaggcatctttcaatttgaaaatttcataattgtaatttcactgcctttataaattgctttttttttggaggcagggtctctgtcacccaggctggagagcagtggcacagtcatagctcactgcagcctcgaacacctgggctgaagtgatcctccctccttagcctcccaaagtgccgggattacaggcatgagctactgcacctggcccataaattgtcatacttttaaagagcctattacacaaagtatcatcagaatcatcccaagactcatttcctgattcctaattatttaaaattttgcttttaggcgaggcatggtggctcaagcctataatcccagcactttgggaggccaaggcaggcagatcatttgaggtcaggagtttaagaccagcctggccaacatggtgaaacctgaaaccccatctctaccaaaaaaataaaaaaatttagccaggtgtggtggtgcatgcctgtaatcccagctacttgggaggctgaggcaggagaatcgaacccaggaggcaaaggctgcagtaagccgagatcatgcctctgcactccagtctgggcaacacagtgagaccctgtctcaaaaataaataaaatgaaaaaattgcttttaaatcat

SEQ ID NO: 130367 - DNA, 9446 bp, Homo sapiens
  Payload ID: 5508
  Gene Symbol: EMC10
  Gene Name: ER membrane protein complex subunit 10
  Uniprot ID: Q5UCC4
  ENST ID: ENST00000334976
  CDS Start-End: 47-835
ggctcttggctcacagccgtcccttcgctggtgggaagaagccgagatggcggcagccagcgctggggcaacccggctgctcctgctcttgctgatggcggtagcagcgcccagtcgagcccggggcagcggctgccgggccgggactggtgcgcgaggggctggggcggaaggtcgagagggcgaggcctgtggcacggtggggctgctgctggagcactcatttgagatcgatgacagtgccaacttccggaagcggggctcactgctctggaaccagcaggatggtaccttgtccctgtcacagcggcagctcagcgaggaggagcggggccgactccgggatgtggcagccctgaatggcctgtaccgggtccggatcccaaggcgacccggggccctggatggcctggaagctggtggctatgtctcctcctttgtccctgcgtgctccctggtggagtcgcacctgtcggaccagctgaccctgcacgtggatgtggccggcaacgtggtgggcgtgtcggtggtgacgcaccccgggggctgccggggccatgaggtggaggacgtggacctggagctgttcaacacctcggtgcagctgcagccgcccaccacagccccaggccctgagacggcggccttcattgagcgcctggagatggaacaggcccagaaggccaagaacccccaggagcagaagtccttcttcgccaaatactggatgtacatcattcccgtcgtcctgttcctcatgatgtcaggagcgccagacaccgggggccagggtgggggtgggggtgggggtggtggtgggggtagtggccggtgagggcccaggctggtcagcgtcccgtcttgcacacccaggggcctccctttctgctggagtcccctgtgtcctcagccatcccaagaagggtttgctggtccctcctttccccccgtcccacgaggccacctgggccagccccttgtcctctgccttctgctggcagaggagcagctggactggggcctttggcacagcagccggtgtctcctgcgcccgcctcccccatggccccatgcagccccaggggcttcccccctgcccatggagtagagcccgagatcctggccactatgccagttctgacctcgcatccccctaccccgagcccatgcagtctgggaacatgccgccttctctccagcctctgtgcctttgttccaggtggtctcaccctcctgtccctggctgggctaggtggtcctgtccaggctcctgcagcgcccccctcactttgacactggactaggatgcagcctcccttctgtgtccccttgagggtaccctgggtcccctcatcaggggcagaggcatgaaagagtcggggctggatggccgggggcttctgggcccgacgcctagtgcagcccctggggtcgtggtttgacatttgtctgcctggtgcaaacaaggaatccttgcctttaaggtgacaggccctccacaggcttccagacttgaaggaaaaggtttaagaaagaaaacaaaaccaacagttagtggagtcaaagcccagacactgtaaatagaaccccctccaccaccccccgccgcccagcatcctacctggactgcggtgctacgagggcctgcgggcctttgctgtgtgccaccctccctgtaagtctatttaaaaacatcgacgatacattgaaatgtgtgaacgttttgaaaagctacagcttccagcagccaaaagcaactgttgttttggcaagacggtcctgatgtacaagcttgattgaaattcactgctcacttgatacgttattcagaaacccaaggaatggctgtccccatcctcatgtggctgtgtggagctcagctgtgttgtgtggcagtttattaaactgtcccccagatcgacacgcagctagcctcctgcattgtatggttataaatagcaccctagtgagtgctgtcgtccagtctctcttgggtgtggtttgaatgatctcgggatgcatgactaaaatggaattacgatggcagatcggaaacgcgtttataaacaagtgatggtttgtgagtcgactgtcaagaccaggaggtggtgcaccgtgggaggttgccttccctcccatcacttctttttgtttttgagtcagggtcttgctctgttacccaagctggagtgcagtggcggtaccttgactcactgcgacctccacctctcaggctcagcgattctcccacctcagcctcctgagtagctggaattgtaggcgtgcaccaccacgcgcagctagtttttgtattttttgtagagacggggtttcaccatattgcccaggctggtcgtgaactgctggactcgagtgatccacctgcctcggcttcccaaagtgctgggattacaggcgtgagccaccgcgcctggcctatttttggtaactttaataaagaagatagtcttagcattgctaacttctgtttctttctccacctgcaggagatagcttatgctttttctgtcttcattccatgtgaatcctgcttcattcttttcctagaggattccagaaatatttactaatgctttttttttttttttttttttttttttgaggcagagtctcgctctgtcatccaggctggagtacaatggcacgatctcagctcactgcaacctccgcttcctgagtttaagcgattctcctgcatcagcctcccaaatagcggggattgcaggcgcccgccaacacacctggctaatttttgtattgttagtagagacagggtttcaccatgttggccaggctagtcttgaactcctgacctcaggtgatctacctgcctcagcttcccaaagtgctgggattacaggcatgagccactgcgccaggcctactgatgctttttgggaagtgttcccaacttggagtcctggtccctgtgtctgatctgcagatgtcttctaccccggcactgggggaacatcttatttttcctgggttaaacattgggatctttataaacctgattatgtcctttccctctaagtctcggttgctttcaggctggcagggttactctgttgggtattccaggaaatgcctgagctccttcaggctcccctagcgttctgttcttattaaacttttcttccccgtctggccggtccttggggaacccactcactattttattttattgaccgggttatccagggatgaagtatgaaactcaaaagatagagtaggttggccaggcatagtgattcatgcttgtagtcccagctgtttgggaggctgagacaggaggatcgcttgagccccagagttcgatgcttcctgagctgtgattgaatcactttactccagcctgggtgacagagtgagaccctgtctccagaatagacaaaagatgcagtggaatccacgtccagaaactgtatgctcactctgggctccagcacccacttcccctccctggaggcagcctgagttttctgtcccctggtatgctgcagatactctccacagaaacaagcagatgcacatgtcaacagttttgcaagtgttgctcttttcccccaccttcttttgacatagctggggcagtttccatctctggtataaggtgccatcttattccatctctggtgtaagagtgtgttgctggatttgagtagttctaagcagcactgcaggagtccccctgttctgctgcatcattttgcacacatatgtgtctgtggaagacatggcccggtggggccccaccttgctgggggagagggatgtgtgtgtgatggtggtgcatgcttcccccttgctactccaggtgtctgccccatcccttcaccctggaggttccagacagcccctcttcaccagcgattccccaactcatctccagctcagatcccacccctgatctccagactcatggccccagctgcctcctgggctccttccccaggatgtgcctcaggggccactaaaggagccagtgcctcccacctgcccggatcgggtgctcctccagggatctttgttccagtgagtggtgccatcacctgcccaacctcatggaccagagcactgccctgtcccaatcacgttctcctatgcaccaccatacctacccctaaagttcttcctggcctcatcccgtcacctctgtctccatggccttggtcccagctcaagcctcgtcctctgccacctggaccatcggcccagcctcctctttggcctcccagcccccaacatccccccctcagtccatccccctaatggagagcttcctgacactagagctgacctcactactcccctgctcacagccctccgcgtggcctctcacctcccccaggatagagtcccaacccatccttctgtgtctcctcctctctgtgtccactgtcctgaccctaactcaatcctcattctctgcctcctggaccctcatcctagcctcgtgacttctggtctaagatgtgagagcacctggcaaggtaaatgctccaggaggggttgctccctcccatttcctgccaccagaaaatgttatcggctgcgtggcattgcgaaagccttcctcttcccagcctagggtttcatgtgggcatttaggtgctcccagtacatagttgcatggcaaacaatcctaaaatatacaagactacatttagtattttgtaaaattctttactaaccccaaattgtctactggaaactataggctcctttttttttggtgggtggggggcaggtgtgtttgtgggatggagtttcacttgtcacccaggctggagtgcagtggctcaattttggctcaatgcaacctccacctcccaggttcaagcaattctcttgcctcagcctcctgagtagctgggattacaaccgtgtgccaccacacccagccaatttttgtatttttagtagagaccgggtttcaccatgttggccaggctggtcttgaactcctgacctcaagcgatccaccttagtctcctaaagtgctgggattacatgtgtgagccaccgcccctggcctctgtaggcttctttaacccatcagagagactccctggtaaggattaggggctaattactggtgcctcttcagctgtcagtccatcctcctttatttgtacccaccttccagtcagcaaggcacaacaatgttgttacaaaggaaacaaactcaatttggcccatttcctggaaatgcaatctcccaaacaggtttgtgtgaaccaaattccattttcctttgtttcccatgtgcagtcccagttgcatttccatgggagccaatccacccacccatagaatgacttgaaaatgtgtgaagttcagaagtttcataccaagaagtttgctgagcatgatgtttgtatattgattaggagtaaaaatgttcatttttacaaaatattacaacttctccctctcccctccttccacccagtatcccctgttcctcccccaggcattctggtcactgttcctttttgttgagatcattctcggtgtctcatatagctgggttgcagctccgttctttgccaggaggtggtaatagaggattccacgcactcagaatgcctcaggccggcgcctgtggcttctctcaatggagggaagtgtcctgcagggggcgctgttggtccttcaggcaaggtcgggttccctcgaagtctctgtcttagcagttgctggtcttcagaaacattgggcaccaattttctcatttctgaaatggaattcaggtgaggtcccctcagtgctgaggtgcttcatgttgtcagaggaagagttgggaagggagcggaatggagcagaaaggcgtcatccgctgctcactgagctcagataggaggccagggatcggcagattcaggagcccactcctggccaaccccaggggccccacccagtcctgtccctgctccttacgtgctgtgtatctttaggcaagttgcttcctgtctctgagcgtcgtctttgtttccgccttcctgggcctacggcaggcctgattcctccaggcagtgtccagagttccggacagatggaaaaggaagagagaatgggtgtcacaaaggtctgtccactcctgggcctcaggcttgggggccctgctcagggctagcctgtttgggcctcggtatggactcctgcctcctggtcaggacctggaaacctgggagcaggcaaggcaggaacaggagagggaggcaaaggcccaccaggcagggatgcaggggccacctggagacggaggagacggggctcccgggagggaggccagtgggagtgagagcttgaaggagagagagccaggagaggagacaggtccagagaggagggaaaggaaaggacagggcagagacagagaaaccagagagagggaaggaagagagacccaagggggagagacagggaaggaagagggaggtgagaagaggaagaggcagattcagaggagagaggagagaaaagaggtggaaatcaaacaggagaaagagggaggagaggagggaggagagagtgtaggaaaaaagcaggaggaaagagccgggcacggtggctcacgcctgtaatcccagcactttgggaggccaaggcaggcagatcacgaggtgaggagatcgagaccgtcctggctaacacggtgaaaccctgtctctactaaaaatacaaaaaaaaaattagcagggcatggtggcaggcgcctgtagtcccagctactcgggaggctgaggcaggagaatggcgtgaaccctggaggcggagcttgcagtgagccgagattgcgccactgcactccagcctgggcgacagagcgagactccgtctcaaaaaaaaaaaaaaaaaaaaaaagaaaagatggccagagcaggaggggagagaggaagagggagaaagaaggaaacagtgtagggggtcagaagtggaaagagaagaaaaaacagaagaggaaagaaagacgagggggtgaaaaaagggacaggaaggaagagagggagagggtgggtgccatggctggtgagctcggagaagagggaagcagagaaacgggtgaaggagggagcgtcctagggagaagtgggtgggggagagggtgttgggggagaagagggtgggggagagggggccccgggagagggagggatggaggagcggggagctccagccagagaagaggaaagagaaaggagagagctaggaactgggaaggaaaagagctaggaggagaccatgagacagaaagagaagagggtgaagagagaggatagtggctgggaggagagaggaggagggaggagcacagagggagaggagaggaaacagccagagaatctgctagaagggagagaggagagagaagagccggacagggagagcagaagtgagaaaaaggagggtggccacagagaggacagcgagaaaaagagaacaggaagaggggaaaagagaagaaatgggagagggaagaagggtgggagagaaaacggaacagagagggggcacagacagcggactggaccgagagggagatggagcggtgcggagggggagagagaaagagggagggaaggagggtaggagagggctggagataggggaaaagagaaaaggagggtaggagagggctggagagagaagggaagttaagaagggaaggagagagacagacattagggaagaaggaaaggagaaaggaaaaaatacaaaaaagggcagagagaaaagaacaggccgggcatggtgcctcgcacctgtggtcccagcactttgagaggctaaggcaggaggatcactggagcctgggaggtggaggctgcactactgcactccagcgggtgagtgagcgagaaaaaaagcagaaaggaaagaagaggtgcatgagtgtggaagagcaatatggagagaaagaagggagagaggattggaagtagcgacagaggaccatgcccctccagctgaggagggggcgcccctaagacagcgtcagcccagagaccggggcaggaagcaggaacgtgaagcaggttaggagccagtgtgaggcacggagagggccgggtagctgggcggcgggggtgtcgtgggcacagcccaggctactgcggggacaggctgccagacccggcgggtccaggttgggaactcggccatgcagcagaaacgttccctgcctcaacagggcgcagccaccccggggccatctctgtgacccagggagagaaaggacaacgaatgggactagacgaggatggggaggaacagagcagctgtggaaggtgcggcagagaagggcccaggagaaaggaggaagggaaggagctggaggggcgggagaacaggagacagaacaggacagagacagctgcccgggaggatgggagaacagaaagagggaggaaacgccgagcactgacctgggggaggggagtaaagagaagtgaagggggattggaagggaactggagaatgagagaagcaacaggcggggtgcgtgtaggagggcgggagagccaatgacaagacagaaaaggcagagaaagcaaagcaagaccagactcctcatccggtaacactgtgtcaggtcattgccctcccaccccgcccccaaccccataactgaaaacaagtaggaacctggataaaatagtcttaacaattttttttttgagacggagtcttgctgtgttgcccaagctagagtgcagtggcgcgatctcggctcactgcaaactccgcctcccgggtttaagcgattctcctgcctcagcctcccaagtagctgggattacaggggcccgccatcgtgcctgctaatttttgtattttttagtagagacggggtttcaccattttggctaggctggtctcgaattcctgacctcatgatccgcccaccttggcctcccaaagtgctgggattacaggcgttgagccaccgtggccggcccttaaaagcatcaaactacatacaagaccgtaaggaagctgtgggtcaacgcggagggacgtgggaacccatcccggtgaagcggcagcgtcacgtcctttctcccagggatctgttggtcggagacatctggactttcatgtggacagcctgagtgacagggggacccaggggcctcacctgggctacctggggtgggtggaccctccactgtgccaaggtgcagcctgggctcggaggaacatgccctccgcctagtccctgacatccttttcacatccaacacgcagagcaggggcgtgagggagcaggcaagcagggaagggaaagacaatgagcaagagccagcgggacggtggggcggatggcagaggcttcgctgctggaaaatcagacgcagagtacgaaacgcctgtgctcactatgttaataataataataaaaggcaaaaaaccag

SEQ ID NO: 130368 - DNA, 2014 bp, Homo sapiens
  Payload ID: 5508
  Gene Symbol: EMC10
  Gene Name: ER membrane protein complex subunit 10
  Uniprot ID: Q5UCC4
  ENST ID: ENST00000376918
  CDS Start-End: 47-811
ggctcttggctcacagccgtcccttcgctggtgggaagaagccgagatggcggcagccagcgctggggcaacccggctgctcctgctcttgctgatggcggtagcagcgcccagtcgagcccggggcagcggctgccgggccgggactggtgcgcgaggggctggggcggaaggtcgagagggcgaggcctgtggcacggtggggctgctgctggagcactcatttgagatcgatgacagtgccaacttccggaagcggggctcactgctctggaaccagcaggatggtaccttgtccctgtcacagcggcagctcagcgaggaggagcggggccgactccgggatgtggcagccctgaatggcctgtaccgggtccggatcccaaggcgacccggggccctggatggcctggaagctggtggctatgtctcctcctttgtccctgcgtgctccctggtggagtcgcacctgtcggaccagctgaccctgcacgtggatgtggccggcaacgtggtgggcgtgtcggtggtgacgcaccccgggggctgccggggccatgaggtggaggacgtggacctggagctgttcaacacctcggtgcagctgcagccgcccaccacagccccaggccctgagacggcggccttcattgagcgcctggagatggaacaggcccagaaggccaagaacccccaggagcagaagtccttcttcgccaaatactggcacatcatcctggggggggccgtgttgctcacagccctgcgtcctgctgcgccagggcccgcgccaccgccacaggaggcctgatggatgtacatcattcccgtcgtcctgttcctcatgatgtcaggagcgccagacaccgggggccagggtgggggtgggggtgggggtggtggtgggggtagtggccggtgagggcccaggctggtcagcgtcccgtcttgcacacccaggggcctccctttctgctggagtcccctgtgtcctcagccatcccaagaagggtttgctggtccctcctttccccccgtcccacgaggccacctgggccagccccttgtcctctgccttctgctggcagaggagcagctggactggggcctttggcacagcagccggtgtctcctgcgcccgcctcccccatggccccatgcagccccaggggcttcccccctgcccatggagtagagcccgagatcctggccactatgccagttctgacctcgcatccccctaccccgagcccatgcagtctgggaacatgccgccttctctccagcctctgtgcctttgttccaggtggtctcaccctcctgtccctggctgggctaggtggtcctgtccaggctcctgcagcgcccccctcactttgacactggactaggatgcagcctcccttctgtgtccccttgagggtaccctgggtcccctcatcaggggcagaggcatgaaagagtcggggctggatggccgggggcttctgggcccgacgcctagtgcagcccctggggtcgtggtttgacatttgtctgcctggtgcaaacaaggaatccttgcctttaaggtgacaggccctccacaggcttccagacttgaaggaaaaggtttaagaaagaaaacaaaaccaacagttagtggagtcaaagcccagacactgtaaatagaaccccctccaccaccccccgccgcccagcatcctacctggactgcggtgctacgagggcctgcgggcctttgctgtgtgccaccctccctgtaagtctatttaaaaacatcgacgatacattgaaatgtgtgaacgttttgaaaagctacagcttccagcagccaaaagcaactgttgttttggcaagacggtcctgatgtacaagcttgattgaaattcactgctcacttgatacgttattcagaaacccaaggaatggctgtccccatcctcatgtggctgtgtggagctcagctgtgttgtgtggcagtttattaaactgtcccccagatcgacacgca

SEQ ID NO: 130369 - DNA, 2178 bp, Homo sapiens
  Payload ID: 5508
  Gene Symbol: EMC10
  Gene Name: ER membrane protein complex subunit 10
  ENST ID: ENST00000601780
  CDS Start-End: 146-274
caggccccaggtgcggacgggtgccagtgcgcaggtgccggggcccagcgcaggcgcacgggcgtcaggatgcggcctgttcctcccggcgtgctccgcggctcttggctcacagccgtcccttcgctggtgggaagaagccgagatggcggcagccagcgctggggcaacccggctgctcctgctcttgctgatggcggtagcagcgcccagtcgagcccggggcagcggctgccgggccgggactggtgcgcgaggggtgagtgctctttagctgtgcatagcgggcgcggtctacggatgtcgcaggtcttgggtctttaggctggggcggaaggtcgagagggcgaggcctgtggcacggtggggctgctgctggagcactcatttgagatcgatgacagtgccaacttccggaagcggggctcactgctctggaaccagcaggatggtaccttgtccctgtcacagcggcagctcagcgaggaggagcggggccgactccgggatgtggcagccctgaatggcctgtaccgggtccggatcccaaggcgacccggggccctggatggcctggaagctggtggctatgtctcctcctttgtccctgcgtgctccctggtggagtcgcacctgtcggaccagctgaccctgcacgtggatgtggccggcaacgtggtgggcgtgtcggtggtgacgcaccccgggggctgccggggccatgaggtggaggacgtggacctggagctgttcaacacctcggtgcagctgcagccgcccaccacagccccaggccctgagacggcggccttcattgagcgcctggagatggaacaggcccagaaggccaagaacccccaggagcagaagtccttcttcgccaaatactggcacatcatcctggggggggccgtgttgctcacagccctgcgtcctgctgcgccagggcccgcgccaccgccacaggaggcctgatggatgtacatcattcccgtcgtcctgttcctcatgatgtcaggagcgccagacaccgggggccagggtgggggtgggggtgggggtggtggtgggggtagtggccggtgagggcccaggctggtcagcgtcccgtcttgcacacccaggggcctccctttctgctggagtcccctgtgtcctcagccatcccaagaagggtttgctggtccctcctttccccccgtcccacgaggccacctgggccagccccttgtcctctgccttctgctggcagaggagcagctggactggggcctttggcacagcagccggtgtctcctgcgcccgcctcccccatggccccatgcagccccaggggcttcccccctgcccatggagtagagcccgagatcctggccactatgccagttctgacctcgcatccccctaccccgagcccatgcagtctgggaacatgccgccttctctccagcctctgtgcctttgttccaggtggtctcaccctcctgtccctggctgggctaggtggtcctgtccaggctcctgcagcgcccccctcactttgacactggactaggatgcagcctcccttctgtgtccccttgagggtaccctgggtcccctcatcaggggcagaggcatgaaagagtcggggctggatggccgggggcttctgggcccgacgcctagtgcagcccctggggtcgtggtttgacatttgtctgcctggtgcaaacaaggaatccttgcctttaaggtgacaggccctccacaggcttccagacttgaaggaaaaggtttaagaaagaaaacaaaaccaacagttagtggagtcaaagcccagacactgtaaatagaaccccctccaccaccccccgccgcccagcatcctacctggactgcggtgctacgagggcctgcgggcctttgctgtgtgccaccctccctgtaagtctatttaaaaacatcgacgatacattgaaatgtgtgaacgttttgaaaagctacagcttccagcagccaaaagcaactgttgttttggcaagacggtcctgatgtacaagcttgattgaaattcactgctcacttgatacgttattcagaaacccaaggaatggctgtccccatcctcatgtggctgtgtggagctcagctgtgttgtgtggcagtttattaaactgtcccccagatcgacacgca

SEQ ID NO: 130370 - DNA, 180 bp, Homo sapiens
  Payload ID: 5508
  Gene Symbol: EMC10
  Gene Name: ER membrane protein complex subunit 10
  ENST ID: ENST00000597426
  CDS Start-End: 50-180
cgcggctcttggctcacagccgtcccttcgctggtgggaagaagccgagatggcggcagccagcgctggggcaacccggctgctcctgctcttgctgatggcgcactcatttgagatcgatgacagtgccaacttccggaagcggggctcactgctctggaaccagcaggatggtacctt

SEQ ID NO: 130371 - DNA, 462 bp, Homo sapiens
  Payload ID: 5508
  Gene Symbol: EMC10
  Gene Name: ER membrane protein complex subunit 10
  ENST ID: ENST00000597799
  CDS Start-End: 197-462
gtccgggcggttgaaatgaaagaggcaaggtgaagccgggcgcggtggctcatctgtcatcccaacgcttagggaggccgaggcgggaggattgctctaggccaggagttcaagaccagcctgggcaacatagcgagccctgtctctacaaaaaatactaaaaaaaaaaaaaaaattaggccggtcgcggtggctcatgcttgtaatcccagcacttcgggaagccgaggcgggcggaccacttgaagtcaggagttcaagaccagcctgctcaaaatggctggggcggaaggtcgagagggcgaggcctgtggcacggtggggctgctgctggagcactcatttgagatcgatgacagtgccaacttccggaagcggggctcactgctctggaaccagcaggatggtaccttgtccctgtcacagcggcagctcagcgaggaggagcggggccgactccgg

SEQ ID NO: 130372 - DNA, 1610 bp, Homo sapiens
  Payload ID: 5508
  Gene Symbol: EMC10
  Gene Name: ER membrane protein complex subunit 10
  ENST ID: ENST00000598585
  CDS Start-End: 25-1140
cttcgctggtgggaagaagccgagatggcggcagccagcgctggggcaacccggctgctcctgctcttgctgatggcggtagcagcgcccagtcgagcccggggcagcggctgccgggccgggactggtgcgcgaggggctggggcggaaggtcgagagggcgaggcctgtggcacggtggggctgctgctggagcactcatttgagatcgatgacagtgccaacttccggaagcggggctcactgctctggaaccagcaggatggtaccttgtccctgtcacagcggcagctcagcgaggaggagcggggccgactccgggatgtggcagccctgaatggcctgtaccgggtccggatcccaaggcgacccggggccctggatggcctggaagctggtggctatgtctcctcctttgtccctgcgtgctccctggtggagtcgcacctgtcggaccagctgaccctgcacgtggatgtggccggcaacgtggtgggcgtgtcggtggtgacgcaccccgggggctgccggggccatgaggtggaggacgtggacctggagctgttcaacacctcggtgcagctgcagccgcccaccacagccccaggccctgagacggcggccttcattgagcgcctggagatggaacaggcccagaaggccaagaacccccaggagcagaagtccttcttcgccaaatactggatgtacatcattcccgtcgtcctgttcctcatgatgtcaggagcgccagacaccgggggccagggtgggggtgggggtgggggtggtggtgggggtagtggccgccccttgtcctctgccttctgctggcagaggagcagctggactggggcctttggcacagcagccggtgtctcctgcgcccgcctcccccatggccccatgcagccccaggggcttcccccctgcccatggagtagagcccgagatcctggccactatgccagttctgacctcgcatccccctaccccgagcccatgcagtctgggaacatgccgccttctctccagcctctgtgcctttgttccaggtggtctcaccctcctgtccctggctgggctaggtggtcctgtccaggctcctgcagcgcccccctcactttgacactggactaggatgcagcctcccttctgtgtccccttgagggtaccctgggtcccctcatcaggggcagaggcatgaaagagtcggggctggatggccgggggcttctgggcccgacgcctagtgcagcccctggggtcgtggtttgacatttgtctgcctggtgcaaacaaggaatccttgcctttaaggtgacaggccctccacaggcttccagacttgaaggaaaaggtttaagaaagaaaacaaaaccaacagttagtggagtcaaagcccagacactgtaaatagaaccccctccaccaccccccgccgcccagcatcctacctggactgcggtgctacgagggcctgcgggcctttgctgtgtgccaccctccctgtaagtctatttaaaaacatcgacgatacattgaaatgtgtgaacgttttgaaaagctacagcttccagcagccaaaagcaactgttgttttggcaaga

SEQ ID NO: 130373 - DNA, 1926 bp, Homo sapiens
  Payload ID: 5508
  Gene Symbol: EMC10
  Gene Name: ER membrane protein complex subunit 10
  ENST ID: ENST00000599293
  CDS Start-End: 12-140
aagaagccgagatggcggcagccagcgctggggcaacccggctgctcctgctcttgctgatggcggtagcagcgcccagtcgagcccggggcagcggctgccgggccgggactggtgcgcgaggggtgagtgctctttagctgtgcatagcgggcgcggtctacggatgtcgcaggtcttgggtctttaggctggggcggaaggtcgagagggcgaggcctgtggcacggtggggctgctgctggagcactcatttgagatcgatgacagtgccaacttccggaagcggggctcactgctctggaaccagcaggatggtaccttgtccctgtcacagcggcagctcagcgaggaggagcggggccgactccgggatgtggcagccctgaatggcctgtaccgggtccggatcccaaggcgacccggggccctggatggcctggaagctggtggctatgtctcctcctttgtccctgcgtgctccctggtggagtcgcacctgtcggaccagctgaccctgcacgtggatgtggccggcaacgtggtgggcgtgtcggtggtgacgcaccccgggggctgccggggccatgaggtggaggacgtggacctggagctgttcaacacctcggtgcagctgcagccgcccaccacagccccaggccctgagacggcggccttcattgagcgcctggagatggaacaggcccagaaggccaagaacccccaggagcagaagtccttcttcgccaaatactggatgtacatcattcccgtcgtcctgttcctcatgatgtcaggagcgccagacaccgggggccagggtgggggtgggggtgggggtggtggtgggggtagtggccggtgagggcccaggctggtcagcgtcccgtcttgcacacccaggggcctccctttctgctggagtcccctgtgtcctcagccatcccaagaagggtttgctggtccctcctttccccccgtcccacgaggccacctgggccagccccttgtcctctgccttctgctggcagaggagcagctggactggggcctttggcacagcagccggtgtctcctgcgcccgcctcccccatggccccatgcagccccaggggcttcccccctgcccatggagtagagcccgagatcctggccactatgccagttctgacctcgcatccccctaccccgagcccatgcagtctgggaacatgccgccttctctccagcctctgtgcctttgttccaggtggtctcaccctcctgtccctggctgggctaggtggtcctgtccaggctcctgcagcgcccccctcactttgacactggactaggatgcagcctcccttctgtgtccccttgagggtaccctgggtcccctcatcaggggcagaggcatgaaagagtcggggctggatggccgggggcttctgggcccgacgcctagtgcagcccctggggtcgtggtttgacatttgtctgcctggtgcaaacaaggaatccttgcctttaaggtgacaggccctccacaggcttccagacttgaaggaaaaggtttaagaaagaaaacaaaaccaacagttagtggagtcaaagcccagacactgtaaatagaaccccctccaccaccccccgccgcccagcatcctacctggactgcggtgctacgagggcctgcgggcctttgctgtgtgccaccctccctgtaagtctatttaaaaacatcgacgatacattgaaatgtgtgaacgttttgaaaagctacagcttccagcagccaaaagcaactgttgttttggcaagacggtcctgatgtacaagcttgattgaaattcactgctcacttgatacgttattcagaaacccaaggaatggctgtccccatcctcatgtggctgtgtggagctcagctgtgttgtgtggcag

SEQ ID NO: 130374 - DNA, 1243 bp, Homo sapiens
  Payload ID: 5509
  Gene Symbol: EMC2
  Gene Name: ER membrane protein complex subunit 2
  Uniprot ID: Q15006
  ENST ID: ENST00000220853
  CDS Start-End: 36-929
gccctctcaccccgctgcctctaggttctgggaagatggcgaaggtctcagagctttacgatgtcacttgggaagaaatgagagataaaatgagaaaatggagagaagaaaactcaagaaatagtgagcaaattgtggaagttggagaagaattaattaatgaatatgcttctaagctgggagatgatatttggatcatatatgaacaggtgatgattgcagcactagactatggtcgggatgacttggcattgttttgtcttcaagagctgagaagacagttccctggcagtcacagagtcaagcgattaacaggcatgagatttgaagccatggaaagatatgatgatgctatacagctatatgataggattttacaagaagatccaactaacactgctgcaagaaagcgtaagattgccattcgaaaagcccaggggaaaaatgtggaggccattcgggagctgaatgagtatctggaacaatttgttggagaccaagaagcctggcatgaacttgcagaactttacatcaatgaacatgactatgcaaaagcagccttttgtttagaggaactaatgatgactaatccacacaaccacttatactgtcagcagtatgctgaagttaagtatacccaaggtggacttgaaaacctcgaactttcaagaaagtattttgcacaggcattgaaactgaacaacagaaatatgagagctttgtttggactttatatgtcggcaagtcatattgcttctaatccaaaagcaagtgcaaaaacgaaaaaggacaacatgaaatatgctagttgggcagctagtcaaataaacagagcttatcagtttgcaggtcgaagtaagaaggaaaccaaatattctcttaaggctgtcgaagacatgttggaaacattgcagatcacccagtcttaaggtttcaaaaactctttgacattagatttcacaactgcacaattgaacttattggcctgtaacttatttactaaatgctcagtgctatttatatactacagtaattttctgttaagaaggcagttgtaaagaatgtgtttatataaacctaaaaatgccttttactgctaagtggggagatgggggaaatccatggaagagagatttaagacttattgattgtacatcagtctcttcatatcacatatacatgtatatatataaaactctaatgtagtataaccttgttaaataaaccatgatgatttattaaa

SEQ ID NO: 130375 - DNA, 404 bp, Homo sapiens
  Payload ID: 5509
  Gene Symbol: EMC2
  Gene Name: ER membrane protein complex subunit 2
  ENST ID: ENST00000519642
  CDS Start-End: 1-404
ggatcatatatgaacaggtgatgattgcagcactagactatggtcgggatgacttggcattgttttgtcttcaagagctgagaagacagttccctggcagtcacagagtcaagcgattaacaggcatgagatttgaagccatggaaagatatgatgatgctatacagctatatgataggattttacaagaagatccaactaacactgctgcaagaaagcgtaagattgccattcgaaaagcccaggggaaaaatgtggaggccattcgggagctgaatgagtatctggaacaatttgttggagaccaagaagcctggcatgaacttgcagaactttacatcaatgaacatgatttgcaggtcgaagtaagaaggaaaccaaatattctcttaaggctgtcgaag

SEQ ID NO: 130376 - DNA, 533 bp, Homo sapiens
  Payload ID: 5509
  Gene Symbol: EMC2
  Gene Name: ER membrane protein complex subunit 2
  ENST ID: ENST00000524143
  CDS Start-End: 196-533
gggtcacgtgactgcgtctccccgccctctcaccccgctgcctctaggttctgggaagatggcgaaggtctcagagctttacgatgtcacttgggaagtgcccagatcaggcctggcacataggcatttaggaaatattagttgagtgatgaagaactccaatatttactccaagaagtaaatattagtggaataatgaagtatagttccagtcatacactatactgcctcaaagaagaaatgagagataaaatgagaaaatggagagaagaaaactcaagaaatagtgagcaaattgtggaagttggagaagaattaattaatgaatatgcttctaagctgggagatgatatttggatcatatatgaacaggtgatgattgcagcactagactatggtcgggatgacttggcattgttttgtcttcaagagctgagaagacagttccctggcagtcacagagtcaagcgattaacaggcatgagatttgaagccatggaaagatatgatgatgctatacagctatatgatag

SEQ ID NO: 130377 - DNA, 2777 bp, Homo sapiens
  Payload ID: 5510
  Gene Symbol: EMC3
  Gene Name: ER membrane protein complex subunit 3
  Uniprot ID: Q9P0I2
  ENST ID: ENST00000245046
  CDS Start-End: 460-1245
tgcctcagcctcccgagtagctgcgactacaggcgcctccaccacgcctggctaatttttttgtatttttagtagagacagggtttcacctgttagccaggatggtctcgatcccctgacctcgtgatccccccaccttggcctcccaaagtgctgggattccaggagtgagccaccgagcctgggccaccgccgatagttttccactttcccgccaggcccgacgccgctctgacgccactgaggtgcgccacgacgtgacgtcaacgttcgcgccggaagtggaagaccaggcagcccagctgaaggcagtaagctcggctcacagtcgcaggagagttctggggtacacgggcaaaggggcttgagaaggcccggaggcgaagccgaagagaagcaactgtgccccggagaagagaagctcgcccattccagactgggaaccagctttcagtgaagatggcagggccagaactgttgctcgactccaacatccgcctctgggtggtcctacccatcgttatcatcactttcttcgtaggcatgatccgccactacgtgtccatcctgctgcagagcgacaagaagctcacccaggaacaagtatctgacagtcaagtcctaattcgaagcagagtcctcagggaaaatggaaaatacattcccaaacagtctttcttgacacgaaaatattatttcaacaacccagaggatggatttttcaaaaaaactaaacggaaggtagtgccaccttctcctatgactgatcctactatgttgacagacatgatgaaagggaatgtaacaaatgtcctccctatgattcttattggtggatggatcaacatgacattctcaggctttgtcacaaccaaggtcccatttccactgaccctccgttttaagcctatgttacagcaaggaatcgagctactcacattagatgcatcctgggtgagttctgcatcctggtacttcctcaatgtatttgggcttcggagcatttactctctgattctgggccaagataatgccgctgaccaatcacgaatgatgcaggagcagatgacgggagcagccatggccatgcccgcagacacaaacaaagctttcaagacagagtgggaagctttggagctgacggatcaccagtgggcactagatgatgtcgaagaagagctcatggccaaagacctccacttcgaaggcatgttcaaaaaggaattacagacctctattttttgaagaccgagcagggattagctgtgtcaggaacttggagttgcacttaaccttgtaactttgtttggagctggcacctcttgaaataaaaaggaggatgcacgagctggcaggcatgcagcaaggcttgttcttgtctgggctgggttcccctttatgtttgaaactagaggaaataggagtatgctgggcaacttgttatttttaaaatgttgtaaatgttccttctggtgactctagtaatgaaagtcagagaaagggggaaacctcaggctactgataatatataaaatcttggccaggcgcagtggctcacgcctgtaatcccaggattttgggaggctgaggcgggtgggtcacgagatcaggagttcaagatcagcctggccaagatggtgaaaccccatctctactaaaaatacaaaaaaaaattagccgggcgtggtggtgggcacctgtaatcccagctacttgggaggctgaggcagagaactgcttaaacctaggaggcggaggatgcagtgagctgacatcgtgccactgcgctccagcctgggcgacagagcaaaactccatctgaaaaaaaaaaaaaaatatatatatatatatatatatatctatcttagcagaagcccagtcttcgaaggaagcattgttaattatagctaatgattatgtgcagtcagcctgacatctagccacagtaaactcctgttttcttgggatccaaacaccctgtgttttaccattagttttgttagtattgttaactttctttacacaagtaaaccatttccactaccaaaggtttagaaactatggatgaacaaaatgaatctccctgttcattttgagcctacatagacatagagaccaaatatgtcaaaaccttattcaaataaactctcttcagagtgaatacccagggtcaggacagactcagcaaaccttctatatcacttaattctgcccagtgaaaatcagtgaccctgaggcactgccagattctaaagtgcctttgggatcatcagagactgtctataaataatgcaaaatcttgatctggatgtcagtgtatcaaatcttatcaaatccattgacaaatcagtggtgctatactggaaatggctactcctttggatgaaggacctcatttcccagttgcttggaacaaaagagaatttacatattgctgtaagaagggagagacggcagttgttggtagacacacagataagggtgcccaagaataattctgtctggattaaaggtcccagggaagtgacggtgccatttctgtaccaagaggtgaatataatttgcatgttgagtgcagtaattaagaacaaacgactcgactccacaaattaaaccgtcctgttttctcttctttgcctgtgaaagtgttgcctctgtaagtcactaacaaccttctgccagcagttgactgtctatcttggatcagtgcggggagtctaagacgaaagagatgtgaaccttgccctcaactcacaagagagagacacctaagagct

SEQ ID NO: 130378 - DNA, 751 bp, Homo sapiens
  Payload ID: 5510
  Gene Symbol: EMC3
  Gene Name: ER membrane protein complex subunit 3
  ENST ID: ENST00000429759
  CDS Start-End: 22-633
gggaaccagctttcagtgaagatggcagggccagaactgttgctcgactccaacatccgcctctgggtggtcctacccatcgttatcatcactttcttcgtaggcatgatccgccactacgtgtccatcctgctgcagagcgacaagaagctcacccaggaacaagtatctgacagaaaatatctttcaggcctggtgcaatggctcacacctataatcccagcactttggggggctgagatgggaggatcccttgagcccaggaatttgagaccaaccttggcagcatgtcaagtcctaattcgaagcagagtcctcagggaaaatggaaaatacattcccaaacagtctttcttgacacgaaaatattatttcaacaacccagaggatggatttttcaaaaaaactaaacggaaggtagtgccaccttctcctatgactgatcctactatgttgacagacatgatgaaagggaatgtaacaaatgtcctccctatgattcttattggtggatggatcaacatgacattctcaggctttgtcacaaccaaggtcccatttccactgaccctccgttttaagcctatgttacagcaaggaatcgagctactcacattagatgcatcctggtaagaactttcttttgtttaataaaaacacaaaccacactttgggaagccaaggcgggaggatcacttgagcccatgagtttgagaccagcctgggcaacagagtaagaccctgtctcaag

SEQ ID NO: 130379 - DNA, 570 bp, Homo sapiens
  Payload ID: 5510
  Gene Symbol: EMC3
  Gene Name: ER membrane protein complex subunit 3
  ENST ID: ENST00000470827
  CDS Start-End: 336-570
tccaggcgctgctgccccaacacaggcgggcactctctgcgggtcccgcggctcccgcggcttccggcccactcagcgcctccagaggcctcaggcccgacgccgctctgacgccactgaggtgcgccacgacgtgacgtcaacgttcgcgccggaagtggaagaccaggcagcccagctgaaggcagtaagctcggctcacagtcgcaggagagttctggggtacacgggcaaaggggcttgagaaggcccggaggcgaagccgaagagaagcaactgtgccccggagaagagaagctcgcccattccagactgggaaccagctttcagtgaagatggcagggccagaactgttgctcgactccaacatccgcctctgggtggtcctacccatcgttatcatcactttcttcgtaggcatgatccgccactacgtgtccatcctgctgcagagcgacaagaagctcacccaggaacaagtatctgacagtcaagtcctaattcgaagcagagtcctcagggaaaatggaaaatacattcccaaacagtctttcttgacacgaaaatatt

SEQ ID NO: 130380 - DNA, 852 bp, Homo sapiens
  Payload ID: 5511
  Gene Symbol: EMC4
  Gene Name: ER membrane protein complex subunit 4
  Uniprot ID: Q5J8M3
  ENST ID: ENST00000249209
  CDS Start-End: 103-552
agtgcatttgcagagtgagacaaagcggagaacgctggtgggcctgttgtggagtacgctttggactgagaagcatcgaggctataggacgcagctgttgccatgacggcccaggggggcctggtggctaaccgaggccggcgcttcaagtgggccattgagctaagcgggcctggaggaggcagcaggggtcgaagtgaccggggcagtggccagggagactcgctctacccagtcggttacttggacaagcaagtgcctgataccagcgtgcaagagacagaccggatcctggtggagaagcgctgctgggacatcgccttgggtcccctcaaacagattcccatgaatctcttcatcatgtacatggcaggcaatactatctccatcttccctactatgatggtgtgtatgatggcctggcgacccattcaggcacttatggccatttcagccaagaatggagttcagtggtggaggactgcttttgtgaacatgagaaagcagcgcctggtccctatgtatttgggtcttatttacatccttctttaagcccagtggctcctcagcatactcttaaactaatcacttatgttaaaaagaaccaaaagactcttttctccatggtggggtgacaggtcctagaaggacaatgtgcatattacgacaaacacaaagaaactataccataacccaaggctgaaaataatgtagaaaactttatttttgtttccagtacagagcaaaacaacaacaaaaaaacataactatgtaaacaagagaataactgctgctaaatcaagaactgttgcagcatctcctttcaataaattaaatggttgagaacaatgc

SEQ ID NO: 130381 - DNA, 1036 bp, Homo sapiens
  Payload ID: 5511
  Gene Symbol: EMC4
  Gene Name: ER membrane protein complex subunit 4
  Uniprot ID: Q5J8M3
  ENST ID: ENST00000267750
  CDS Start-End: 117-668
attcacgcgccggaagtgcatttgcagagtgagacaaagcggagaacgctggtgggcctgttgtggagtacgctttggactgagaagcatcgaggctataggacgcagctgttgccatgacggcccaggggggcctggtggctaaccgaggccggcgcttcaagtgggccattgagctaagcgggcctggaggaggcagcaggggtcgaagtgaccggggcagtggccagggagactcgctctacccagtcggttacttggacaagcaagtgcctgataccagcgtgcaagagacagaccggatcctggtggagaagcgctgctgggacatcgccttgggtcccctcaaacagattcccatgaatctcttcatcatgtacatggcaggcaatactatctccatcttccctactatgatggtgtgtatgatggcctggcgacccattcaggcacttatggccatttcagccactttcaagatgttagaaagttcaagccagaagtttcttcagggtttggtctatctcattgggaacctgatgggtttggcattggctgtttacaagtgccagtccatgggactgttacctacacatgcatcggattggttagccttcattgagccccctgagagaatggagttcagtggtggaggactgcttttgtgaacatgagaaagcagcgcctggtccctatgtatttgggtcttatttacatccttctttaagcccagtggctcctcagcatactcttaaactaatcacttatgttaaaaagaaccaaaagactcttttctccatggtggggtgacaggtcctagaaggacaatgtgcatattacgacaaacacaaagaaactataccataacccaaggctgaaaataatgtagaaaactttatttttgtttccagtacagagcaaaacaacaacaaaaaaacataactatgtaaacaagagaataactgctgctaaatcaagaactgttgcagcatctcctttcaataaattaaatggttgagaacaatgcataaaaaaa

SEQ ID NO: 130382 - DNA, 497 bp, Homo sapiens
  Payload ID: 5511
  Gene Symbol: EMC4
  Gene Name: ER membrane protein complex subunit 4
  ENST ID: ENST00000559421
  CDS Start-End: 50-286
gtacgctttggactgagaagcatcgaggctataggacgcagctgttgccatgacggcccaggggggcctggtggctaaccgaggccggcgcttcaagtgggccattgagctaagcgggcctggaggaggcagcaggggtcgaagtgaccggggcagtggccagggagactcgctctacccagtcggttacttggacaagcaagtgcctgataccagcgtgcaagagacagaccggatcctggtggagaagagaatggagttcagtggtggaggactgcttttgtgaacatgagaaagcagcgcctggtccctatgtatttgggtcttatttacatccttctttaagcccagtggctcctcagcatactcttaaactaatcacttatgttaaaaagaaccaaaagactcttttctccatggtggggtgacaggtcctagaaggacaatgtgcatattacgacaaacacaaagaaactataccataacccaaggctgaa

SEQ ID NO: 130383 - DNA, 709 bp, Homo sapiens
  Payload ID: 5511
  Gene Symbol: EMC4
  Gene Name: ER membrane protein complex subunit 4
  ENST ID: ENST00000560947
  CDS Start-End: 1-295
ctgctgggacatcgccttgggtcccctcaaacagattcccatgaatctcttcatcatgtacatggcaggcaatactatctccatcttccctactatgatggtgtgtatgatggcctggcgacccattcaggcacttatggccatttcagccaatgttagaaagttcaagccagaagtttcttcagggtttggtctatctcattgggaacctgatgggtttggcattggctgtttacaagtgccagtccatgggactgttacctacacatgcatcggattggttagccttcattgagccccctgagagaatggagttcagtggtggaggactgcttttgtgaacatgagaaagcagcgcctggtccctatgtatttgggtcttatttacatccttctttaagcccagtggctcctcagcatactcttaaactaatcacttatgttaaaaagaaccaaaagactcttttctccatggtggggtgacaggtcctagaaggacaatgtgcatattacgacaaacacaaagaaactataccataacccaaggctgaaaataatgtagaaaactttatttttgtttccagtacagagcaaaacaacaacaaaaaaacataactatgtaaacaagagaataactgctgctaaatcaagaactgttgcagcatctcctttcaataaattaaatggttgagaacaatgcataaaaaaa

SEQ ID NO: 130384 - DNA, 466 bp, Homo sapiens
  Payload ID: 5511
  Gene Symbol: EMC4
  Gene Name: ER membrane protein complex subunit 4
  ENST ID: ENST00000561372
  CDS Start-End: 91-466
gagtgagacaaagcggagaacgctggtgggcctgttgtggagtacgctttggactgagaagcatcgaggctataggacgcagctgttgccatgacggcccaggggggcctggtggctaaccgaggccggcgcttcaagtgggccattgagctaagcgggcctggaggaggcagcagtttcttggtttggttttttaggggtcgaagtgaccggggcagtggccagggagactcgctctacccagtcggttacttggacaagcaagtgcctgataccagcgtgcaagagacagaccggatcctggtggagaagcgctgctgggacatcgccttgggtcccctcaaacagattcccatgaatctcttcatcatgtacatggcaggcaatactatctccatcttccctactatgatggtgtgtatgatggcctggcgacccattcaggcacttatggccatttcagcca

SEQ ID NO: 130385 - DNA, 579 bp, Homo sapiens
  Payload ID: 5511
  Gene Symbol: EMC4
  Gene Name: ER membrane protein complex subunit 4
  ENST ID: ENST00000560911
  CDS Start-End: 98-316
atttgcagagtgagacaaagcggagaacgctggtgggcctgttgtggagtacgctttggactgagaagcatcgaggctataggacgcagctgttgccatgacggcccaggggggcctggtggctaaccgaggccggcgcttcaagtgggccattgagctaagcgggcctggaggaggcagcagggagactcgctctacccagtcggttacttggacaagcaagtgcctgataccagcgtgcaagagacagaccggatcctggtggagaagcgctgctgggacatcgccttgggtcccctcaaacagattcccatgaatctcttcatcatgtacatggcaggcaatactatctccatcttccctactatgatggtgtgtatgatggcctggcgacccattcaggcacttatggccatttcagccactttcaagatgttagaaagttcaagccagaagtttcttcagggtttggtctatctcattgggaacctgatgggtttggcattggctgtttacaagtgccagtccatgggactgttacctacacatgcatcggattggttagccttcattgagccc

SEQ ID NO: 130386 - DNA, 543 bp, Homo sapiens
  Payload ID: 5511
  Gene Symbol: EMC4
  Gene Name: ER membrane protein complex subunit 4
  ENST ID: ENST00000558102
  CDS Start-End: 76-207
gagaacgctggtgggcctgttgtggagtacgctttggactgagaagcatcgaggctataggacgcagctgttgccatgacggcccaggggggcctggtggctaaccgaggccggcgcttcaagtgggccattgagctaagcgggcctggaggaggcagcagcgctgctgggacatcgccttgggtcccctcaaacagattcccatgaatctcttcatcatgtacatggcaggcaatactatctccatcttccctactatgatggtgtgtatgatggcctggcgacccattcaggcacttatggccatttcagccaagaatggagttcagtggtggaggactgcttttgtgaacatgagaaagcagcgcctggtccctatgtatttgggtcttatttacatccttctttaagcccagtggctcctcagcatactcttaaactaatcacttatgttaaaaagaaccaaaagactcttttctccatggtggggtgacaggtcctagaaggacaatgtgcatattacgacaaacacaaagaaactat

SEQ ID NO: 130387 - DNA, 1006 bp, Homo sapiens
  Payload ID: 5511
  Gene Symbol: EMC4
  Gene Name: ER membrane protein complex subunit 4
  ENST ID: ENST00000558205
  CDS Start-End: 79-333
gcggagaacgctggtgggcctgttgtggagtacgctttggactgagaagcatcgaggctataggacgcagctgttgccatgacggcccaggggggcctggtggctaaccgaggccggcgcttcaagtgggccattgagctaagcgggcctggaggaggcagcaggggtcgaagtgaccggggcagtggccagggagactcgctctacccagtcggttacttggacaagcaagtgcctgataccagcgtgcaagagacagaccggatcctggtggagaaggtacagagcgctgctgggacatcgccttgggtcccctcaaacagattcccatgaatctcttcatcatgtacatggcaggcaatactatctccatcttccctactatgatggtgtgtatgatggcctggcgacccattcaggcacttatggccatttcagccactttcaagatgttagaaagttcaagccagaagtttcttcagggtttggtctatctcattgggaacctgatgggtttggcattggctgtttacaagtgccagtccatgggactgttacctacacatgcatcggattggttagccttcattgagccccctgagagaatggagttcagtggtggaggactgcttttgtgaacatgagaaagcagcgcctggtccctatgtatttgggtcttatttacatccttctttaagcccagtggctcctcagcatactcttaaactaatcacttatgttaaaaagaaccaaaagactcttttctccatggtggggtgacaggtcctagaaggacaatgtgcatattacgacaaacacaaagaaactataccataacccaaggctgaaaataatgtagaaaactttatttttgtttccagtacagagcaaaacaacaacaaaaaaacataactatgtaaacaagagaataactgctgctaaatcaagaactgttgcagcatctcctttcaataaattaaatggttgagaacaatgcataaaaaaa

SEQ ID NO: 130388 - DNA, 599 bp, Homo sapiens
  Payload ID: 5511
  Gene Symbol: EMC4
  Gene Name: ER membrane protein complex subunit 4
  ENST ID: ENST00000559078
  CDS Start-End: 80-388
agcggagaacgctggtgggcctgttgtggagtacgctttggactgagaagcatcgaggctataggacgcagctgttgccatgacggcccaggggggcctggtggctaaccgaggccggcgcttcaagtgggccattgagctaagcgggcctggaggaggcagcaggggtcgaagtgaccggggcagtggccagggagactcgctctacccagtcggttacttggacaagcaagtgcctgataccagcgtgcaagagacagaccggatcctggtggagaagcgctgctgggacatcgccttgggtcccctcaaacagattcccatgaatctcttcatcatgtacatggcaggcaatactatctccatcttccctactatgatggcgtgagccactgcgcctggcctagggtttcttaaaaaataagagccattaggagtttttaagttattatttttaattaattaattaatttatttattttgagacagagtctcactctgtcgcccaggctggagtacagtggtgtgatcttggctcactgcaacctccgccccccaggttcaagcgattcttgtgcctgagcctccctagtagctgg

SEQ ID NO: 130389 - DNA, 1009 bp, Homo sapiens
  Payload ID: 5511
  Gene Symbol: EMC4
  Gene Name: ER membrane protein complex subunit 4
  ENST ID: ENST00000557879
  CDS Start-End: 78-296
cggagaacgctggtgggcctgttgtggagtacgctttggactgagaagcatcgaggctataggacgcagctgttgccatgacggcccaggggggcctggtggctaaccgaggccggcgcttcaagtgggccattgagctaagcgggcctggaggaggcagcaggggtcgaagtgaccggggcagtggccagggagactcgctctacccagtcggttacttggacaagcaagtgcctgataccagcgtgcaagagacagaccggatcctggtggagaaggtacagaggttgcagtgagccgagatcgtgccactgcactccagcctgggtgacagaacgagactccatctcaaaaaaaaggaagaattaaaggtaaattcttagggacagtttttggctaacaggtatataggggagtggggtaatggtggtggcatggaggggagtgtagtgcttaccatggttttctgtttgcctttaatggtcctatttgctgtcttactatgggtctgtctatatgaatttaatatacagttggcttgattcgtattgggggaaagagttcttttggtttgacaacttctgttaccgcaacagctttcaagatgttagaaagttcaagccagaagtttcttcagggtttggtctatctcattgggaacctgatgggtttggcattggctgtttacaagtgccagtccatgggactgttacctacacatgcatcggattggttagccttcattgagccccctgaggtaaggcaaaagaaaagctgaattttgggtagttgtagtatacagtgaatagctgacctacttgatggtaggaaattggagttggtatttgagtttctttttttttttttttttttttttgagacggagtattgctctgtcgcccaggctggagtgcagtggcatgatctcggcaacctccgcctcctgggttcaagcaattattctgcctcagccttccaagtagctgggattacaggcacctgccaccat

SEQ ID NO: 130390 - DNA, 653 bp, Homo sapiens
  Payload ID: 5512
  Gene Symbol: EMC6
  Gene Name: ER membrane protein complex subunit 6
  Uniprot ID: Q9BV81
  ENST ID: ENST00000248378
  CDS Start-End: 135-467
cttccgagcaagatggcgccgcgggcatttcttccactgcccgtctgagggaacgctaagtagtgtgtccggcgccgtgttccagctccgcgttgttccgcgagaaagcgagaggccgagcccgggctggtgcgatggccgcggtggtggccaagcgggaagggccgccgttcatcagcgaggcggccgtgcggggcaacgccgccgtcctggattattgccggacctcggtgtcagcgctgtcgggggccacggccggcatcctcggcctcaccggcctctacggcttcatcttctacctgctcgcctccgtcctgctctccctgctcctcattctcaaggcgggaaggaggtggaacaaatatttcaaatcacggagacctctctttacaggaggcctcatcgggggcctcttcacctacgtcctgttctggacgttcctctacggcatggtgcacgtctactgaaatgggggcccgggggacttttttaaaaaaccagatcgggaggactgtggccagcaattaacaccatgtagacttccttagttcttaagtggttgaattcgctgcttgttctgtaacgttataaataatttatatctgaagacggagagcctgtaatattcttcagattaaatgaagcgtgagaca

SEQ ID NO: 130391 - DNA, 762 bp, Homo sapiens
  Payload ID: 5512
  Gene Symbol: EMC6
  Gene Name: ER membrane protein complex subunit 6
  Uniprot ID: Q9BV81
  ENST ID: ENST00000397133
  CDS Start-End: 241-573
gcaagatggcgccgcgggcatttcttccactgcccgtctgagggaacgctaagtagtgtgtccggcgccgtgttccaggtaactgggccaccgtggccggggaacgcagacgcgccaccacctcccggccggcccggaccctcaatctcctcggcgtctttggaagatccgaggcccaggactggtgccagctccgcgttgttccgcgagaaagcgagaggccgagcccgggctggtgcgatggccgcggtggtggccaagcgggaagggccgccgttcatcagcgaggcggccgtgcggggcaacgccgccgtcctggattattgccggacctcggtgtcagcgctgtcgggggccacggccggcatcctcggcctcaccggcctctacggcttcatcttctacctgctcgcctccgtcctgctctccctgctcctcattctcaaggcgggaaggaggtggaacaaatatttcaaatcacggagacctctctttacaggaggcctcatcgggggcctcttcacctacgtcctgttctggacgttcctctacggcatggtgcacgtctactgaaatgggggcccgggggacttttttaaaaaaccagatcgggaggactgtggccagcaattaacaccatgtagacttccttagttcttaagtggttgaattcgctgcttgttctgtaacgttataaataatttatatctgaagacggagagcctgtaatattcttcagattaaatgaagcgtgagacactt

SEQ ID NO: 130392 - DNA, 1155 bp, Homo sapiens
  Payload ID: 5513
  Gene Symbol: EMC7
  Gene Name: ER membrane protein complex subunit 7
  Uniprot ID: Q9NPA0
  ENST ID: ENST00000256545
  CDS Start-End: 110-838
cagaaacgggcgcgcagtgatgacaacatcaagccgccagcggcggcggtggcggccgggagactgggagggcttccggggctgccggtctgagtgcagagctgctgtcatggcggccgctctgtggggcttctttcccgtcctgctgctgctgctgctatcgggggatgtccagagctcggaggtgcccggggctgctgctgagggatcgggagggagtggggtcggcataggagatcgcttcaagattgaggggcgtgcagttgttccaggggtgaagcctcaggactggatctcggcggcccgagtgctggtagacggagaagagcacgtcggtttccttaagacagatgggagttttgtggttcatgatataccttctggatcttatgtagtggaagttgtatctccagcttacagatttgatcccgttcgagtggatatcacttcgaaaggaaaaatgagagcaagatatgtgaattacatcaaaacatcagaggttgtcagactgccctatcctctccaaatgaaatcttcaggtccaccttcttactttattaaaagggaatcgtggggctggacagactttctaatgaacccaatggttatgatgatggttcttcctttattgatatttgtgcttctgcctaaagtggtcaacacaagtgatcctgacatgagacgggaaatggagcagtcaatgaatatgctgaattccaaccatgagttgcctgatgtttctgagttcatgacaagactcttctcttcaaaatcatctggcaaatctagcagcggcagcagtaaaacaggcaaaagtggggctggcaaaaggaggtagtcaggccgtccagagctggcatttgcacaaacacggcaacactgggtggcatccaagtcttggaaaaccgtgtgaagcaactactataaacttgagtcatcccgacgttgatctcttacaactgtgtatgttaactttttagcacatgttttgtacttggtacacgagaaaacccagctttcatcttttgtctgtatgaggtcaatattgatgtcactgaattaattacagtgtcctatagaaaatgccattaataaattatatgaactactatacattatgtatattaattaaaacatcttaatccagaaatcaaa

SEQ ID NO: 130393 - DNA, 581 bp, Homo sapiens
  Payload ID: 5513
  Gene Symbol: EMC7
  Gene Name: ER membrane protein complex subunit 7
  ENST ID: ENST00000527822
  CDS Start-End: 1-577
cctgctgctgctgctgctatcgggggatgtccagagctcggaggtgcccggggctgctgctgagggatcgggagggagtggggtcggcataggagatcgcttcaagattgaggggcgtgcagttgttccaggggtgaagcctcaggactggatctcggcggcccgagtgctggtagacggagaagagcacgtcggtttccttaaagcaagatatgtgaattacatcaaaacatcagaggttgtcagactgccctatcctctccaaatgaaatcttcaggtccaccttcttactttattaaaagggaatcgtggggctggacagactttctaatgaacccaatggttatgatgatggttcttcctttattgatatttgtgcttctgcctaaagtggtcaacacaagtgatcctgacatgagacgggaaatggagcagtcaatgaatatgctgaattccaaccatgagttgcctgatgtttctgagttcatgacaagactcttctcttcaaaatcatctggcaaatctagcagcggcagcagtaaaacaggcaaaagtggggctggcaaaaggaggtagtcag

SEQ ID NO: 130394 - DNA, 506 bp, Homo sapiens
  Payload ID: 5513
  Gene Symbol: EMC7
  Gene Name: ER membrane protein complex subunit 7
  ENST ID: ENST00000528949
  CDS Start-End: 27-506
cctgctgctgctgctgctatcgggggatgtccagagctcggaggacagatgggagttttgtggttcatgatataccttctggatcttatgtagtggaagttgtatctccagcttacagatttgatcccgttcgagtggatatcacttcgaaaggaaaaatgagagcaagatatgtgaattacatcaaaacatcagaggttgtcagactgccctatcctctccaaatgaaatcttcaggtccaccttcttactttattaaaagggaatcgtggggctggacagactttctaatgaacccaatggttatgatgatggttcttcctttattgatatttgtgcttctgcctaaagtggtcaacacaagtgatcctgacatgagacgggaaatggagcagtcaatgaatatgctgaattccaaccatgagttgcctgatgtttctgagttcatgacaagactcttctcttcaaaatcatctggcaaatctagcagcggcagcagtaaaaca

SEQ ID NO: 130395 - DNA, 1962 bp, Homo sapiens
  Payload ID: 5514
  Gene Symbol: EMC8
  Gene Name: ER membrane protein complex subunit 8
  Uniprot ID: O43402
  ENST ID: ENST00000253457
  CDS Start-End: 246-878
tccggcggcgccgggcgagaagcgcgactggagtctggggctgcggcttcccagaggcgcgagtcgcttttccaggagccgaggcccaaacggggccgggcctgaagggtcccccgccagcccgcggccgcgccatcaatcgccgccgcctcgtcccgcttctcggctgaggcgccgcgcggccaggcagcgggtccaggcctcagccgcgcgcccaggggcctccggggccctcccgggtcagcatgcccggggtgaaactgaccacccaggcctactgcaagatggtgctgcacggcgccaagtacccgcactgcgccgtcaacgggctcctggtggccgagaagcagaagccgcgtaaggagcacctccccctgggcggccccggcgcccaccacaccctcttcgtggactgcatccccctcttccacggcaccctggccctcgcccccatgctggaggtggctctcaccctgattgattcatggtgcaaagatcatagctacgtgattgctggttattatcaagctaatgagcgagtaaaggatgccagtccaaaccaggttgcagagaaggtggcctccagaatcgccgagggcttcagcgacactgcgctcatcatggtagacaacaccaagtttacgatggactgcgtagcgcctacgatccacgtgtacgagcaccatgagaacagatggcggtgcagagacccacaccatgactactgtgaagactggccagaggcacagaggatctcagcctcgctcctggacagccggtcctacgagacgctcgtggatttcgataaccacctggatgacattcggaatgactggacaaacccagagatcaataaagctgtcctacacttgtgctaggcaggcaccgctgtgactgggctccgggcctttccactacgttgaagaagaaaacctatttttaaatgtaaataaaatatcttgtagcctgtgtggaaagctgaccgttttaagaagtggcatgtgccttgaaagggggcagaatgttcagtcggtcgtgtttttaacacagagtctctagaagaggtgcagacatcccgtctgactgtccctgtggactctctcagttgtatgttgctataatcctccaaatcaaagctctttctgcttgtgcaagattgttcctattaaacagttttaactaaccttttataatctggagagaatactttttaaggcttttgaactatctttttttaaaaaaaaaaaaaaaagcccacatcttatactccaatgagtgtgtttgtgagtttttatcctgtttgaattttgatgtcgtccaggcgtcctgggatcagggtagacacgtggagtgctggtgctgagctgtttgagaagctctgtgtgggtgtttctgtggtcaggtaggctgggctgtgaacagcactgctccacatggtgtcggctcacagagccaccgcaactctgcccagcgggagtgacaccactgatgccacagaagcctttatcgttaggggcaaaagcagacatctctggtagcaggagctcagtgtggtgctcttcagccacgcagaaagctcacgtgcctgcagggccaggaaagggaaatgatcgtttcttttgtattaggaaaaacaagacttagacttcccgagttgtgcagagtgacgtctgtactttttatacttagaacatttggtcaagttttgtaaccaaaccttagggaattgagagggaaactttatggtacgtttaccttttttcctttttatatgaattattttgtacaaagttcagagagcggtacctttcctactgtcttttctttgactccatggaggaatttgtaacgatcggtgtgacctgaaagggtttgtgatacagcggtcactattttctcttaacacataggaaaaaagttcagacatcgctacaataaatgtgctttatttgatccaccaaa

SEQ ID NO: 130396 - DNA, 1935 bp, Homo sapiens
  Payload ID: 5514
  Gene Symbol: EMC8
  Gene Name: ER membrane protein complex subunit 8
  Uniprot ID: O43402
  ENST ID: ENST00000435200
  CDS Start-End: 314-694
ggtagcgctgcgaacgtcgtaaaatgccgggccgggctgctttccggcaggcgttggagaggctgctttccggcggcgccgggcgagaagcgcgactggagtctggggctgcggcttcccagaggcgcgagtcgcttttccaggagccgaggcccaaacggggccgggcctgaagggtcccccgccagcccgcggccgcgccatcaatcgccgccgcctcgtcccgcttctcggctgaggcgccgcgcggccaggcagcgggtccaggcctcagccgcgcgcccaggggcctccggggccctcccgggtcagcatgcccggggtgaaactgaccacccaggcctactgcaagatggtgctgcacggcgccaagtacccgcactgcgccgtcaacgggctcctggtggccgagaagcagaagccgcgtaaggagcacctccccctgggcggccccggcgcccaccacaccctcttcgtggactgcatccccctcttccacggcaccctggccctcgcccccatgctggaggtggctctcaccctgattgattcatggtgcaaagatcatagctacgtgattgctggttattatcaagctaatgagcgagtaaaggatgccagtccaaaccaggttgcagagaaggtggcctccagaatcgccgagggcttcagcgacactgcgctcatcatgtgactactgtgaagactggccagaggcacagaggatctcagcctcgctcctggacagccggtcctacgagacgctcgtggatttcgataaccacctggatgacattcggaatgactggacaaacccagagatcaataaagctgtcctacacttgtgctaggcaggcaccgctgtgactgggctccgggcctttccactacgttgaagaagaaaacctatttttaaatgtaaataaaatatcttgtagcctgtgtggaaagctgaccgttttaagaagtggcatgtgccttgaaagggggcagaatgttcagtcggtcgtgtttttaacacagagtctctagaagaggtgcagacatcccgtctgactgtccctgtggactctctcagttgtatgttgctataatcctccaaatcaaagctctttctgcttgtgcaagattgttcctattaaacagttttaactaaccttttataatctggagagaatactttttaaggcttttgaactatctttttttaaaaaaaaaaaaaaaagcccacatcttatactccaatgagtgtgtttgtgagtttttatcctgtttgaattttgatgtcgtccaggcgtcctgggatcagggtagacacgtggagtgctggtgctgagctgtttgagaagctctgtgtgggtgtttctgtggtcaggtaggctgggctgtgaacagcactgctccacatggtgtcggctcacagagccaccgcaactctgcccagcgggagtgacaccactgatgccacagaagcctttatcgttaggggcaaaagcagacatctctggtagcaggagctcagtgtggtgctcttcagccacgcagaaagctcacgtgcctgcagggccaggaaagggaaatgatcgtttcttttgtattaggaaaaacaagacttagacttcccgagttgtgcagagtgacgtctgtactttttatacttagaacatttggtcaagttttgtaaccaaaccttagggaattgagagggaaactttatggtacgtttaccttttttcctttttatatgaattattttgtacaaagttcagagagcggtacctttcctactgtcttttctttgactccatggaggaatttgtaacgatcggtgtgacctgaaagggtttgtgatacagcggtcactattttctcttaacacataggaaaaaagttcagacatcgctacaataaatgtgctttatttgatccaccaaa

SEQ ID NO: 130397 - DNA, 556 bp, Homo sapiens
  Payload ID: 5514
  Gene Symbol: EMC8
  Gene Name: ER membrane protein complex subunit 8
  ENST ID: ENST00000595980
  CDS Start-End: 1-303
gtggcctccagaatcgccgagggcttcagcgacactgcgctcatcatggtagacaacaccaagtttacgatggactgcgtagcgcctacgatccacgtgtacgagcaccatgagaacagatggcggtgcagagacccacaccatgactactgtgaagactggccagaggcacagaggatctcagcctcgctcctggacagccggtcctacgagacgctcgtggatttcgataaccacctggatgacattcggaatgactggacaaacccagagatcaataaagctgtcctacacttgtgctaggcaggcaccgctgtgactgggctccgggcctttccactacgttgaagaagaaaacctatttttaaatttcaatcaaatgcctggtaggaattgctagcgttgcccctgccaactctcagacggagtctcgcactgtcacccgattggagcacaatgccgcagtctcggttcactgcaacctccgcctgctgggttcaagcgattctcctgcctcagcctcccgagtagctgggattacaggcgcccgccacca

SEQ ID NO: 130398 - DNA, 835 bp, Homo sapiens
  Payload ID: 5515
  Gene Symbol: EMC9
  Gene Name: ER membrane protein complex subunit 9
  Uniprot ID: Q9Y3B6
  ENST ID: ENST00000216799
  CDS Start-End: 164-790
gtcgcggccgccagctaggggcgcgggaaggcggggctcggatgcaatcgggacctcctcctggactgggccgggggcggactccgggacccagggcgccgggagccggcgggctacctgcgagtcgagttagcgttgtcgccgaaccgaagcctcgctcgccatgggggaggtggagatctcggccctggcctacgtgaagatgtgcctgcatgctgcccggtacccacacgccgcagtcaacgggctgtttttggcgccagcgccgcggtctggagaatgcctgtgcctcaccgactgtgtgcccctcttccacagccacctggccctgtccgtcatgttggaggtcgccctcaaccaggtggatgtgtggggagcacaggccggtctggtggtggctggttactaccatgccaatgcagctgtgaacgatcagagccctgggcccctggccttgaaaattgctgggcgaattgcagaattcttccctgatgcagtacttattatgttggataatcagaaactggtgcctcagcctcgtgtgcccccggtcatcgtcctggagaaccaaggtctccgctgggtccctaaggataagaacttagtgatgtggagggactgggaagagtcacggcagatggtgggagctctactggaagatcgggcccaccagcaccttgtggactttgactgccaccttgatgacatccggcaggactggaccaaccagcggctcaacactcaaatcacccagtgggttggtcccactaatggaaatggaaatgcctgagccagggccagcggggcccggttccaataaagagacttgggctga

SEQ ID NO: 130399 - DNA, 953 bp, Homo sapiens
  Payload ID: 5515
  Gene Symbol: EMC9
  Gene Name: ER membrane protein complex subunit 9
  Uniprot ID: Q9Y3B6
  ENST ID: ENST00000419198
  CDS Start-End: 282-908
gcggccgccagctaggggcgcgggaaggcggggctcggatgcaatcgggacctcctcctggactgggccgggggcggactccgggacccagggcgccgggagccggcgggctacctgcgagtcgagttagcgttgtcgccgaaccgaagtgagagggcacggggaagggtcaaagagcgtgccgaagcgctggagggagcttcacggacgcgagctaggcaccggctcgcctaatccggtactaatccggcttgctgcttcccgtccaggcctcgctcgccatgggggaggtggagatctcggccctggcctacgtgaagatgtgcctgcatgctgcccggtacccacacgccgcagtcaacgggctgtttttggcgccagcgccgcggtctggagaatgcctgtgcctcaccgactgtgtgcccctcttccacagccacctggccctgtccgtcatgttggaggtcgccctcaaccaggtggatgtgtggggagcacaggccggtctggtggtggctggttactaccatgccaatgcagctgtgaacgatcagagccctgggcccctggccttgaaaattgctgggcgaattgcagaattcttccctgatgcagtacttattatgttggataatcagaaactggtgcctcagcctcgtgtgcccccggtcatcgtcctggagaaccaaggtctccgctgggtccctaaggataagaacttagtgatgtggagggactgggaagagtcacggcagatggtgggagctctactggaagatcgggcccaccagcaccttgtggactttgactgccaccttgatgacatccggcaggactggaccaaccagcggctcaacactcaaatcacccagtgggttggtcccactaatggaaatggaaatgcctgagccagggccagcggggcccggttccaataaagagacttgggctga

SEQ ID NO: 130400 - DNA, 771 bp, Homo sapiens
  Payload ID: 5515
  Gene Symbol: EMC9
  Gene Name: ER membrane protein complex subunit 9
  ENST ID: ENST00000560600
  CDS Start-End: 63-347
ggagccggcgggctacctgcgagtcgagttagcgttgtcgccgaaccgaagcctcgctcgccatgggggaggtggagatctcggccctggcctacgtgaagatgtgcctgcatgctgcccggtacccacacgccgcagtcaacgggctgtttttggcgccagcgccgcggtctggagaatgcctgtgcctcaccgactgtgtgcccctcttccacagccacctggccctgtccgtcatgttggaggtcgccctcaaccaggtggatgtgtggggagcacaggccggtctggtggtggctggttactaccatgccaatgcagctgtgaacgatcagagcaatatctgagcacctgtctcccacagcactcaagcatcaagcagtcgtgcatcaagcatccagcaggcccgatccccgcaggccacctacagggaaaggccacagctgcgcccacacctatgagacctgggaggcccagctcaaatggatgggttttgcccacagttggctcctcactcctctgatcttccctctacacagccctgggcccctggccttgaaaattgctgggcgaattgcagaattcttccctgatgcagtacttattatgttggataatcagaaactggtgcctcagcctcgtgtgcccccggtcatcgtcctggagaaccaaggtctccgctgggtccctaaggataagaacttagtgatgtggagggactgggaagagtcacggcagatggtgggagctctactggaagatcgggcccac

SEQ ID NO: 130401 - DNA, 872 bp, Homo sapiens
  Payload ID: 5515
  Gene Symbol: EMC9
  Gene Name: ER membrane protein complex subunit 9
  ENST ID: ENST00000560403
  CDS Start-End: 423-827
gggcgcgggaaggcggggctcggatgcaatcgggacctcctcctggactgggccgggggcggactccgggacccagggcgccgggagccggcgggctacctgcgagtcgagttagcgttgtcgccgaaccgaagtgagagggcacggggaagggtcaaagagcgtgccgaagcgctggagggagcttcacggacgcgagctaggcaccggctcgcctaatccggtggatgtgtggggagcacaggccggtctggtggtggctggttactaccatgccaatgcagctgtgaacgatcagagcactcaagcatcaagcagtcgtgcatcaagcatccagcaggcccgatccccgcaggccacctacagggaaaggccacagctgcgcccacacctatgagacctgggaggcccagctcaaatggatgggttttgcccacagttggctcctcactcctctgatcttccctctacacagccctgggcccctggccttgaaaattgctgggcgaattgcagaattcttccctgatgcagtacttattatgttggataatcagaaactggtgcctcagcctcgtgtgcccccggtcatcgtcctggagaaccaaggtctccgctgggtccctaaggataagaacttagtgatgtggagggactgggaagagtcacggcagatggtgggagctctactggaagatcgggcccaccagcaccttgtggactttgactgccaccttgatgacatccggcaggactggaccaaccagcggctcaacactcaaatcacccagtgggttggtcccactaatggaaatggaaatgcctgagccagggccagcggggcccggttccaataaagagacttgggctga

SEQ ID NO: 130402 - DNA, 2003 bp, Homo sapiens
  Payload ID: 5516
  Gene Symbol: ERMARD
  Gene Name: ER membrane-associated RNA degradation
  Uniprot ID: Q5T6L9
  ENST ID: ENST00000366772
  CDS Start-End: 37-1932
gtcattcacgcgcgccgcagcggggcaccggaagttatggaggtattaataggggaccctattaccacatgtctttctccctcagtgtatgatataatttgtaatcttgggtttcaactcagagaaaattgtgatatcaatagcattgtaactcagaatggtgaagtatgctggaaaacaatcacagactgtgtgagctacacagagtcagagcagggtctggattactggggaagcgtgaggctgctgggccctgtgtgtgaggctgtccattcacatttcttatctctgaccaaggggcaatttgaaattcgatatgcaccgtggttccagtggacaagttttccagagttatttcctgaaatatttgatgccttggaaagtctacaatctcctgctatttctcttagcttaatgaaactgacatcgtgtctagaacgagccttgggtgatgtatttttactgattgggaaggaatgcccctttcttttaagagatctgctttcatctgaggagcttgctcaagtcttcagtcagtctgtgatgaatgtgctaaaagtcttcgttggctctccgtgtggtctcaacctgcgtaacgtcttatggcatgggtttgcgtcacctgaagaaattcctccaaaatactgttcaatgatgatactgttgacggcaggattgggtcagttactgaagagttaccttcaaaacactaaacttacattggcacatcgctctttcatatctcttacaaacctcgaggatttgattgtttttcctgatgttacttatgaggtgctttcagtattagaagaagtgatgatgaaatctgcttttatattaaaaatcatgttaccatattgggaagttgcactggtcaagttcaagtcacacaggtttgctgactgcgccatattgttgctgacacaactggagactggacttaggaatgtttttgccacacttaacagatgtccaaaaagactcctgactgctgagtcaacagctctttataccacctttgatcaaatattggcaaaacacttgaatgatggtaaaatcaatcagcttcctcttttccttggagagcctgctatggaatttctctgggatttcctgaaccatcaggagggtccccgcataagagatcatttaagccacggggagatcaacttacatgaattttcaaaagaaacaactaatcagttgcttgcattttctcttgtactgctactcagattcgttgatgactgtctgctatcagtttttaaggaaaaatcagccgtagaattgttgattagtcttgcagaaggctatagttctcgctgtcatccggtttttcagcttaaaaaacaggtgctgagctgtgaggagagcatcagggtttgggctctgctgcctttccccgaagaactcactcggcaagccgtcagattagaagataattctgaaacaaatgcctgccactctttgattacaaaaatgacggatgagctgtatcaccatatgcctgagaatcgttgtgtgttaaaggacttggatcgtcttcctactgagacaccaaccagcgatacgccgctagccctggctcccagaaagccgcagccttgcaggtgcagaaggagagtgaggcccagtatcagactactgtcccctgtgctcagcctgatactgttactcattgcgctggagttggtcaacattcatgctgtttgtgggaagaatgcgcatgagtatcagcagtacctaaagtttgtaaagtcgatcttgcagtacacggagaacctggtggcttacaccagttacgaaaagaacaagtggaatgaaactatcaatcttacacatacagctttgttgaaaatgtggacttttagtgagaagaaacaaatgttaatacatttagccaagaaatccacaagtaaagtactcttatgaaaacttgtaagtcaggatgcttttaattttaacagattttaacagcgtgtaaattaaaaacccaaagacag

SEQ ID NO: 130403 - DNA, 2141 bp, Homo sapiens
  Payload ID: 5516
  Gene Symbol: ERMARD
  Gene Name: ER membrane-associated RNA degradation
  Uniprot ID: Q5T6L9
  ENST ID: ENST00000366773
  CDS Start-End: 34-2070
attcacgcgcgccgcagcggggcaccggaagttatggaggtattaataggggaccctattaccacatgtctttctccctcagtgtatgatataatttgtaatcttgggtttcaactcagagaaaattgtgatatcaatagcattgtaactcagaatggtgaagtatgctggaaaacaatcacagactgtgtgagctacacagagtcagagcagggtctggattactggggaagcgtgaggctgctgggccctgtgtgtgaggctgtccattcacatttcttatctctgaccaaggggcaatttgaaattcgatatgcaccgtggttccagtggacaagttttccagagttatttcctgaaatatttgatgccttggaaagtctacaatctcctgctatttctcttagcttaatgaaactgacatcgtgtctagaacgagccttgggtgatgtatttttactgattgggaaggaatgcccctttcttttaagagatctgctttcatctgaggagcttgctcaagtcttcagtcagtctgtgatgaatgtgctaaaagtcttcgttggctctccgtgtggtctcaacctgcgtaacgtcttatggcatgggtttgcgtcacctgaagaaattcctccaaaatactgttcaatgatgatactgttgacggcaggattgggtcagttactgaagagttaccttcaaaacactaaacttacattggcacatcgctctttcatatctcttacaaacctcgaggatttgattgtttttcctgatgttacttatgaggtgctttcagtattagaagaagtgatgatgaaatctgcttttatattaaaaatcatgttaccatattgggaagttgcactggtcaagttcaagtcacacaggtttgctgactgcgccatattgttgctgacacaactggagactggacttaggaatgtttttgccacacttaacagatgtccaaaaagactcctgactgctgagtcaacagctctttataccacctttgatcaaatattggcaaaacacttgaatgatggtaaaatcaatcagcttcctcttttccttggagagcctgctatggaatttctctgggatttcctgaaccatcaggagggtccccgcataagagatcatttaagccacggggagatcaacttacatgaattttcaaaagaaacaactaatcagttgcttgcattttctcttgtactgctactcagattcgttgatgactgtctgctatcagtttttaaggaaaaatcagccgtagaattgttgattagtcttgcagaaggctatagttctcgctgtcatccggtttttcagcttaaaaaacaggtgctgagctgtgaggagagcatcagggtttgggctctgctgcctttccccgaagaactcactcggcaagccgtcagattagaagataattctgaaacaaatgcctgccactctttgattacaaaaatgacggatgagctgtatcaccatatgcctgagaatcgttgtgtgttaaaggacttggatcgtcttcctactgagacgtggccccagcttctccgtgagctctgcagcacacctgttcccaccctgttctgccccaggattgtgctggaagtgctggttgtgctccgaagcatcagcgaacagtgccgccgtgtgtccagccaggtcaccgttgcctcagagctgagacacaggcagtgggtggaaaggacgctgcggtctcgccagcggcagaactacctgcgtatgtggagtagtatcagactactgtcccctgtgctcagcctgatactgttactcattgcgctggagttggtcaacattcatgctgtttgtgggaagaatgcgcatgagtatcagcagtacctaaagtttgtaaagtcgatcttgcagtacacggagaacctggtggcttacaccagttacgaaaagaacaagtggaatgaaactatcaatcttacacatacagctttgttgaaaatgtggacttttagtgagaagaaacaaatgttaatacatttagccaagaaatccacaagtaaagtactcttatgaaaacttgtaagtcaggatgcttttaattttaacagattttaacagcgtgtaaattaaaaacccaaagacag

SEQ ID NO: 130404 - DNA, 1908 bp, Homo sapiens
  Payload ID: 5516
  Gene Symbol: ERMARD
  Gene Name: ER membrane-associated RNA degradation
  Uniprot ID: Q5T6L9
  ENST ID: ENST00000392095
  CDS Start-End: 243-1901
attcacgcgcgccgcagcggggcaccggaagttatggagagcagggtctggattactggggaagcgtgaggctgctgggccctgtgtgtgaggctgtccattcacatttcttatctctgaccaaggggcaatttgaaattcgatatgcaccgtggttccagtggacaagttttccagagttatttcctgaaatatttgatgccttggaaagtctacaatctcctgctatttctcttagcttaatgaaactgacatcgtgtctagaacgagccttgggtgatgtatttttactgattgggaaggaatgcccctttcttttaagagatctgctttcatctgaggagcttgctcaagtcttcagtcagtctgtgatgaatgtgctaaaagtcttcgttggctctccgtgtggtctcaacctgcgtaacgtcttatggcatgggtttgcgtcacctgaagaaattcctccaaaatactgttcaatgatgatactgttgacggcaggattgggtcagttactgaagagttaccttcaaaacactaaacttacattggcacatcgctctttcatatctcttacaaacctcgaggatttgattgtttttcctgatgttacttatgaggtgctttcagtattagaagaagtgatgatgaaatctgcttttatattaaaaatcatgttaccatattgggaagttgcactggtcaagttcaagtcacacaggtttgctgactgcgccatattgttgctgacacaactggagactggacttaggaatgtttttgccacacttaacagatgtccaaaaagactcctgactgctgagtcaacagctctttataccacctttgatcaaatattggcaaaacacttgaatgatggtaaaatcaatcagcttcctcttttccttggagagcctgctatggaatttctctgggatttcctgaaccatcaggagggtccccgcataagagatcatttaagccacggggagatcaacttacatgaattttcaaaagaaacaactaatcagttgcttgcattttctcttgtactgctactcagattcgttgatgactgtctgctatcagtttttaaggaaaaatcagccgtagaattgttgattagtcttgcagaaggctatagttctcgctgtcatccggtttttcagcttaaaaaacaggtgctgagctgtgaggagagcatcagggtttgggctctgctgcctttccccgaagaactcactcggcaagccgtcagattagaagataattctgaaacaaatgcctgccactctttgattacaaaaatgacggatgagctgtatcaccatatgcctgagaatcgttgtgtgttaaaggacttggatcgtcttcctactgagacgtggccccagcttctccgtgagctctgcagcacacctgttcccaccctgttctgccccaggattgtgctggaagtgctggttgtgctccgaagcatcagcgaacagtgccgccgtgtgtccagccaggtcaccgttgcctcagagctgagacacaggcagtgggtggaaaggacgctgcggtctcgccagcggcagaactacctgcgtatgtggagtagtatcagactactgtcccctgtgctcagcctgatactgttactcattgcgctggagttggtcaacattcatgctgtttgtgggaagaatgcgcatgagtatcagcagtacctaaagtttgtaaagtcgatcttgcagtacacggagaacctggtggcttacaccagttacgaaaagaacaagtggaatgaaactatcaatcttacacatacagctttgttgaaaatgtggacttttagtgagaagaaacaaatgttaatacatttagccaagaaatccacaagtaaagtactcttatgaaaacttg

SEQ ID NO: 130405 - DNA, 1841 bp, Homo sapiens
  Payload ID: 5516
  Gene Symbol: ERMARD
  Gene Name: ER membrane-associated RNA degradation
  Uniprot ID: Q5T6L9
  ENST ID: ENST00000418781
  CDS Start-End: 21-1838
gcagcggggcaccggaagttatggaggtattaataggggaccctattaccacatgtctttctccctcagtgtatgatataatttgtaatcttgggtttcaactcagagaaaattgtgatatcaatagcattgtaactcagaatggtgaagtatgctggaaaacaatcacagactgtgtgagctacacagagtcagagcagggtctggattactggggaagcgtgaggctgctgggccctgtgtgtgaggctgtccattcacatttcttatctctgaccaaggggcaatttgaaattcgatatgcaccgtggttccagtggacaagttttccagagttatttcctgaaatatttgatgccttggaaagtctacaatctcctgctatttctcttagcttaatgaaactgacatcgtgtctagaacgagccttgggtgatgtatttttactgattgggaaggaatgcccctttcttttaagagatctgctttcatctgaggagcttgctcaagtcttcagtcagtctgtgatgaatgtgctaaaagtcttcgttggctctccgtgtggtctcaacctgcgtaacgtcttatggcatgggtttgcgtcacctgaagaaattcctccaaaatactgttcaatgatgatactgttgacggcaggattgggtcagttactgaagagttaccttcaaaacactaaacttacattggcacatcgctctttcatatctcttacaaacctcgaggatttgattgtttttcctgatgttacttatgaggtgctttcagtattagaagaagtgatgatgaaatctgcttttatattaaaaatcatgttaccatattgggaagttgcactggtcaagttcaagtcacacaggtttgctgactgcgccatattgttgctgacacaactggagactggacttaggaatgtttttgccacacttaacagatgtccaaaaagactcctgactgctgagtcaacagctctttataccacctttgatcaaatattggcaaaacacttgaatgatggtaaaatcaatcagcttcctcttttccttggagagcctgctatggaatttctctgggatttcctgaaccatcaggagggtccccgcataagagatcatttaagccacggggagatcaacttacatgaattttcaaaagaaacaactaatcagttgcttgcattttctcttgtactgctactcagattcgttgatgactgtctgctatcagtttttaaggaaaaatcagccgtagaattgttgattagtcttgcagaaggctatagttctcgctgtcatccggtttttcagcttaaaaaacaggtgctgagctgtgaggagagcatcagggtttgggctctgctgcctttccccgaagaactcactcggcaagccgtcagattagaagataattctgaaacaaatgcctgccactctttgattacaaaaatgacggatgagctgtatcaccatatgcctgagaatcgttgtgtgttaaaggacttggatcgtcttcctactgagactatcagactactgtcccctgtgctcagcctgatactgttactcattgcgctggagttggtcaacattcatgctgtttgtgggaagaatgcgcatgagtatcagcagtacctaaagtttgtaaagtcgatcttgcagtacacggagaacctggtggcttacaccagttacgaaaagaacaagtggaatgaaactatcaatcttacacatacagctttgttgaaaatgtggacttttagtgagaagaaacaaatgttaatacatttagccaagaaatccacaagtaaagtactcttatgaaaa

SEQ ID NO: 130406 - DNA, 504 bp, Homo sapiens
  Payload ID: 5516
  Gene Symbol: ERMARD
  Gene Name: ER membrane-associated RNA degradation
  ENST ID: ENST00000590017
  CDS Start-End: 1-139
agtgtatgatataatttgtaatcttgggtttcaactcagagaaaattgtgatatcaatagcattgtaactcagaatggtgaagtatgctggaaaacaatcacagactgtgtgagctacacagagtcagttatttcctgaaatatttgatgccttggaaagtctacaatctcctgctatttctcttagcttaatgaaactgacatcgtgtctagaacgagccttgggtgatgtatttttactgattgggaaggaatgcccctttcttttaagagatctgctttcatctgaggagcttgctcaagtcttcagtcagtctgtgatgaatgtgctaaaagtcttcgttggctctccgtgtggtctcaacctgcgtaacgtcttatggcatgggtttgcgtcacctgaagaaattcctccaaaatactgttcaatgatgatactgttgacggcaggattgggtcagttactgaagagttaccttcaaaacactaaacttacattggcac

SEQ ID NO: 130407 - DNA, 556 bp, Homo sapiens
  Payload ID: 5516
  Gene Symbol: ERMARD
  Gene Name: ER membrane-associated RNA degradation
  ENST ID: ENST00000590711
  CDS Start-End: 335-556
gtcattcacgcgcgccgcagcggggcaccggaagttatggagagaaaattgtgatatcaatagcattgtaactcagaatggtgaagtatgctggaaaacaatcacagactgtgtgagctacacagagtcagagcagggtctggattactggggaagcgtgaggctgctgggccctgtgtgtgaggctgtccattcacatttcttatctctgaccaaggggcaatttgaaattcgatatgcaccgtggttccagtggacaagttttccagagttatttcctgaaatatttgatgccttggaaagtctacaatctcctgctatttctcttagcttaatgaaactgacatcgtgtctagaacgagccttgggtgatgtatttttactgattgggaaggaatgcccctttcttttaagagatctgctttcatctgaggagcttgctcaagtcttcagtcagtctgtgatgaatgtgctaaaagtcttcgttggctctccgtgtggtctcaacctgcgtaacgtcttatggcatgggtttgcgtcacctgaagaaattcct

SEQ ID NO: 130408 - DNA, 552 bp, Homo sapiens
  Payload ID: 5516
  Gene Symbol: ERMARD
  Gene Name: ER membrane-associated RNA degradation
  ENST ID: ENST00000592745
  CDS Start-End: 468-552
attcacgcgcgccgcagcggggcaccggaagttatggagaggcatgttttgggatgacattgtggttttcttcaacaccgtttaggtagtcagaggtattaataggggaccctattaccacatgtctttctccctcagtgtatgatataatttgtaatcttgggtttcaactcagagaaaattgtgatatcaatagcattgtaactcagaatggtgaagtatgctggaaaacaatcacagactgtgtgagctacacagagtcagagcagggtctggattactggggaagcgtgaggctgctgggccctgtgtgtgaggctgtccattcacatttcttatctctgaccaaggggcaatttgaaattcgatatgcaccgtggttccagtggacaagttttccagagttatttcctgaaatatttgatgccttggaaagtctacaatctcctgctatttctcttagcttaatgaaactgacatcgtgtctagaacgagccttgggtgatgtatttttactgattgggaaggaatgcccctttcttttaagagatc

SEQ ID NO: 130409 - DNA, 552 bp, Homo sapiens
  Payload ID: 5516
  Gene Symbol: ERMARD
  Gene Name: ER membrane-associated RNA degradation
  ENST ID: ENST00000592315
  CDS Start-End: 34-255
attcacgcgcgccgcagcggggcaccggaagttatggaggtattaataggggaccctattaccacatgtctttctccctcagtgtatgatataatttgtaatcttgggtttcaactcagagaaaattgtgatatcaatagcattgtaactcagaatggtgaagtatgctggaaaacaatcacagactgtgtgagctacacagagtcagggtctggattactggggaagcgtgaggctgctgggccctgtgtgtgaggctgtccattcacatttcttatctctgaccaaggggcaatttgaaattcgatatgcaccgtggttccagtggacaagttttccagagttatttcctgaaatatttgatgccttggaaagtctacaatctcctgctatttctcttagcttaatgaaactgacatcgtgtctagaacgagccttgggtgatgtatttttactgattgggaaggaatgcccctttcttttaagagatctgctttcatctgaggagcttgctcaagtcttcagtcagtctgtgatgaatgtgctaaaagt

SEQ ID NO: 130410 - DNA, 547 bp, Homo sapiens
  Payload ID: 5516
  Gene Symbol: ERMARD
  Gene Name: ER membrane-associated RNA degradation
  ENST ID: ENST00000588437
  CDS Start-End: 533-547
accggaagttatggagaactgtagatttgcagagaagtgacaggacacaggagagcagttttaggcttcaaagggcaggaaattgggaaggtagatacatattcggaaactaatggagtaagaattgtttgcagattcccctggtaccttaactggtctggtattaataggggaccctattaccacatgtctttctccctcagtgtatgatataatttgtaatcttgggtttcaactcagagaaaattgtgatatcaatagcattgtaactcagaatggtgaagtatgctggaaaacaatcacagactgtgtgagctacacagagtcagagcagggtctggattactggggaagcgtgaggctgctgggccctgtgtgtgaggctgtccattcacatttcttatctctgaccaaggggcaatttgaaattcgatatgcaccgtggttccagtggacaagttttccagagttatttcctgaaatatttgatgccttggaaagtctacaatctcctgctatttctcttagcttaatgaaactgacatcg

SEQ ID NO: 130411 - DNA, 543 bp, Homo sapiens
  Payload ID: 5516
  Gene Symbol: ERMARD
  Gene Name: ER membrane-associated RNA degradation
  ENST ID: ENST00000586341
  CDS Start-End: 21-543
gcagcggggcaccggaagttatggaggtattaataggggaccctattaccacatgtctttctccctcagtgtatgatataatttgtaatcttgggtttcaactcagagaaaattgtgatatcaatagcattgtaactcagaatggtgaagtatgctggaaaacaatcacagactgtgtgagctacacagagtcagagcagggtctggattactggggaagcgtgaggctgctgggccctgtgtgtgaggctgtccattcacatttcttatctctgaccaaggggcaatttgaaattcgatatgcaccgtggttccagtggacaagttttccagaggtatttttactgattgggaaggaatgcccctttcttttaagagatctgctttcatctgaggagcttgctcaagtcttcagtcagtctgtgatgaatgtgctaaaagtcttcgttggctctccgtgtggtctcaacctgcgtaacgtcttatggcatgggtttgcgtcacctgaagaaattcctccaaaatactgttcaatgatgatac

SEQ ID NO: 130412 - DNA, 2146 bp, Homo sapiens
  Payload ID: 5516
  Gene Symbol: ERMARD
  Gene Name: ER membrane-associated RNA degradation
  ENST ID: ENST00000588451
  CDS Start-End: 514-2142
gctggcgacgtcgcggccctggcctctgtggcggtatcggacgctcggccctgcaagacgcctggcgggccctgccggcctccctgggccaggctcggtttctccgtcgcctcctggccctgagctggaacgcggcggacggtattaataggggaccctattaccacatgtctttctccctcagtgtatgatataatttgtaatcttgggtttcaactcagagaaaattgtgatatcaatagcattgtaactcagaatggtgaagtatgctggaaaacaatcacagactgtgtgagctacacagagtcagagcagggtctggattactggggaagcgtgaggctgctgggccctgtgtgtgaggctgtccattcacatttcttatctctgaccaaggggcaatttgaaattcgatatgcaccgtggttccagtggacaagttttccagagttatttcctgaaatatttgatgccttggaaagtctacaatctcctgctatttctcttagcttaatgaaactgacatcgtgtctagaacgagccttgggtgatgtatttttactgattgggaaggaatgcccctttcttttaagagatctgctttcatctgaggagcttgctcaagtcttcagtcagtctgtgatgaatgtgctaaaagtcttcgttggctctccgtgtggtctcaacctgcgtaacgtcttatggcatgggtttgcgtcacctgaagaaattcctccaaaatactgttcaatgatgatactgttgacggcaggattgggtcagttactgaagagttaccttcaaaacactaaacttacattggcacatcgctctttcatatctcttacaaacctcgaggatttgattgtttttcctgatgttacttatgaggtgctttcagtattagaagaagtgatgatgaaatctgcttttatattaaaaatcatgttaccatattgggaagttgcactggtcaagttcaagtcacacaggtttgctgactgcgccatattgttgctgacacaactggagactggacttaggaatgtttttgccacacttaacagatgtccaaaaagactcctgactgctgagatattggcaaaacacttgaatgatggtaaaatcaatcagcttcctcttttccttggagagcctgctatggaatttctctgggatttcctgaaccatcaggagggtccccgcataagagatcatttaagccacggggagatcaacttacatgaattttcaaaagaaacaactaatcagttgcttgcattttctcttgtactgctactcagattcgttgatgactgtctgctatcagtttttaaggaaaaatcagccgtagaattgttgattagtcttgcagaaggctatagttctcgctgtcatccggtttttcagcttaaaaaacaggtgctgagctgtgaggagagcatcagggtttgggctctgctgcctttccccgaagaactcactcggcaagccgtcagattagaagataattctgaaacaaatgcctgccactctttgattacaaaaatgacggatgagctgtatcaccatatgcctgagaatcgttgtgtgttaaaggacttggatcgtcttcctactgagacgtggccccagcttctccgtgagctctgcagcacacctgttcccaccctgttctgccccaggattgtgctggaagtgctggttgtgctccgaagcatcagcgaacagtgccgccgtgtgtccagccaggtcaccgttgcctcagagctgagacacaggcagtgggtggaaaggacgctgcggtctcgccagcggcagaactacctgcgtatgtggagtagtatcagactactgtcccctgtgctcagcctgatactgttactcattgcgctggagttggtcaacattcatgctgtttgtgggaagaatgcgcatgagtatcagcagtacctaaagtttgtaaagtcgatcttgcagtacacggagaacctggtggcttacaccagttacgaaaagaacaagtggaatgaaactatcaatcttacacatacagctttgttgaaaatgtggacttttagtgagaagaaacaaatgttaatacatttagccaagaaatccacaagtaaagtactcttatgaaaac

SEQ ID NO: 130413 - DNA, 551 bp, Homo sapiens
  Payload ID: 5516
  Gene Symbol: ERMARD
  Gene Name: ER membrane-associated RNA degradation
  ENST ID: ENST00000592367
  CDS Start-End: 496-551
gtcattcacgcgcgccgcagcggggcaccggaagttatggagctcaaatttgttgttgtttttatatcgaagaggcatgttttgggatgacattgtggttttcttcaacaccgtttaggtagtcagaggtattaataggggaccctattaccacatgtctttctccctcagtgtatgatataatttgtaatcttgggtttcaactcagagaaaattgtgatatcaatagcattgtaactcagaatggtgaagtatgctggaaaacaatcacagactgtgtgagctacacagagtcagggtctggattactggggaagcgtgaggctgctgggccctgtgtgtgaggctgtccattcacatttcttatctctgaccaaggggcaatttgaaattcgatatgcaccgtggttccagtggacaagttttccagagttatttcctgaaatatttgatgccttggaaagtctacaatctcctgctatttctcttagcttaatgaaactgacatcgtgtctagaacgagccttgggtgatgtatttttactgattgg

SEQ ID NO: 130414 - DNA, 1908 bp, Homo sapiens; identical to SEQ ID NO: 130404
  Payload ID: 5516
  Gene Symbol: ERMARD
  Gene Name: ER membrane-associated RNA degradation
  Uniprot ID: Q5T6L9
  ENST ID: ENST00000615090
  CDS Start-End: 243-1901

SEQ ID NO: 130415 - DNA, 2003 bp, Homo sapiens; identical to SEQ ID NO: 130402
  Payload ID: 5516
  Gene Symbol: ERMARD
  Gene Name: ER membrane-associated RNA degradation
  Uniprot ID: Q5T6L9
  ENST ID: ENST00000621205
  CDS Start-End: 37-1932

SEQ ID NO: 130416 - DNA, 1841 bp, Homo sapiens; identical to SEQ ID NO: 130405
  Payload ID: 5516
  Gene Symbol: ERMARD
  Gene Name: ER membrane-associated RNA degradation
  Uniprot ID: Q5T6L9
  ENST ID: ENST00000611694
  CDS Start-End: 21-1838

SEQ ID NO: 130417 - DNA, 2141 bp, Homo sapiens; identical to SEQ ID NO: 130403
  Payload ID: 5516
  Gene Symbol: ERMARD
  Gene Name: ER membrane-associated RNA degradation
  Uniprot ID: Q5T6L9
  ENST ID: ENST00000616801
  CDS Start-End: 34-2070

SEQ ID NO: 130418 - DNA, 552 bp, Homo sapiens; identical to SEQ ID NO: 130408
  Payload ID: 5516
  Gene Symbol: ERMARD
  Gene Name: ER membrane-associated RNA degradation
  ENST ID: ENST00000629254
  CDS Start-End: 468-552

SEQ ID NO: 130419 - DNA, 552 bp, Homo sapiens; identical to SEQ ID NO: 130409
  Payload ID: 5516
  Gene Symbol: ERMARD
  Gene Name: ER membrane-associated RNA degradation
  ENST ID: ENST00000629523
  CDS Start-End: 34-255

SEQ ID NO: 130420 - DNA, 2146 bp, Homo sapiens; identical to SEQ ID NO: 130412
  Payload ID: 5516
  Gene Symbol: ERMARD
  Gene Name: ER membrane-associated RNA degradation
  ENST ID: ENST00000630950
  CDS Start-End: 514-2142

SEQ ID NO: 130421 - DNA, 543 bp, Homo sapiens; identical to SEQ ID NO: 130411
  Payload ID: 5516
  Gene Symbol: ERMARD
  Gene Name: ER membrane-associated RNA degradation
  ENST ID: ENST00000628674
  CDS Start-End: 21-543

SEQ ID NO: 130422 - DNA, 547 bp, Homo sapiens; identical to SEQ ID NO: 130410
  Payload ID: 5516
  Gene Symbol: ERMARD
  Gene Name: ER membrane-associated RNA degradation
  ENST ID: ENST00000625212
  CDS Start-End: 533-547

SEQ ID NO: 130423 - DNA, 556 bp, Homo sapiens; identical to SEQ ID NO: 130407
  Payload ID: 5516
  Gene Symbol: ERMARD
  Gene Name: ER membrane-associated RNA degradation
  ENST ID: ENST00000628241
  CDS Start-End: 335-556

SEQ ID NO: 130424 - DNA, 504 bp, Homo sapiens; identical to SEQ ID NO: 130406
  Payload ID: 5516
  Gene Symbol: ERMARD
  Gene Name: ER membrane-associated RNA degradation
  ENST ID: ENST00000631324
  CDS Start-End: 1-139

SEQ ID NO: 130425 - DNA, 551 bp, Homo sapiens; identical to SEQ ID NO: 130413
  Payload ID: 5516
  Gene Symbol: ERMARD
  Gene Name: ER membrane-associated RNA degradation
  ENST ID: ENST00000627446
  CDS Start-End: 496-551

SEQ ID NO: 130426 - DNA, 1925 bp, Homo sapiens
  Payload ID: 5517
  Gene Symbol: ERAL1
  Gene Name: Era-like 12S mitochondrial rRNA chaperone 1
  Uniprot ID: O75616
  ENST ID: ENST00000254928
  CDS Start-End: 98-1411
gggcagacctacctctctcctactcgctggttcgtcagccgctctgttcaatcgtaggagcgctcctggtcggttcccgcagtgccttgcggctgtaatggctgcccccagctggcgcggggctaggcttgttcaatcggtgttaagagtctggcaggtgggccctcatgtcgcgagggagcgggtgatccctttttcctcactcttaggcttccaacggaggtgcgtgtcctgcgtcgcggggtccgctttctctggtccccgcttggcctcggcttctcgcagtaatggccagggctctgccctggaccacttcctcggattctctcagcccgacagttcggtgactccttgcgtccccgcggtgtccatgaacagagatgagcaggatgtcctcttggtccatcaccctgatatgcctgagaattcccgggtcctacgagtggtcctcctgggagccccgaatgcagggaagtcaacactctccaaccagctactgggccgaaaggtgttccctgtttccaggaaggtgcatactactcgctgccaagctctgggggtcatcacagagaaggagacccaggtgattctacttgacacacctggcattatcagtcctggtaaacagaagaggcatcacctggagctctctttgttggaagatccatggaagagcatggaatctgctgatcttgttgtggttcttgtggatgtctcagacaagtggacacggaaccagctcagcccccagttgctcaggtgcttgaccaagtactcccagatccctagtgtcctggtcatgaacaaggtagattgtttgaagcagaagtcagttctcctggagctcacggcagccctcactgaaggtgtggtcaatggcaaaaagctcaagatgaggcaggccttccactcacaccctggcacccattgccccagcccagcagttaaggacccaaacacacaatctgtgggaaatcctcagaggattggctggccccacttcaaggagatcttcatgttgtcagccctaagccaggaggacgtgaaaacactaaagcaataccttctgacacaggcccagccagggccctgggagtaccacagtgcagtcctcactagccagacaccagaagagatctgtgccaacattatccgagagaagctcctagaacacctgccccaggaggtgccttacaatgtacagcagaagacagcagtgtgggaggaaggaccaggtggggagctggttatccaacagaagcttctggtgcccaaagaatcttatgtgaaactcctgattggtccgaagggccacgtgatctcccagatagcacaggaggcaggccatgacctcatggacatcttcctctgcgatgttgacatccgcctctctgtgaagctcctcaagtgaccaccctctactgaccctcccagggcattccagctcaagctgctggcaggaactgaccagttctgtccttggctggggaccctccaggcactggtgagagacatgaacactgactggccactagctggcctggccctgttgagtctgcacagtccctgcccagctgtgtcttctgttggaagaaggaacctgccttagctcagtttccaggtggttcctctgcctggcaccacagctacaaaggtgtagctaagaagatggcccattggtgggagcaatgtcaccctgcctccagctagctatgggcccagagtttctccctgagtcgctgttgctagcagggagatttctcttcctgccctcacttctttcaccttgaacttggataagaactcgtgtctcctgagtgaggtagcgcctcccatctgctccccaattcttgatctctcccaccccatccctctccccagtcttggatactaataaaatataagcattctggttctcatcttta

SEQ ID NO: 130427 - DNA, 1039 bp, Homo sapiens
  Payload ID: 5517
  Gene Symbol: ERAL1
  Gene Name: Era-like 12S mitochondrial rRNA chaperone 1
  ENST ID: ENST00000412138
  CDS Start-End: 26-541
gttcccgcagtgccttgcggctgtaatggctgcccccagctggcgcggggctaggcttgttcaatcggtgttaagagtctggcaggtgggccctcatgtcgcgagggagcgggtgatccctttttcctcactcttaggcttccaacggaggtgcgtgtcctgcgtcgcggggtccgctttctctggtccccgcttggcctcggcttctcgcagtaatggccagggctctgccctggaccacttcctcggattctctcagcccgacagttcggtgactccttgcgtccccgcggtgtccatgaacagagatgagcaggatgtcctcttggtccatcaccctgatatgcctgagaattcccgggtcctacgagtggtcctcctgggagccccgaatgcagggaagtcaacactctccaaccagctactgggccgaaaggtgttccctgtttccaggaaggtgcatactactcgctgccaagctctgggggtcatcacagagaaggagacccaggtggtgggtacctacaaagggagtccttgaaacaggacagagggtgaagctaagagggtctcccttaccatcagccttgaagaaaatgatggtcacattcatttatattctacttgacacacctggcattatcagtcctggtaaacagaagaggcatcacctggagctctctttgttggaagatccatggaagagcatggaatctgctgatcttgttgtggttcttgtggatgtctcagacaagtggacacggaaccagctcagcccccagttgctcaggtgcttgaccaagtactcccagatccctagtgtcctggtcatgaacaaggtagattgtttgaagcagaagtcagttctcctggagctcacggcagccctcactgaaggtgtggtcaatggcaaaaagctcaagatgaggcaggccttccactcacaccctggcacccattgccccagcccagcagttaaggacccaaacacacaatctgtgggaaatcctcagaggattggctggccccacttcaagga

SEQ ID NO: 130428 - DNA, 850 bp, Homo sapiens
  Payload ID: 5517
  Gene Symbol: ERAL1
  Gene Name: Era-like 12S mitochondrial rRNA chaperone 1
  ENST ID: ENST00000580917
  CDS Start-End: 1-850
cagctggcgcggggctaggcttgttcaatcggtgttaagagtctggcaggtgggccctcatgtcgcgagggagcgggtgatccctttttcctcactcttaggcttccaacggaggtgcgtgtcctgcgtcgcggggtccgctttctctggtccccgcttggcctcggcttctcgcagtaatggccagggctctgccctggaccacttcctcggattctctcagcccgacagttcggtgactccttgcgtccccgcggtgtccatgaacagagatgagcaggatgtcctcttggtccatcaccctgatatgcctgagaattcccgggtcctacgagtggtcctcctgggagccccgaatgcagggaagtcaacactctccaaccagctactgggccgaaaggtgttccctgtttccaggaaggtgcatactactcgctgccaagctctgggggtcatcacagagaaggagacccaggtgattctacttgacacacctggcattatcagtcctggtaaacagaagaggcatcacctggagctctctttgttggaagatccatggaagagcatggaatctgctgatcttgttgtggttcttgtggatgtctcagacaagtggacacggaaccagctcagcccccagttgctcaggtgcttgaccaagtactcccagatccctagtgtcctggtcatgaacaagcaataccttctgacacaggcccagccagggccctgggagtaccacagtgcagtcctcactagccagacaccagaagagatctgtgccaacattatccgagagaagctcctagaacacctgccccaggaggtgccttacaatgtacagcag

SEQ ID NO: 130429 - DNA, 1628 bp, Homo sapiens
  Payload ID: 5517
  Gene Symbol: ERAL1
  Gene Name: Era-like 12S mitochondrial rRNA chaperone 1
  ENST ID: ENST00000461894
  CDS Start-End: 1-830
tggctgcccccagctggcgcggggctaggcttgttcaatcggtgttaagagtctggcaggtgggccctcatgtcgcgagggagcgggtgatccctttttcctcactcttaggcttccaacggaggtgcgtgtcctgcgtcgcggggtccgctttctctggtccccgcttggcctcggcttctcgcagtaatggccagggctctgccctggaccacttcctcggattctctcagcccgacagttcggtgactccttgcgtccccgcggtgtccatgaacagagatgagcaggatgtcctcttggtccatcaccctgatatgcctgagaattcccgggtcctacgagtggtcctcctgggagccccgaatgcagggaagtcaacactctccaaccagctactgggccgaaaggtgttccctgtttccaggaaggtgcatactactcgctgccaagctctgggggtcatcacagagaaggagacccaggtgattctacttgacacacctggcattatcagtcctggtaaacagaagaggcatcacctggagctctctttgttggaagatccatggaagagcatggaatctgctgatcttgttgtggttcttgtggatgtctcagacaagtggacacggaaccagctcagcccccagttgctcaggtgcttgaccaagtactcccagatccctagtgtcctggtcatgaacaaggtagattgtttgaagcagaagtcagttctcctggagctcacggcagccctcactgaagcaataccttctgacacaggcccagccagggccctgggagtaccacagtgcagtcctcactagccagacaccagaagagatctgtgccaacattatccgagagaagctcctagaacacctgccccaggaggtgccttacaatgtacagcagaagacagcagtgtgggaggaaggaccaggtggggagctggttatccaacagaagcttctggtgcccaaagaatcttatgtgaaactcctgattggtccgaagggccacgtgatctcccagatagcacaggaggcaggccatgacctcatggacatcttcctctgcgatgttgacatccgcctctctgtgaagctcctcaagtgaccaccctctactgaccctcccagggcattccagctcaagctgctggcaggaactgaccagttctgtccttggctggggaccctccaggcactggtgagagacatgaacactgactggccactagctggcctggccctgttgagtctgcacagtccctgcccagctgtgtcttctgttggaagaaggaacctgccttagctcagtttccaggtggttcctctgcctggcaccacagctacaaaggtgtagctaagaagatggcccattggtgggagcaatgtcaccctgcctccagctagctatgggcccagagtttctccctgagtcgctgttgctagcagggagatttctcttcctgccctcacttctttcaccttgaacttggataagaactcgtgtctcctgagtgaggtagcgcctcccatctgctccccaattcttgatctctcccaccccatccctctccccagtcttggatactaataaaatataagcattctggttct

SEQ ID NO: 130430 - DNA, 695 bp, Homo sapiens
  Payload ID: 5517
  Gene Symbol: ERAL1
  Gene Name: Era-like 12S mitochondrial rRNA chaperone 1
  ENST ID: ENST00000583487
  CDS Start-End: 1-243
cagccagggccctgggagtaccacagtgcagtcctcactagccagacaccagaagagatctgtgccaacattatccgagagaagctcctagaacacctgccccaggaggtgccttacaatgtacagcagaagacagcagtgtgggaggaaggaccaggtggggagctggttatccaacagaagcttctggtgcccaaagaatcttatgtgggcattccagctcaagctgctggcaggaactgaccagttctgtccttggctggggaccctccaggcactggtgagagacatgaacactgactggccactagctggcctggccctgttgagtctgcacagtccctgcccagctgtgtcttctgttggaagaaggaacctgccttagctcagtttccaggtggttcctctgcctggcaccacagctacaaaggtgtagctaagaagatggcccattggtgggagcaatgtcaccctgcctccagctagctatgggcccagagtttctccctgagtcgctgttgctagcagggagatttctcttcctgccctcacttctttcaccttgaacttggataagaactcgtgtctcctgagtgaggtagcgcctcccatctgctccccaattcttgatctctcccaccccatccctctccccagtcttggatactaataaaatataagcattctggttctca

SEQ ID NO: 130431 - DNA, 3104 bp, Homo sapiens
  Payload ID: 5518
  Gene Symbol: ERRFI1
  Gene Name: ERBB receptor feedback inhibitor 1
  Uniprot ID: Q9UJM3
  ENST ID: ENST00000377482
  CDS Start-End: 225-1613
acggcggtccggtgcgaggcagagtgctagcgggagcgcgagccagcaagaggcgcctgcgcgatgtccgggcccctgagcccgcggcgctgagccagccgggacggacatgcgcgggagggcgccgcggggcagccgccgctcctccgggggaatgaaagctactggttgattttaaagtgcctgggcctcacaggtttggagatgtcccagaataaggcacaatgtcaatagcaggagttgctgctcaggagatcagagtcccattaaaaactggatttctacataatggccgagccatggggaatatgaggaagacctactggagcagtcgcagtgagtttaaaaacaactttttaaatattgacccgataaccatggcctacagtctgaactcttctgctcaggagcgcctaataccacttgggcatgcttccaaatctgctccgatgaatggccactgctttgcagaaaatggtccatctcaaaagtccagcttgccccctcttcttattcccccaagtgaaaacttgggaccacatgaagaggatcaagttgtatgtggttttaagaaactcacagtgaatggggtttgtgcttccacccctccactgacacccataaaaaactccccttcccttttcccctgtgcccctctttgtgaacggggttctaggcctcttccaccgttgccaatctctgaagccctctctctggatgacacagactgtgaggtggaattcctaactagctcagatacagacttccttttagaagactctacactttctgatttcaaatatgatgttcctggcaggcgaagcttccgtgggtgtggacaaatcaactatgcatattttgataccccagctgtttctgcagcagatctcagctatgtgtctgaccaaaatggaggtgtcccagatccaaatcctcctccacctcagacccaccgaagattaagaaggtctcattcgggaccagctggctcctttaacaagccagccataaggatatccaactgttgtatacacagagcttctcctaactccgatgaagacaaacctgaggttccccccagagttcccatacctcctagaccagtaaagccagattatagaagatggtcagcagaagttacttcgagcacctatagtgatgaagacaggcctcccaaagtaccgccaagagaacctttgtcaccgagtaactcgcgcacaccgagtcccaaaagccttccgtcttacctcaatggggtcatgcccccgacacagagctttgcccctgatcccaagtatgtcagcagcaaagcactgcaaagacagaacagcgaaggatctgccagtaaggttccttgcattctgcccattattgaaaatgggaagaaggttagttcaacacattattacctactacctgaacgaccaccatacctggacaaatatgaaaaattttttagggaagcagaagaaacaaatggaggcgcccaaatccagccattacctgctgactgcggtatatcttcagccacagaaaagccagactcaaaaacaaaaatggatctgggtggccacgtgaagcgtaaacatttatcctatgtggtttctccttagaccttggggtcatggttcagcagaggttacataggagcaaatggttctcaattttccagtttgattgaagtgcagagaaaaatcccttagattgcaaaataaaatagttgaactctctgtcttcatgtggaaggtttagagcagttgtgagatgctgttatgctgagaaaccctgactttgttagtgttggaaaaaagtcttacaagtctataatttaaagatgtgatggtggggaggggaggatggggaagctttttatatatgcatacattacatacctatatataaacttgtggtataaccatagaccatagctgcaggttaaccaattagttactatcgtagagtaatatatattcagaataataaactcaagctggagaaatgagtcctgatagactgaaaattgagcaaatggaagaagatacagtattgtttagatcagaatcattaaaaaatatttttgtttagtaagtttgaagatttctggcttttaggccttttctattttgttccatttatttttgcaggcaatcttttccatggagggcagggtatccattctttaccatgggtgtacctgcttaggttaaaaatcataccaaggcctcatacttccaggtttcatgttgcgtcttgttgagggagggagagcaggttacttggcaaccatattgtcacctgtacctgtcacacatcttgaaaaataaaacgataatagaactagtgactaattttcccttacagttcctgcttggtcccacccactgaagtagctcatcgtagtgcgggccgtattagaggcagtggggtacgttagactcagatggaaaagtattctaggtgccagtgttaggatgtcagttttacaaaataatgaagcaattagctatgtgattgagagttattgtttggggatgtgtgttgtggttttgctttttttttttagactgtattaataaacatacaacacaagctggccttgtgttgctggttcctattcagtatttcctggggattgtttgctttttaagtaaaacacttctgacccatagctcagtatgtctgaattccagaggtcacatcagcatctttctgctttgaaaactctcacagctgtggctgcttcacttagatgcagtgagacacatagttggtgttccgattttcacatccttccatgtatttatcttgaagagataagcacagaagagaaggtgctcactaacagaggtacattactgcaatgttctcttaacagttaaacaagctgtttacagtttaaactgctgaatattatttgagctatttaaagcttattatattttagtatgaactaaatgaaggttaaaacatgcttaagaaaaatgcactgatttctgcattatgtgtacagtattggacaaaggattttattcattttgttgcattattttgaatattgtcttttcattttaataaagttataatacttatttatgataccatta

SEQ ID NO: 130432 - DNA, 2097 bp, Homo sapiens
  Payload ID: 5518
  Gene Symbol: ERRFI1
  Gene Name: ERBB receptor feedback inhibitor 1
  ENST ID: ENST00000467067
  CDS Start-End: 15-254
cagaataaggcacaatgtcaatagcaggagttgctgctcaggagatcagagtcccattaaaaactggatttctacataatggccgagccatggggaatatgaggaagacctactggagcagtcgcagtgagtttaaaaacaactttttaaatattgacccgataaccatggcctacagtctgaactcttctgctcaggagcgcctaataccacttggtatgtattctgaaaatctgatcacagtaagcatttgagaagaacagtctggattcgggttagcttgtcctccagcattattttttaaatgaggaaacctgaactatttccaacaacagcctgacccctagtggcaacagattcagaagataactgtgtttttctcaagctattgtactcgactgccttcattctgagtcactgattgctaagtaggactgttcatggacgtgggatcttctaaaatcaagaattagttctcattccagctctgatgcatactttacttcatgaaaccttaggcgagatttcccacctttcttactagtatcgaatgcatgtttgacagtaatagatgaaaatagtataaatgttcctcaaaacttaaaaaatagtatttttaatgtgaatattctgttccttggatctttgtcaagagctgtgtgtgaactgaacacattgcaggcaagtccattcactcacaatattatgatgtgccagcaataaggactttgtcttatctcattggtaccctacgtgcctagtatggtcgcatgtcttaaatggcaaggctggtacagtatggtattcatgtaaattatatgctattcatcttccgcgaattttacacacgtcacaaaacttgcctgtgatgtgtgggtgtgcgctgtgcacatgtccaagggagatagaggagatagtttgttctttgaaccacaccatgtgcgttaagaatcttctgctctctaattacacctgtggtggttgcatgggtgttctcggggtgacagcagtcaagtgtttcactcaggaagaaagctgtggaagcataggtagctggggtgctctctccctcacacaggtggagagaggattgttgatcttttattaatatctctcgttcattccagggcatgcttccaaatctgctccgatgaatggccactgctttgcagaaaatggtccatctcaaaagtccagcttgccccctcttcttattcccccaagtgaaaacttgggaccacatgaagaggatcaagttgtatgtggttttaagaaactcacagtgaatggggtttgtgcttccacccctccactgacacccataaaaaactccccttcccttttcccctgtgcccctctttgtgaacggggttctaggcctcttccaccgttgccaatctctgaagccctctctctggatgacacagactgtgaggtggaattcctaactagctcagatacagacttccttttagaagactctacactttctgatttcaaatatgatgttcctggcaggcgaagcttccgtgggtgtggacaaatcaactatgcatattttgataccccagctgtttctgcagcagatctcagctatgtgtctgaccaaaatggaggtgtcccagatccaaatcctcctccacctcagacccaccgaagattaagaaggtctcattcgggaccagctggctcctttaacaagccagccataaggatatccaactgttgtatacacagagcttctcctaactccgatgaagacaaacctgaggttccccccagagttcccatacctcctagaccagtaaagccagattatagaagatggtcagcagaagttacttcgagcacctatagtgatgaagacaggcctcccaaagtaccgccaagagaacctttgtcaccgagtaactcgcgcacaccgagtcccaaaagccttccgtcttacctcaatggggtcatgcccccgacacagagctttgcccctgatcccaagtatgtcagcagcaaagcactgcaaagacagaacagcgaaggatctgccagtaaggttccttgcattctgcccattattgaaaatgggaagaaggttagttc

SEQ ID NO: 130433 - DNA, 995 bp, Homo sapiens
  Payload ID: 5518
  Gene Symbol: ERRFI1
  Gene Name:: ERBB receptor feedback inhibitor 1
  ENST ID: ENST00000469499
  CDS Start-End: 213-437
tgcgaggcagagtgctagcgggagcgcgagccagcaagaggcgcctgcgcgatgtccgggcccctgagcccgcggcgctgagccagccgggacggacatgcgcgggagggcgccgcggggcagccgccgctcctccgggggaatgaaagctactggttgattttaaagtgcctgggcctcacaggtttggagatgtcccagaataaggcacaatgtcaatagcaggagttgctgctcaggagatcagagtcccattaaaaactggatttctacataatggccgagccatggggaatatgaggaagacctactggagcagtcgcagtgagtttaaaaaggcatgcttccaaatctgctccgatgaatggccactgctttgcagaaaatggtccatctcaaaagtccagcttgccccctcttcttattcccccaagtgaaaacttgggaccacatgaagaggatcaagttgtatgtggttttaagaaactcacagtgaatggggtttgtgcttccacccctccactgacacccataaaaaactccccttcccttttcccctgtgcccctctttgtgaacggggttctaggcctcttccaccgttgccaatctctgaagccctctctctggatgacacagactgtgaggtggaattcctaactagctcagatacagacttccttttagaagactctacactttctgatttcaaatatgatgttcctggcaggcgaagcttccgtgggtgtggacaaatcaactatgcatattttgataccccagctgtttctgcagcagatctcagctatgtgtctgaccaaaatggaggtgtcccagatccaaatcctcctccacctcagacccaccgaagattaagaaggtctcattcgggaccagctggctcctttaacaagccagccataaggatatccaactgttgtatacacagagcttctcctaactccgatgaagacaaacctgaggttccccccagagt

SEQ ID NO: 130434 - DNA, 479 bp, Homo sapiens
  Payload ID: 5518
  Gene Symbol: ERRFI1
  Gene Name: ERBB receptor feedback inhibitor 1
  ENST ID: ENST00000474874
  CDS Start-End: 200-361
gctagcgggagcgcgagccagcaagaggcgcctgcgcgatgtccgggcccctgagcccgcggcgctgagccagccgggacggacatgcgcgggagggcgccgcggggcagccgccgctcctccgggggaatgaaagctactggttgattttaaagtgcctgggcctcacaggtttggagatgtcccagaataaggcacaatgtcaatagcaggagttgctgctcaggagatcagagtcccattaaaaactggatttctacataatggccgagccatggggaatatgaggaagacctactggagcagtcgcagtgagtttaaaaatacaggcagaaaactacctggcactgtgggagactgagtataggagaaagcaggatgacgatgggcctgaatggtggtgtgttttcctccacacaatgtggctttgtcctccaaggtgtctcacgtgatggaagctggctgatctgacttgcttg

SEQ ID NO: 130435 - DNA, 787 bp, Homo sapiens
  Payload ID: 5518
  Gene Symbol: ERRFI1
  Gene Name: ERBB receptor feedback inhibitor 1
  ENST ID: ENST00000487559
  CDS Start-End: 213-371
tgcgaggcagagtgctagcgggagcgcgagccagcaagaggcgcctgcgcgatgtccgggcccctgagcccgcggcgctgagccagccgggacggacatgcgcgggagggcgccgcggggcagccgccgctcctccgggggaatgaaagctactggttgattttaaagtgcctgggcctcacaggtttggagatgtcccagaataaggcacaatgtcaatagcaggagttgctgctcaggagatcagagtcccattaaaaactggatttctacataatggccgagccatggggaatatgaggaagacctactggagcagtcgcagtgagtttaaaaacttcctctcctttcagcaactttttaaatattgacccgataaccatggcctacagtctgaactcttctgctcaggagcgcctaataccacttgggcatgcttccaaatctgctccgatgaatggccactgctttgcagaaaatggtccatctcaaaagtccagcttgccccctcttcttattcccccaagtgaaaacttgggaccacatgaagaggatcaagttgtatgtggttttaagaaactcacagtgaatggggtttgtgcttccacccctccactgacacccataaaaaactccccttcccttttcccctgtgcccctctttgtgaacggggttctaggcctcttccaccgttgccaatctctgaagccctctctctggatgacacagactgtgaggtggaattcctaactagctcagatacagacttccttttagaagactcta

SEQ ID NO: 130436 - DNA, 8647 bp, Homo sapiens
  Payload ID: 5519
  Gene Symbol: ERBB2IP
  Gene Name: erbb2 interacting protein
  Uniprot ID: Q96RT1
  ENST ID: ENST00000284037
  CDS Start-End: 390-4628
ggacggagctggatcctgcttctcgccaaggcaggaagtgagtttcgcactgcaattccgggcggtgtcacgagtgaaaagttttgtttttttttttttcggcggagatcctcgttggggctgggaaactcctgcaaaactcgagaccaggaagccagcccgcaccccaacccccaccaaagccacctactcttcttctgtgggaggccagtccacatccgctctcacccgagagagatattcagctggatccaaagtgactgatgaagggaaggaaatcatgtcaagcgaagccttgaaaaagctgccctgagacggtgtcccgccgaaagaatgttggctcaattaagaaacatcagggagataaattcaacccagtgtgtctaaaaatgactacaaaacgaagtttgtttgtgcggttggtaccatgtcgctgtctacgaggggaagaggagactgtcactactcttgattattctcattgcagcttagaacaagttccgaaagagatttttacttttgaaaaaaccttggaggaactctatttagatgctaatcagattgaagagcttccaaagcaactttttaactgtcagtctttacacaaactgagtttgccagacaatgatttaacaacgttaccagcatccattgcaaaccttattaatctcagggaactggatgtcagcaagaatggaatacaggagtttccagaaaatataaaaaattgtaaagttttgacaattgtggaggccagtgtaaaccctatttccaagctccctgatggattttctcagctgttaaacctaacccagttgtatctgaatgatgcttttcttgagttcttgccagcaaattttggcagattaactaaactccaaatattagagcttagagaaaaccagttaaaaatgttgcctaaaactatgaatagactgacccagctggaaagactggatttgggaagtaacgaattcacggaagtgcctgaagtacttgagcaactaagtggattgaaagagttttggatggatgctaatagactgacttttattccagggtttattggtagtttgaaacagctcacatatttggatgtttctaaaaataatattgaaatggttgaagaaggaatttcaacatgtgaaaaccttcaagacctcctattatcaagcaattcacttcagcagcttcctgagactattggttcgttgaagaatataacaacgcttaaaatagatgaaaaccagttaatgtatctgccagactctataggagggttaatatcagtagaagaactggattgtagtttcaatgaagttgaagctttgccttcatctattgggcagcttactaacttaagaacttttgctgctgatcataattacttacagcagttgcccccagagattggaagctggaaaaatataactgtgctgtttctccattccaataaacttgagacacttccagaggaaatgggtgatatgcaaaaattaaaagtcattaatttaagtgataatagattaaagaatttaccctttagctttacaaagctacagcaattgacagctatgtggctctcagataatcagtccaaacccctgatacctcttcaaaaagaaactgattcagagacccagaaaatggtgcttaccaactacatgttccctcaacagccaaggactgaggatgttatgtttatatcagataatgaaagttttaacccttcattgtgggaggaacagaggaaacagcgggctcaagttgcatttgaatgtgatgaagacaaagatgaaagggaggcacctcccagggagggaaatttaaaaagatatccaacaccatacccagatgagcttaagaatatggtcaaaactgttcaaaccattgtacatagattaaaagatgaagagaccaatgaagactcaggaagagatttgaaaccacatgaagatcaacaagatataaataaagatgtgggtgtgaagacctcagaaagtactactacagtaaaaagcaaagttgatgaaagagaaaaatatatgataggaaactctgtacagaagatcagtgaacctgaagctgagattagtcctgggagtttaccagtgactgcaaatatgaaagcctctgagaacttgaagcatattgttaaccatgatgatgtttttgaggaatctgaagaactttcttctgatgaagagatgaaaatggcggagatgcgaccaccattaattgaaacctctattaaccagccaaaagtcgtagcacttagtaataacaaaaaagatgatacaaaggaaacagattctttatcagatgaagttacacacaatagcaatcagaataacagcaattgttcttctccatctcggatgtctgattcagtttctcttaatactgatagtagtcaagacacctcactctgctctccagtgaaacaaactcatattgatattaattccaaaatcaggcaagaagatgaaaattttaacagccttttacaaaatggagatattttaaacagttcaacagaggaaaagttcaaagctcatgataaaaaagattttaacttacctgaatatgatttgaatgttgaagagcgattagttctaattgagaaaagtgttgactcaacagccacagctgatgacactcacaaattagatcatatcaatatgaatcttaataaacttataactaatgatacatttcaaccagagatcatggaaagatcaaaaacacaggatattgtgcttggaacaagctttttaagcattaattctaaagaggaaactgagcacttggaaaatggaaacaagtatcctaatttggaatccgtaaataaggtaaatggacattctgaggaaacttcccagtctcctaataggactgaaccacatgacagtgattgttctgttgacttaggtatttccaaaagcactgaagatctctcccctcagaaaagtggtccagttggatctgttgtgaaatctcatagcataactaatatggagattggagggctaaaaatctatgatattcttagtgataatggacctcagcagccaagtacaaccgttaaaatcacatctgctgttgatggaaaaaatatagtcaggagcaagtctgccacactgttgtatgatcaaccattgcaggtatttactggttcttcctcatcttctgatttaatatcaggaacaaaggcaattttcaagtttgattcaaatcataatcccgaagagccaaatataataagaggccccacaagtggcccacaatctgcacctcaaatatatggtcctccacagtataatatccaatacagtagcagtgctgcagtcaaagacactttgtggcactccaaacaaaatccccaaatagaccatgccagttttcctcctcagctccttcctagatcagagagcacagaaaatcaaagttatgctaaacattctgccaatatgaatttctctaatcataacaatgttcgagctaatactgcataccatttacatcagagacttggcccagcaagacatggggaaatgtgggccatctcaccaaacgaccgacttattcctgcagtaactcgaagtacaatccagcgacaaagtagtgtgtcctccacagcctctgtaaatcttggtgatccaggctctacaaggcgggctcagattcctgaaggagattatttatcatacagagagttccactcagcgggaagaactcctccaatgatgccaggatcacagagacccctttctgcacgaacatacagcatagatggtccaaatgcatcaagacctcagagtgctcgaccctctattaatgaaataccagagagaactatgtcagttagtgatttcaattattcacggactagtccttcaaaaagaccaaatgcaagggttggttctgagcattctttattagatcctccaggaaaaagtaaagttcctcgtgactggagagaacaagtacttcgacatattgaagccaaaaagttagaaaagaagcatccccagacatccagttcaggagatccttgtcaagatggtatattcatttcaggacagcagaactactcatcagccacacttagtcacaaagatgttcctccagacagcttgatgaaaatgcctttgagtaatggacagatgggccagcctctcaggcctcaggcaaattatagtcaaatacatcacccccctcaggcatctgtggcaaggcatccctctagagaacaactaattgattacttgatgctgaaagtggcccaccagcctccatatacacagccccattgttctcctagacaaggccatgaactggcaaaacaagagattcgagtgagggttgaaaaggatccagaacttggatttagcatatcaggtggtgtcgggggtagaggaaacccattcagacctgatgatgatggtatatttgtaacaagggtacaacctgaaggaccagcatcaaaattactgcagccaggtgataaaattattcaggctaatggctacagttttataaatattgaacatggacaagcagtgtccttgctaaaaactttccagaatacagttgaactcatcattgtacgagaagtttcctcataagcactgtggacaaaaaaagcggggaagacagcaagatttattggaagatacttacaggggaaattaatattttgactatttttatatataaagaagaactcaaaaaattatgttcaaatttgtacattaatgaaataatggaacttgtggttagagggaaagaaccactgtacagaatataaaggagactgttgaattcataccatataaaacttgttaggtttttaaacatagcaatcaaggctacaaaaacaaacctgtgttgtttttgtatagattgtaggtttatttttggatttcatatacatgactgaactgtgtgcaaggcaatagttagccttgattttagcccagagacagatggcagagctatctctctcatagcttttatgcccttatttttattcaactggtattaatgtttttctcctgaaactactttttttgatgtgggcaagagatttgaagtgttggcttttgctatgtgcatattgaattgaagagtgagtaggtgaaggtggtgctggtgggttcactttccaaggccagactaaaacagttattttctataaaaatctggaagcaaagaatggggatggggagagctacgtggtagtatgtttttattaggagaataatgcaataaaatatgtaatgtcttttttataaagcaaaaaagacaataattgcatttatgagctcggcaggatctgttcttgtcatagccattgactatacatttgctactggtgattcagtttttaattttttagtcacaggaaatttttaactctactgtagatgcatgtccatgcattttctgtgttatggaaatccactgatttttttttttttttcaaatggtggtacttgcaatctgttttataattagtgctccatttaaatctaatttataatttttattttaagcagcaaatgaaacaaaaatggccagttttaagattgtgttgcctgtaacacaaaatgttacgaaggtttaggaaagcctctttgatttttgtttggccttgcattgccttggtaaagtaaaaggaaacagtacacttggagctaggaaaccaaagcaagctttgtgaaactggcacagtgatagagaattgctgtggagagttatagagcaaagggatgggtccttgaggcctgccagtgtgtaaaggtgttcaaataaagggctgtttctacaggtaacattaaatgtgaactcaacacttccagagtctttaaagggtttctatgtgtatcagtgtaatagtgttttaccaccaactgcctttctttgttcctagttactgtaacaaatatttgatgatagaggtttattaattttgtttatccagaccattaattttatttgtttttgttctatgtaatcaaataaaatttgagtaacatgtaatggtaaggattaatgcatggttatttggaccagaaaaaagtgccatagaagaccaataactgtttagttgaggctagtctggaacctttcattagagcaatatttggttattgcacttcatttttatttactaagaaatgcaatttgggaatttttaatctgttatgctttgtttatcaaccttgattttaattaagacttttataagactagcttaaaacaccaaccaacattatttttgcaaaagtgagttggactcactttccattcttgctagtcagagtaagtaggcagcacttttaaaaatatgtgaactcaaatattgcacttctttcaagatgttatcaattggttattgtactgtatagttttaataattttgattgaaaccctttaacaactctttgtaaattttaactcattttagttgattttcagtactatttacataggaattgatttttatggatatagtagaagaaatgtgctgtattttgataaaattcacttattgtatgtgtgttgtaatctaaaaaaaaaaagaatgacaaacagcttctttaagacaagtctcggtgttccctttattcttagtttgtttttaaatattaattttggcattctaaaatagctaacatttcttttattgatttcagattttcacaggcacattctacttttaatcagaaatatatttaataagtataattgtgaagttttcaactactttaccttgaaccacatataccaattataattttggaaaaggaattaagcctcacggaacaatggatcttcagcaaaccttaacttcattgtctgcacattacattgaagtattataaatgcaacagatgttatatgcactggcattttatcctactctagttagttaaaattttatagtattcttgcaacacataaagttgcgtaagaaactttaccaagaggagtattatagccaagttttctttgaaagtattggaaaactaaaattaaatgacaaggactttgaattagaattttgctgtaataaagtttcaaaatttgaataaaataattaaattttttgaggaagtggagaagacatttttagtttatatattgttgagtaaattgtagttaaggcctatacccataactaactttagtaagtattatatagcaattcatcaaaaccacaactgtcttttagtgattttgtctttaagagtaatttcttactctaaccagtaaaaaaataatactgatcagagtaatttatacggcatacaatagttgatacaatctaaagatttatgctaattaaggaattatcacttcatctgaatcaatgaaattctaaaattccctacatatttattttgtaaatattcttctgacctctttggactggatatgaagatatatatatatacacttaattcttttaaacacaaaacttgccataagcagaaccaaacttttaagtattaatttgctgcacttaaaaaatcccattagcagctatgtaatatttttatcaaccaacatttattcattccaaatttttgtatatatctagatgaagtaacacatagaggatagataacaaactaatgatgtttaaactggtttatttacaaaattcggggttagagaaattctcatgaaaaatatacaatttttttttagcattaaaaccctgtatatctaggtgtggaagaagtgtagtttatctcaaattattattatttacttctaaagggaggcattaagatgggaaatgtttctctgatggagattgacgtgtgaaatctatttggaagggtatttttttcactcagtctgttgcattcttacagccttctgttttaatgttcagtgaataggtttcttatgaaatggacattgaaataaaaattatgattcaagagcattaattgatgaacaagtgaacaagatgcctctttaaaaaaaaaaaagaaaaagtaatctagacaggcagccaactcagacctttgggtattcctttgtttctaaataaggaccttcagaaaaagttgaccatattctacctaaagctgctaattctttacagaattcataagcccaggggatagtaagtagtcatttagttttggaaagttcttaagagaatgctatcttctacagtctcatgaagcagtttttcaagattagaatctgtggtcagctataacgtacagtcctaatatccaaccacctgagaagctcatcctaagctgagaaagcctaaaatgttagagaatgtttagagaaaacacctgaaattttttttaagagaacaacctaggttttattgtagagaacaatcaaaatactcctgaacctttctatagaatctttaggagagaggctgacaaaaagaatccttctgttacaactttcttttctaatgtaacaaccagggacaatggtgatctgtcacgcatctgcccatctagcttctcaatcggcccacggttttatttcaggataaaatttgagaaactagtatcactggggaaggaagaaacctaagctgtaaaattatgcttttcccctcaagggattcaataaagcttatttttcatgaaaacaa

SEQ ID NO: 130437 - DNA, 6692 bp, Homo sapiens
  Payload ID: 5519
  Gene Symbol: ERBB2IP
  Gene Name: erbb2 interacting protein
  Uniprot ID: Q96RT1
  ENST ID: ENST00000380935
  CDS Start-End: 291-4199
cggcggagatcctcgttggggctgggaaactcctgcaaaactcgagaccaggaagccagcccgcaccccaacccccaccaaagccacctactcttcttctgtgggaggccagtccacatccgctctcacccgagagagatattcagctggatccaaagtgactgatgaagggaaggaaatcatgtcaagcgaagccttgaaaaagctgccctgagacggtgtcccgccgaaagaatgttggctcaattaagaaacatcagggagataaattcaacccagtgtgtctaaaaatgactacaaaacgaagtttgtttgtgcggttggtaccatgtcgctgtctacgaggggaagaggagactgtcactactcttgattattctcattgcagcttagaacaagttccgaaagagatttttacttttgaaaaaaccttggaggaactctatttagatgctaatcagattgaagagcttccaaagcaactttttaactgtcagtctttacacaaactgagtttgccagacaatgatttaacaacgttaccagcatccattgcaaaccttattaatctcagggaactggatgtcagcaagaatggaatacaggagtttccagaaaatataaaaaattgtaaagttttgacaattgtggaggccagtgtaaaccctatttccaagctccctgatggattttctcagctgttaaacctaacccagttgtatctgaatgatgcttttcttgagttcttgccagcaaattttggcagattaactaaactccaaatattagagcttagagaaaaccagttaaaaatgttgcctaaaactatgaatagactgacccagctggaaagactggatttgggaagtaacgaattcacggaagtgcctgaagtacttgagcaactaagtggattgaaagagttttggatggatgctaatagactgacttttattccagggtttattggtagtttgaaacagctcacatatttggatgtttctaaaaataatattgaaatggttgaagaaggaatttcaacatgtgaaaaccttcaagacctcctattatcaagcaattcacttcagcagcttcctgagactattggttcgttgaagaatataacaacgcttaaaatagatgaaaaccagttaatgtatctgccagactctataggagggttaatatcagtagaagaactggattgtagtttcaatgaagttgaagctttgccttcatctattgggcagcttactaacttaagaacttttgctgctgatcataattacttacagcagttgcccccagagattggaagctggaaaaatataactgtgctgtttctccattccaataaacttgagacacttccagaggaaatgggtgatatgcaaaaattaaaagtcattaatttaagtgataatagattaaagaatttaccctttagctttacaaagctacagcaattgacagctatgtggctctcagataatcagtccaaacccctgatacctcttcaaaaagaaactgattcagagacccagaaaatggtgcttaccaactacatgttccctcaacagccaaggactgaggatgttatgtttatatcagataatgaaagttttaacccttcattgtgggaggaacagaggaaacagcgggctcaagttgcatttgaatgtgatgaagacaaagatgaaagggaggcacctcccagggagggaaatttaaaaagatatccaacaccatacccagatgagcttaagaatatggtcaaaactgttcaaaccattgtacatagattaaaagatgaagagaccaatgaagactcaggaagagatttgaaaccacatgaagatcaacaagatataaataaagatgtgggtgtgaagacctcagaaagtactactacagtaaaaagcaaagttgatgaaagagaaaaatatatgataggaaactctgtacagaagatcagtgaacctgaagctgagattagtcctgggagtttaccagtgactgcaaatatgaaagcctctgagaacttgaagcatattgttaaccatgatgatgtttttgaggaatctgaagaactttcttctgatgaagagatgaaaatggcggagatgcgaccaccattaattgaaacctctattaaccagccaaaagtcgtagcacttagtaataacaaaaaagatgatacaaaggaaacagattctttatcagatgaagttacacacaatagcaatcagaataacagcaattgttcttctccatctcggatgtctgattcagtttctcttaatactgatagtagtcaagacacctcactctgctctccagtgaaacaaactcatattgatattaattccaaaatcaggcaagaagatgaaaattttaacagccttttacaaaatggagatattttaaacagttcaacagaggaaaagttcaaagctcatgataaaaaagattttaacttacctgaatatgatttgaatgttgaagagcgattagttctaattgagaaaagtgttgactcaacagccacagctgatgacactcacaaattagatcatatcaatatgaatcttaataaacttataactaatgatacatttcaaccagagatcatggaaagatcaaaaacacaggatattgtgcttggaacaagctttttaagcattaattctaaagaggaaactgagcacttggaaaatggaaacaagtatcctaatttggaatccgtaaataaggtaaatggacattctgaggaaacttcccagtctcctaataggactgaaccacatgacagtgattgttctgttgacttaggtatttccaaaagcactgaagatctctcccctcagaaaagtggtccagttggatctgttgtgaaatctcatagcataactaatatggagattggagggctaaaaatctatgatattcttagtgataatggacctcagcagccaagtacaaccgttaaaatcacatctgctgttgatggaaaaaatatagtcaggagcaagtctgccacactgttgtatgatcaaccattgcaggtatttactggttcttcctcatcttctgatttaatatcaggaacaaaggcaattttcaagtttgattcaaatcataatcccgaagagccaaatataataagaggccccacaagtggcccacaatctgcacctcaaatatatggtcctccacagtataatatccaatacagtagcagtgctgcagtcaaagacactttgtggcactccaaacaaaatccccaaatagaccatgccagttttcctcctcagctccttcctagatcagagagcacagaaaatcaaagttatgctaaacattctgccaatatgaatttctctaatcataacaatgttcgagctaatactgcataccatttacatcagagacttggcccagcaagacatggggaaatgtgggccatctcaccaaacgaccgacttattcctgcagtaactcgaagtacaatccagcgacaaagtagtgtgtcctccacagcctctgtaaatcttggtgatccaggctctacaaggcgggctcagattcctgaaggagattatttatcatacagagagttccactcagcgggaagaactcctccaatgatgccaggatcacagagacccctttctgcacgaacatacagcatagatggtccaaatgcatcaagacctcagagtgctcgaccctctattaatgaaataccagagagaactatgtcagttagtgatttcaattattcacggactagtccttcaaaaagaccaaatgcaagggttggttctgagcattctttattagatcctccaggaaaaagtaaagttcctcgtgactggagagaacaagtacttcgacatattgaagccaaaaagttagaaaagattcgagtgagggttgaaaaggatccagaacttggatttagcatatcaggtggtgtcgggggtagaggaaacccattcagacctgatgatgatggtatatttgtaacaagggtacaacctgaaggaccagcatcaaaattactgcagccaggtgataaaattattcaggctaatggctacagttttataaatattgaacatggacaagcagtgtccttgctaaaaactttccagaatacagttgaactcatcattgtacgagaagtttcctcataagcactgtggacaaaaaaagcggggaagacagcaagatttattggaagatacttacaggggaaattaatattttgactatttttatatataaagaagaactcaaaaaattatgttcaaatttgtacattaatgaaataatggaacttgtggttagagggaaagaaccactgtacagaatataaaggagactgttgaattcataccatataaaacttgttaggtttttaaacatagcaatcaaggctacaaaaacaaacctgtgttgtttttgtatagattgtaggtttatttttggatttcatatacatgactgaactgtgtgcaaggcaatagttagccttgattttagcccagagacagatggcagagctatctctctcatagcttttatgcccttatttttattcaactggtattaatgtttttctcctgaaactactttttttgatgtgggcaagagatttgaagtgttggcttttgctatgtgcatattgaattgaagagtgagtaggtgaaggtggtgctggtgggttcactttccaaggccagactaaaacagttattttctataaaaatctggaagcaaagaatggggatggggagagctacgtggtagtatgtttttattaggagaataatgcaataaaatatgtaatgtcttttttataaagcaaaaaagacaataattgcatttatgagctcggcaggatctgttcttgtcatagccattgactatacatttgctactggtgattcagtttttaattttttagtcacaggaaatttttaactctactgtagatgcatgtccatgcattttctgtgttatggaaatccactgatttttttttttttttcaaatggtggtacttgcaatctgttttataattagtgctccatttaaatctaatttataatttttattttaagcagcaaatgaaacaaaaatggccagttttaagattgtgttgcctgtaacacaaaatgttacgaaggtttaggaaagcctctttgatttttgtttggccttgcattgccttggtaaagtaaaaggaaacagtacacttggagctaggaaaccaaagcaagctttgtgaaactggcacagtgatagagaattgctgtggagagttatagagcaaagggatgggtccttgaggcctgccagtgtgtaaaggtgttcaaataaagggctgtttctacaggtaacattaaatgtgaactcaacacttccagagtctttaaagggtttctatgtgtatcagtgtaatagtgttttaccaccaactgcctttctttgttcctagttactgtaacaaatatttgatgatagaggtttattaattttgtttatccagaccattaattttatttgtttttgttctatgtaatcaaataaaatttgagtaacatgtaatggtaaggattaatgcatggttatttggaccagaaaaaagtgccatagaagaccaataactgtttagttgaggctagtctggaacctttcattagagcaatatttggttattgcacttcatttttatttactaagaaatgcaatttgggaatttttaatctgttatgctttgtttatcaaccttgattttaattaagacttttataagactagcttaaaacaccaaccaacattatttttgcaaaagtgagttggactcactttccattcttgctagtcagagtaagtaggcagcacttttaaaaatatgtgaactcaaatattgcacttctttcaagatgttatcaattggttattgtactgtatagttttaataattttgattgaaaccctttaacaactctttgtaaattttaactcattttagttgattttcagtactatttacataggaattgatttttatggatatagtagaagaaatgtgctgtattttgataaaattcacttattgtatgtgtgttgtaatctaaaaaaaaaaagaatgacaaacagcttctttaagacaagtctcggtgttccctttattcttagtttgtttttaaatattaattttggcattctaaaatagctaacatttcttttattgatttcagattttcacaggcacattctacttttaatcagaaatatatttaataagtataattgtgaagttttcaactactttaccttgaaccacatataccaattataattttggaaaaggaattaagcctcacggaacaatggatcttcagcaaaccttaacttcattgtctgcacattacattgaagtattataaatgcaacagatgttatatgcactggcattttatcctactctagttagttaaaattttatagtattcttgcaacacataaagttgcgtaagaaactttaccaagaggagtattatagccaagttttctttgaaagtattggaaaactaaaattaaatgacaaggactttgaattagaattttgctgtaataaagtttcaaaatttgaataaaataattaaattttttgagga

SEQ ID NO: 130438 - DNA, 4701 bp, Homo sapiens
  Payload ID: 5519
  Gene Symbol: ERBB2IP
  Gene Name: erbb2 interacting protein
  Uniprot ID: Q96RT1
  ENST ID: ENST00000380938
  CDS Start-End: 255-4295
aaaactcgagaccaggaagccagcccgcaccccaacccccaccaaagccacctactcttcttctgtgggaggccagtccacatccgctctcacccgagagagatattcagctggatccaaagtgactgatgaagggaaggaaatcatgtcaagcgaagccttgaaaaagctgccctgagacggtgtcccgccgaaagaatgttggctcaattaagaaacatcagggagataaattcaacccagtgtgtctaaaaatgactacaaaacgaagtttgtttgtgcggttggtaccatgtcgctgtctacgaggggaagaggagactgtcactactcttgattattctcattgcagcttagaacaagttccgaaagagatttttacttttgaaaaaaccttggaggaactctatttagatgctaatcagattgaagagcttccaaagcaactttttaactgtcagtctttacacaaactgagtttgccagacaatgatttaacaacgttaccagcatccattgcaaaccttattaatctcagggaactggatgtcagcaagaatggaatacaggagtttccagaaaatataaaaaattgtaaagttttgacaattgtggaggccagtgtaaaccctatttccaagctccctgatggattttctcagctgttaaacctaacccagttgtatctgaatgatgcttttcttgagttcttgccagcaaattttggcagattaactaaactccaaatattagagcttagagaaaaccagttaaaaatgttgcctaaaactatgaatagactgacccagctggaaagactggatttgggaagtaacgaattcacggaagtgcctgaagtacttgagcaactaagtggattgaaagagttttggatggatgctaatagactgacttttattccagggtttattggtagtttgaaacagctcacatatttggatgtttctaaaaataatattgaaatggttgaagaaggaatttcaacatgtgaaaaccttcaagacctcctattatcaagcaattcacttcagcagcttcctgagactattggttcgttgaagaatataacaacgcttaaaatagatgaaaaccagttaatgtatctgccagactctataggagggttaatatcagtagaagaactggattgtagtttcaatgaagttgaagctttgccttcatctattgggcagcttactaacttaagaacttttgctgctgatcataattacttacagcagttgcccccagagattggaagctggaaaaatataactgtgctgtttctccattccaataaacttgagacacttccagaggaaatgggtgatatgcaaaaattaaaagtcattaatttaagtgataatagattaaagaatttaccctttagctttacaaagctacagcaattgacagctatgtggctctcagataatcagtccaaacccctgatacctcttcaaaaagaaactgattcagagacccagaaaatggtgcttaccaactacatgttccctcaacagccaaggactgaggatgttatgtttatatcagataatgaaagttttaacccttcattgtgggaggaacagaggaaacagcgggctcaagttgcatttgaatgtgatgaagacaaagatgaaagggaggcacctcccagggagggaaatttaaaaagatatccaacaccatacccagatgagcttaagaatatggtcaaaactgttcaaaccattgtacatagattaaaagatgaagagaccaatgaagactcaggaagagatttgaaaccacatgaagatcaacaagatataaataaagatgtgggtgtgaagacctcagaaagtactactacagtaaaaagcaaagttgatgaaagagaaaaatatatgataggaaactctgtacagaagatcagtgaacctgaagctgagattagtcctgggagtttaccagtgactgcaaatatgaaagcctctgagaacttgaagcatattgttaaccatgatgatgtttttgaggaatctgaagaactttcttctgatgaagagatgaaaatggcggagatgcgaccaccattaattgaaacctctattaaccagccaaaagtcgtagcacttagtaataacaaaaaagatgatacaaaggaaacagattctttatcagatgaagttacacacaatagcaatcagaataacagcaattgttcttctccatctcggatgtctgattcagtttctcttaatactgatagtagtcaagacacctcactctgctctccagtgaaacaaactcatattgatattaattccaaaatcaggcaagaagatgaaaattttaacagccttttacaaaatggagatattttaaacagttcaacagaggaaaagttcaaagctcatgataaaaaagattttaacttacctgaatatgatttgaatgttgaagagcgattagttctaattgagaaaagtgttgactcaacagccacagctgatgacactcacaaattagatcatatcaatatgaatcttaataaacttataactaatgatacatttcaaccagagatcatggaaagatcaaaaacacaggatattgtgcttggaacaagctttttaagcattaattctaaagaggaaactgagcacttggaaaatggaaacaagtatcctaatttggaatccgtaaataaggtaaatggacattctgaggaaacttcccagtctcctaataggactgaaccacatgacagtgattgttctgttgacttaggtatttccaaaagcactgaagatctctcccctcagaaaagtggtccagttggatctgttgtgaaatctcatagcataactaatatggagattggagggctaaaaatctatgatattcttagtgataatggacctcagcagccaagtacaaccgttaaaatcacatctgctgttgatggaaaaaatatagtcaggagcaagtctgccacactgttgtatgatcaaccattgcaggtatttactggttcttcctcatcttctgatttaatatcaggaacaaaggcaattttcaagtttgattcaaatcataatcccgaagagccaaatataataagaggccccacaagtggcccacaatctgcacctcaaatatatggtcctccacagtataatatccaatacagtagcagtgctgcagtcaaagacactttgtggcactccaaacaaaatccccaaatagaccatgccagttttcctcctcagctccttcctagatcagagagcacagaaaatcaaagttatgctaaacattctgccaatatgaatttctctaatcataacaatgttcgagctaatactgcataccatttacatcagagacttggcccagcaagacatggggaaatgtgggccatctcaccaaacgaccgacttattcctgcagtaactcgaagtacaatccagcgacaaagtagtgtgtcctccacagcctctgtaaatcttggtgatccaggctctacaaggcgggctcagattcctgaaggagattatttatcatacagagagttccactcagcgggaagaactcctccaatgatgccaggatcacagagacccctttctgcacgaacatacagcatagatggtccaaatgcatcaagacctcagagtgctcgaccctctattaatgaaataccagagagaactatgtcagttagtgatttcaattattcacggactagtccttcaaaaagaccaaatgcaagggttggttctgagcattctttattagatcctccaggaaaaagtaaagttcctcgtgactggagagaacaagtacttcgacatattgaagccaaaaagttagaaaagatgcctttgagtaatggacagatgggccagcctctcaggcctcaggcaaattatagtcaaatacatcacccccctcaggcatctgtggcaaggcatccctctagagaacaactaattgattacttgatgctgaaagtggcccaccagcctccatatacacagccccattgttctcctagacaaggccatgaactggcaaaacaagagattcgagtgagggttgaaaaggatccagaacttggatttagcatatcaggtggtgtcgggggtagaggaaacccattcagacctgatgatgatgctaatggctacagttttataaatattgaacatggacaagcagtgtccttgctaaaaactttccagaatacagttgaactcatcattgtacgagaagtttcctcataagcactgtggacaaaaaaagcggggaagacagcaagatttattggaagatacttacaggggaaattaatattttgactatttttatatataaagaagaactcaaaaaattatgttcaaatttgtacattaatgaaataatggaacttgtggttagagggaaagaaccactgtacagaatataaaggagactgttgaattcataccatataaaacttgttaggtttttaaacatagcaatcaaggctacaaaaacaaacctgtgttgtttttgtatagattgtaggtttatttttggatttcatatacatgactgaactgtgtgcaaggcaatagttagccttgattttagcccagagacagatggcagagctatctctctcatagcttttatgcccttatttttatt

SEQ ID NO: 130439 - DNA, 6410 bp, Homo sapiens
  Payload ID: 5519
  Gene Symbol: ERBB2IP
  Gene Name: erbb2 interacting protein
  Uniprot ID: Q96RT1
  ENST ID: ENST00000380943
  CDS Start-End: 309-4424
ttttgtttttttttttttcggcggagatcctcgttggggctgggaaactcctgcaaaactcgagaccaggaagccagcccgcaccccaacccccaccaaagccacctactcttcttctgtgggaggccagtccacatccgctctcacccgagagagatattcagctggatccaaagtgactgatgaagggaaggaaatcatgtcaagcgaagccttgaaaaagctgccctgagacggtgtcccgccgaaagaatgttggctcaattaagaaacatcagggagataaattcaacccagtgtgtctaaaaatgactacaaaacgaagtttgtttgtgcggttggtaccatgtcgctgtctacgaggggaagaggagactgtcactactcttgattattctcattgcagcttagaacaagttccgaaagagatttttacttttgaaaaaaccttggaggaactctatttagatgctaatcagattgaagagcttccaaagcaactttttaactgtcagtctttacacaaactgagtttgccagacaatgatttaacaacgttaccagcatccattgcaaaccttattaatctcagggaactggatgtcagcaagaatggaatacaggagtttccagaaaatataaaaaattgtaaagttttgacaattgtggaggccagtgtaaaccctatttccaagctccctgatggattttctcagctgttaaacctaacccagttgtatctgaatgatgcttttcttgagttcttgccagcaaattttggcagattaactaaactccaaatattagagcttagagaaaaccagttaaaaatgttgcctaaaactatgaatagactgacccagctggaaagactggatttgggaagtaacgaattcacggaagtgcctgaagtacttgagcaactaagtggattgaaagagttttggatggatgctaatagactgacttttattccagggtttattggtagtttgaaacagctcacatatttggatgtttctaaaaataatattgaaatggttgaagaaggaatttcaacatgtgaaaaccttcaagacctcctattatcaagcaattcacttcagcagcttcctgagactattggttcgttgaagaatataacaacgcttaaaatagatgaaaaccagttaatgtatctgccagactctataggagggttaatatcagtagaagaactggattgtagtttcaatgaagttgaagctttgccttcatctattgggcagcttactaacttaagaacttttgctgctgatcataattacttacagcagttgcccccagagattggaagctggaaaaatataactgtgctgtttctccattccaataaacttgagacacttccagaggaaatgggtgatatgcaaaaattaaaagtcattaatttaagtgataatagattaaagaatttaccctttagctttacaaagctacagcaattgacagctatgtggctctcagataatcagtccaaacccctgatacctcttcaaaaagaaactgattcagagacccagaaaatggtgcttaccaactacatgttccctcaacagccaaggactgaggatgttatgtttatatcagataatgaaagttttaacccttcattgtgggaggaacagaggaaacagcgggctcaagttgcatttgaatgtgatgaagacaaagatgaaagggaggcacctcccagggagggaaatttaaaaagatatccaacaccatacccagatgagcttaagaatatggtcaaaactgttcaaaccattgtacatagattaaaagatgaagagaccaatgaagactcaggaagagatttgaaaccacatgaagatcaacaagatataaataaagatgtgggtgtgaagacctcagaaagtactactacagtaaaaagcaaagttgatgaaagagaaaaatatatgataggaaactctgtacagaagatcagtgaacctgaagctgagattagtcctgggagtttaccagtgactgcaaatatgaaagcctctgagaacttgaagcatattgttaaccatgatgatgtttttgaggaatctgaagaactttcttctgatgaagagatgaaaatggcggagatgcgaccaccattaattgaaacctctattaaccagccaaaagtcgtagcacttagtaataacaaaaaagatgatacaaaggaaacagattctttatcagatgaagttacacacaatagcaatcagaataacagcaattgttcttctccatctcggatgtctgattcagtttctcttaatactgatagtagtcaagacacctcactctgctctccagtgaaacaaactcatattgatattaattccaaaatcaggcaagaagatgaaaattttaacagccttttacaaaatggagatattttaaacagttcaacagaggaaaagttcaaagctcatgataaaaaagattttaacttacctgaatatgatttgaatgttgaagagcgattagttctaattgagaaaagtgttgactcaacagccacagctgatgacactcacaaattagatcatatcaatatgaatcttaataaacttataactaatgatacatttcaaccagagatcatggaaagatcaaaaacacaggatattgtgcttggaacaagctttttaagcattaattctaaagaggaaactgagcacttggaaaatggaaacaagtatcctaatttggaatccgtaaataaggtaaatggacattctgaggaaacttcccagtctcctaataggactgaaccacatgacagtgattgttctgttgacttaggtatttccaaaagcactgaagatctctcccctcagaaaagtggtccagttggatctgttgtgaaatctcatagcataactaatatggagattggagggctaaaaatctatgatattcttagtgataatggacctcagcagccaagtacaaccgttaaaatcacatctgctgttgatggaaaaaatatagtcaggagcaagtctgccacactgttgtatgatcaaccattgcaggtatttactggttcttcctcatcttctgatttaatatcaggaacaaaggcaattttcaagtttgattcaaatcataatcccgaagagccaaatataataagaggccccacaagtggcccacaatctgcacctcaaatatatggtcctccacagtataatatccaatacagtagcagtgctgcagtcaaagacactttgtggcactccaaacaaaatccccaaatagaccatgccagttttcctcctcagctccttcctagatcagagagcacagaaaatcaaagttatgctaaacattctgccaatatgaatttctctaatcataacaatgttcgagctaatactgcataccatttacatcagagacttggcccagcaagacatggggaaatgtgggccatctcaccaaacgaccgacttattcctgcagtaactcgaagtacaatccagcgacaaagtagtgtgtcctccacagcctctgtaaatcttggtgatccaggctctacaaggcgggctcagattcctgaaggagattatttatcatacagagagttccactcagcgggaagaactcctccaatgatgccaggatcacagagacccctttctgcacgaacatacagcatagatggtccaaatgcatcaagacctcagagtgctcgaccctctattaatgaaataccagagagaactatgtcagttagtgatttcaattattcacggactagtccttcaaaaagaccaaatgcaagggttggttctgagcattctttattagatcctccaggaaaaagtaaagttcctcgtgactggagagaacaagtacttcgacatattgaagccaaaaagttagaaaagatgcctttgagtaatggacagatgggccagcctctcaggcctcaggcaaattatagtcaaatacatcacccccctcaggcatctgtggcaaggcatccctctagagaacaactaattgattacttgatgctgaaagtggcccaccagcctccatatacacagccccattgttctcctagacaaggccatgaactggcaaaacaagagattcgagtgagggttgaaaaggatccagaacttggatttagcatatcaggtggtgtcgggggtagaggaaacccattcagacctgatgatgatggtatatttgtaacaagggtacaacctgaaggaccagcatcaaaattactgcagccaggtgataaaattattcaggctaatggctacagttttataaatattgaacatggacaagcagtgtccttgctaaaaactttccagaatacagttgaactcatcattgtacgagaagtttcctcataagcactgtggacaaaaaaagcggggaagacagcaagatttattggaagatacttacaggggaaattaatattttgactatttttatatataaagaagaactcaaaaaattatgttcaaatttgtacattaatgaaataatggaacttgtggttagagggaaagaaccactgtacagaatataaaggagactgttgaattcataccatataaaacttgttaggtttttaaacatagcaatcaaggctacaaaaacaaacctgtgttgtttttgtatagattgtaggtttatttttggatttcatatacatgactgaactgtgtgcaaggcaatagttagccttgattttagcccagagacagatggcagagctatctctctcatagcttttatgcccttatttttattcaactggtattaatgtttttctcctgaaactactttttttgatgtgggcaagagatttgaagtgttggcttttgctatgtgcatattgaattgaagagtgagtaggtgaaggtggtgctggtgggttcactttccaaggccagactaaaacagttattttctataaaaatctggaagcaaagaatggggatggggagagctacgtggtagtatgtttttattaggagaataatgcaataaaatatgtaatgtcttttttataaagcaaaaaagacaataattgcatttatgagctcggcaggatctgttcttgtcatagccattgactatacatttgctactggtgattcagtttttaattttttagtcacaggaaatttttaactctactgtagatgcatgtccatgcattttctgtgttatggaaatccactgatttttttttttttttcaaatggtggtacttgcaatctgttttataattagtgctccatttaaatctaatttataatttttattttaagcagcaaatgaaacaaaaatggccagttttaagattgtgttgcctgtaacacaaaatgttacgaaggtttaggaaagcctctttgatttttgtttggccttgcattgccttggtaaagtaaaaggaaacagtacacttggagctaggaaaccaaagcaagctttgtgaaactggcacagtgatagagaattgctgtggagagttatagagcaaagggatgggtccttgaggcctgccagtgtgtaaaggtgttcaaataaagggctgtttctacaggtaacattaaatgtgaactcaacacttccagagtctttaaagggtttctatgtgtatcagtgtaatagtgttttaccaccaactgcctttctttgttcctagttactgtaacaaatatttgatgatagaggtttattaattttgtttatccagaccattaattttatttgtttttgttctatgtaatcaaataaaatttgagtaacatgtaatggtaaggattaatgcatggttatttggaccagaaaaaagtgccatagaagaccaataactgtttagttgaggctagtctggaacctttcattagagcaatatttggttattgcacttcatttttatttactaagaaatgcaatttgggaatttttaatctgttatgctttgtttatcaaccttgattttaattaagacttttataagactagcttaaaacaccaaccaacattatttttgcaaaagtgagttggactcactttccattcttgctagtcagagtaagtaggcagcacttttaaaaatatgtgaactcaaatattgcacttctttcaagatgttatcaattggttattgtactgtatagttttaataattttgattgaaaccctttaacaactctttgtaaattttaactcattttagttgattttcagtactatttacataggaattgatttttatggatatagtagaagaaatgtgctgtattttgataaaattcacttattgtatgtgtgttgtaatctaaaaaaaaaaagaatgacaaacagcttctttaagacaa

SEQ ID NO: 130440 - DNA, 2351 bp, Homo sapiens
  Payload ID: 5519
  Gene Symbol: ERBB2IP
  Gene Name: erbb2 interacting protein
  ENST ID: ENST00000416865
  CDS Start-End: 298-2130
tttttttcggcggagatcctcgttggggctgggaaactcctgcaaaactcgagaccaggaagccagcccgcaccccaacccccaccaaagccacctactcttcttctgtgggaggccagtccacatccgctctcacccgagagagatattcagctggatccaaagtgactgatgaagggaaggaaatcatgtcaagcgaagccttgaaaaagctgccctgagacggtgtcccgccgaaagaatgttggctcaattaagaaacatcagggagataaattcaacccagtgtgtctaaaaatgactacaaaacgaagtttgtttgtgcggttggtaccatgtcgctgtctacgaggggaagaggagactgtcactactcttgattattctcattgcagcttagaacaagttccgaaagagatttttacttttgaaaaaaccttggaggaactctatttagatgctaatcagattgaagagcttccaaagcaactttttaactgtcagtctttacacaaactgagtttgccagacaatgatttaacaacgttaccagcatccattgcaaaccttattaatctcagggaactggatgtcagcaagaatggaatacaggagtttccagaaaatataaaaaattgtaaagttttgacaattgtggaggccagtgtaaaccctatttccaagctccctgatggattttctcagctgttaaacctaacccagttgtatctgaatgatgcttttcttgagttcttgccagcaaattttggcagattaactaaactccaaatattagagcttagagaaaaccagttaaaaatgttgcctaaaactatgaatagactgacccagctggaaagactggatttgggaagtaacgaattcacggaagtgcctgaagtacttgagcaactaagtggattgaaagagttttggatggatgctaatagactgacttttattccagggtttattggtagtttgaaacagctcacatatttggatgtttctaaaaataatattgaaatggttgaagaaggaatttcaacatgtgaaaaccttcaagacctcctattatcaagcaattcacttcagcagcttcctgagactattggttcgttgaagaatataacaacgcttaaaatagatgaaaaccagttaatgtatctgccagactctataggagggttaatatcagtagaagaactggattgtagtttcaatgaagttgaagctttgccttcatctattgggcagcttactaacttaagaacttttgctgctgatcataattacttacagcagttgcccccagagattggaagctggaaaaatataactgtgctgtttctccattccaataaacttgagacacttccagaggaaatgggtgatatgcaaaaattaaaagtcattaatttaagtgataatagattaaagaatttaccctttagctttacaaagctacagcaattgacagctatgtggctctcagataatcagagcatgctgtcaaggtcctttaattccaattttactactgtaagcagttttcactgtggcagctctagggatctgcatggcagccagggcagtcttgccttgagtgttgcagacagaagaggttctggtgggcacatttttcgaatgcctttgagtaatggacagatgggccagcctctcaggcctcaggcaaattatagtcaaatacatcacccccctcaggcatctgtggcaaggcatccctctagagaacaactaattgattacttgatgctgaaagtggcccaccagcctccatatacacagccccattgttctcctagacaaggccatgaactggcaaaacaagagattcgagtgagggttgaaaaggatccagaacttggatttagcatatcaggtggtgtcgggggtagaggaaacccattcagacctgatgatgatggtatatttgtaacaagggtacaacctgaaggaccagcatcaaaattactgcagccaggtgataaaattattcaggctaatggctacagttttataaatattgaacatggacaagcagtgtccttgctaaaaactttccagaatacagttgaactcatcattgtacgagaagtttcctcataagcactgtggacaaaaaaagcggggaagacagcaagatttattggaagatacttacaggggaaattaatattttgactatttttatatataaagaagaactcaaaaaattatgttcaaatttgtacattaatgaaataatggaacttgtggttagagggaaagaaccactgtacagaatataaaggagactgttgaattcataccatataaaacttgttagg

SEQ ID NO: 130441 - DNA, 4374 bp, Homo sapiens
  Payload ID: 5519
  Gene Symbol: ERBB2IP
  Gene Name: erbb2 interacting protein
  Uniprot ID: Q96RT1
  ENST ID: ENST00000508515
  CDS Start-End: 60-3968
agaatgttggctcaattaagaaacatcagggagataaattcaacccagtgtgtctaaaaatgactacaaaacgaagtttgtttgtgcggttggtaccatgtcgctgtctacgaggggaagaggagactgtcactactcttgattattctcattgcagcttagaacaagttccgaaagagatttttacttttgaaaaaaccttggaggaactctatttagatgctaatcagattgaagagcttccaaagcaactttttaactgtcagtctttacacaaactgagtttgccagacaatgatttaacaacgttaccagcatccattgcaaaccttattaatctcagggaactggatgtcagcaagaatggaatacaggagtttccagaaaatataaaaaattgtaaagttttgacaattgtggaggccagtgtaaaccctatttccaagctccctgatggattttctcagctgttaaacctaacccagttgtatctgaatgatgcttttcttgagttcttgccagcaaattttggcagattaactaaactccaaatattagagcttagagaaaaccagttaaaaatgttgcctaaaactatgaatagactgacccagctggaaagactggatttgggaagtaacgaattcacggaagtgcctgaagtacttgagcaactaagtggattgaaagagttttggatggatgctaatagactgacttttattccagggtttattggtagtttgaaacagctcacatatttggatgtttctaaaaataatattgaaatggttgaagaaggaatttcaacatgtgaaaaccttcaagacctcctattatcaagcaattcacttcagcagcttcctgagactattggttcgttgaagaatataacaacgcttaaaatagatgaaaaccagttaatgtatctgccagactctataggagggttaatatcagtagaagaactggattgtagtttcaatgaagttgaagctttgccttcatctattgggcagcttactaacttaagaacttttgctgctgatcataattacttacagcagttgcccccagagattggaagctggaaaaatataactgtgctgtttctccattccaataaacttgagacacttccagaggaaatgggtgatatgcaaaaattaaaagtcattaatttaagtgataatagattaaagaatttaccctttagctttacaaagctacagcaattgacagctatgtggctctcagataatcagtccaaacccctgatacctcttcaaaaagaaactgattcagagacccagaaaatggtgcttaccaactacatgttccctcaacagccaaggactgaggatgttatgtttatatcagataatgaaagttttaacccttcattgtgggaggaacagaggaaacagcgggctcaagttgcatttgaatgtgatgaagacaaagatgaaagggaggcacctcccagggagggaaatttaaaaagatatccaacaccatacccagatgagcttaagaatatggtcaaaactgttcaaaccattgtacatagattaaaagatgaagagaccaatgaagactcaggaagagatttgaaaccacatgaagatcaacaagatataaataaagatgtgggtgtgaagacctcagaaagtactactacagtaaaaagcaaagttgatgaaagagaaaaatatatgataggaaactctgtacagaagatcagtgaacctgaagctgagattagtcctgggagtttaccagtgactgcaaatatgaaagcctctgagaacttgaagcatattgttaaccatgatgatgtttttgaggaatctgaagaactttcttctgatgaagagatgaaaatggcggagatgcgaccaccattaattgaaacctctattaaccagccaaaagtcgtagcacttagtaataacaaaaaagatgatacaaaggaaacagattctttatcagatgaagttacacacaatagcaatcagaataacagcaattgttcttctccatctcggatgtctgattcagtttctcttaatactgatagtagtcaagacacctcactctgctctccagtgaaacaaactcatattgatattaattccaaaatcaggcaagaagatgaaaattttaacagccttttacaaaatggagatattttaaacagttcaacagaggaaaagttcaaagctcatgataaaaaagattttaacttacctgaatatgatttgaatgttgaagagcgattagttctaattgagaaaagtgttgactcaacagccacagctgatgacactcacaaattagatcatatcaatatgaatcttaataaacttataactaatgatacatttcaaccagagatcatggaaagatcaaaaacacaggatattgtgcttggaacaagctttttaagcattaattctaaagaggaaactgagcacttggaaaatggaaacaagtatcctaatttggaatccgtaaataaggtaaatggacattctgaggaaacttcccagtctcctaataggactgaaccacatgacagtgattgttctgttgacttaggtatttccaaaagcactgaagatctctcccctcagaaaagtggtccagttggatctgttgtgaaatctcatagcataactaatatggagattggagggctaaaaatctatgatattcttagtgataatggacctcagcagccaagtacaaccgttaaaatcacatctgctgttgatggaaaaaatatagtcaggagcaagtctgccacactgttgtatgatcaaccattgcaggtatttactggttcttcctcatcttctgatttaatatcaggaacaaaggcaattttcaagtttgattcaaatcataatcccgaagagccaaatataataagaggccccacaagtggcccacaatctgcacctcaaatatatggtcctccacagtataatatccaatacagtagcagtgctgcagtcaaagacactttgtggcactccaaacaaaatccccaaatagaccatgccagttttcctcctcagctccttcctagatcagagagcacagaaaatcaaagttatgctaaacattctgccaatatgaatttctctaatcataacaatgttcgagctaatactgcataccatttacatcagagacttggcccagcaagacatggggaaatgtgggccatctcaccaaacgaccgacttattcctgcagtaactcgaagtacaatccagcgacaaagtagtgtgtcctccacagcctctgtaaatcttggtgatccaggctctacaaggcgggctcagattcctgaaggagattatttatcatacagagagttccactcagcgggaagaactcctccaatgatgccaggatcacagagacccctttctgcacgaacatacagcatagatggtccaaatgcatcaagacctcagagtgctcgaccctctattaatgaaataccagagagaactatgtcagttagtgatttcaattattcacggactagtccttcaaaaagaccaaatgcaagggttggttctgagcattctttattagatcctccaggaaaaagtaaagttcctcgtgactggagagaacaagtacttcgacatattgaagccaaaaagttagaaaagattcgagtgagggttgaaaaggatccagaacttggatttagcatatcaggtggtgtcgggggtagaggaaacccattcagacctgatgatgatggtatatttgtaacaagggtacaacctgaaggaccagcatcaaaattactgcagccaggtgataaaattattcaggctaatggctacagttttataaatattgaacatggacaagcagtgtccttgctaaaaactttccagaatacagttgaactcatcattgtacgagaagtttcctcataagcactgtggacaaaaaaagcggggaagacagcaagatttattggaagatacttacaggggaaattaatattttgactatttttatatataaagaagaactcaaaaaattatgttcaaatttgtacattaatgaaataatggaacttgtggttagagggaaagaaccactgtacagaatataaaggagactgttgaattcataccatataaaacttgttaggtttttaaacatagcaatcaaggctacaaaaacaaacctgtgttgtttttgtatagattgtaggtttatttttggatttcatatacatgactgaactgtgtgcaaggcaatagttagccttgattttagcccagagacagatggcagagctatctctctcatagcttttatgcccttatttttatt

SEQ ID NO: 130442 - DNA, 4257 bp, Homo sapiens
  Payload ID: 5519
  Gene Symbol: ERBB2IP
  Gene Name: erbb2 interacting protein
  Uniprot ID: Q96RT1
  ENST ID: ENST00000511297
  CDS Start-End: 138-4241
caaagtgactgatgaagggaaggaaatcatgtcaagcgaagccttgaaaaagctgccctgagacggtgtcccgccgaaagaatgttggctcaattaagaaacatcagggagataaattcaacccagtgtgtctaaaaatgactacaaaacgaagtttgtttgtgcggttggtaccatgtcgctgtctacgaggggaagaggagactgtcactactcttgattattctcattgcagcttagaacaagttccgaaagagatttttacttttgaaaaaaccttggaggaactctatttagatgctaatcagattgaagagcttccaaagcaactttttaactgtcagtctttacacaaactgagtttgccagacaatgatttaacaacgttaccagcatccattgcaaaccttattaatctcagggaactggatgtcagcaagaatggaatacaggagtttccagaaaatataaaaaattgtaaagttttgacaattgtggaggccagtgtaaaccctatttccaagctccctgatggattttctcagctgttaaacctaacccagttgtatctgaatgatgcttttcttgagttcttgccagcaaattttggcagattaactaaactccaaatattagagcttagagaaaaccagttaaaaatgttgcctaaaactatgaatagactgacccagctggaaagactggatttgggaagtaacgaattcacggaagtgcctgaagtacttgagcaactaagtggattgaaagagttttggatggatgctaatagactgacttttattccagggtttattggtagtttgaaacagctcacatatttggatgtttctaaaaataatattgaaatggttgaagaaggaatttcaacatgtgaaaaccttcaagacctcctattatcaagcaattcacttcagcagcttcctgagactattggttcgttgaagaatataacaacgcttaaaatagatgaaaaccagttaatgtatctgccagactctataggagggttaatatcagtagaagaactggattgtagtttcaatgaagttgaagctttgccttcatctattgggcagcttactaacttaagaacttttgctgctgatcataattacttacagcagttgcccccagagattggaagctggaaaaatataactgtgctgtttctccattccaataaacttgagacacttccagaggaaatgggtgatatgcaaaaattaaaagtcattaatttaagtgataatagattaaagaatttaccctttagctttacaaagctacagcaattgacagctatgtggctctcagataatcagtccaaacccctgatacctcttcaaaaagaaactgattcagagacccagaaaatggtgcttaccaactacatgttccctcaacagccaaggactgaggatgttatgtttatatcagataatgaaagttttaacccttcattgtgggaggaacagaggaaacagcgggctcaagttgcatttgaatgtgatgaagacaaagatgaaagggaggcacctcccagggagggaaatttaaaaagatatccaacaccatacccagatgagcttaagaatatggtcaaaactgttcaaaccattgtacatagattaaaagatgaagagaccaatgaagactcaggaagagatttgaaaccacatgaagatcaacaagatataaataaagatacctcagaaagtactactacagtaaaaagcaaagttgatgaaagagaaaaatatatgataggaaactctgtacagaagatcagtgaacctgaagctgagattagtcctgggagtttaccagtgactgcaaatatgaaagcctctgagaacttgaagcatattgttaaccatgatgatgtttttgaggaatctgaagaactttcttctgatgaagagatgaaaatggcggagatgcgaccaccattaattgaaacctctattaaccagccaaaagtcgtagcacttagtaataacaaaaaagatgatacaaaggaaacagattctttatcagatgaagttacacacaatagcaatcagaataacagcaattgttcttctccatctcggatgtctgattcagtttctcttaatactgatagtagtcaagacacctcactctgctctccagtgaaacaaactcatattgatattaattccaaaatcaggcaagaagatgaaaattttaacagccttttacaaaatggagatattttaaacagttcaacagaggaaaagttcaaagctcatgataaaaaagattttaacttacctgaatatgatttgaatgttgaagagcgattagttctaattgagaaaagtgttgactcaacagccacagctgatgacactcacaaattagatcatatcaatatgaatcttaataaacttataactaatgatacatttcaaccagagatcatggaaagatcaaaaacacaggatattgtgcttggaacaagctttttaagcattaattctaaagaggaaactgagcacttggaaaatggaaacaagtatcctaatttggaatccgtaaataaggtaaatggacattctgaggaaacttcccagtctcctaataggactgaaccacatgacagtgattgttctgttgacttaggtatttccaaaagcactgaagatctctcccctcagaaaagtggtccagttggatctgttgtgaaatctcatagcataactaatatggagattggagggctaaaaatctatgatattcttagtgataatggacctcagcagccaagtacaaccgttaaaatcacatctgctgttgatggaaaaaatatagtcaggagcaagtctgccacactgttgtatgatcaaccattgcaggtatttactggttcttcctcatcttctgatttaatatcaggaacaaaggcaattttcaagtttgattcaaatcataatcccgaagagccaaatataataagaggccccacaagtggcccacaatctgcacctcaaatatatggtcctccacagtataatatccaatacagtagcagtgctgcagtcaaagacactttgtggcactccaaacaaaatccccaaatagaccatgccagttttcctcctcagctccttcctagatcagagagcacagaaaatcaaagttatgctaaacattctgccaatatgaatttctctaatcataacaatgttcgagctaatactgcataccatttacatcagagacttggcccagcaagacatggggaaatgtgggccatctcaccaaacgaccgacttattcctgcagtaactcgaagtacaatccagcgacaaagtagtgtgtcctccacagcctctgtaaatcttggtgatccaggctctacaaggcgggctcagattcctgaaggagattatttatcatacagagagttccactcagcgggaagaactcctccaatgatgccaggatcacagagacccctttctgcacgaacatacagcatagatggtccaaatgcatcaagacctcagagtgctcgaccctctattaatgaaataccagagagaactatgtcagttagtgatttcaattattcacggactagtccttcaaaaagaccaaatgcaagggttggttctgagcattctttattagatcctccaggaaaaagtaaagttcctcgtgactggagagaacaagtacttcgacatattgaagccaaaaagttagaaaagatgcctttgagtaatggacagatgggccagcctctcaggcctcaggcaaattatagtcaaatacatcacccccctcaggcatctgtggcaaggcatccctctagagaacaactaattgattacttgatgctgaaagtggcccaccagcctccatatacacagccccattgttctcctagacaaggccatgaactggcaaaacaagagattcgagtgagggttgaaaaggatccagaacttggatttagcatatcaggtggtgtcgggggtagaggaaacccattcagacctgatgatgatggtatatttgtaacaagggtacaacctgaaggaccagcatcaaaattactgcagccaggtgataaaattattcaggctaatggctacagttttataaatattgaacatggacaagcagtgtccttgctaaaaactttccagaatacagttgaactcatcattgtacgagaagtttcctcataagcactgtggacaaaaa

SEQ ID NO: 130443 - DNA, 474 bp, Homo sapiens
  Payload ID: 5519
  Gene Symbol: ERBB2IP
  Gene Name: erbb2 interacting protein
  ENST ID: ENST00000512354
  CDS Start-End: 1-474
agcatgctgtcaaggtcctttaattccaattttactactgtaagcagttttcactgtggcagctctagggatctgcatggcagccagggcagtcttgccttgagtgttgcagacagaagaggttctggtgggcacatttttcgaaagcatccccagacatccagttcaggagatccttgtcaagatggtatattcatttcaggacagcagaactactcatcagccacacttagtcacaaagatgttcctccagacagcttgatgaaaatgcctttgagtaatggacagatgggccagcctctcaggcctcaggcaaattatagtcaaatacatcacccccctcaggcatctgtggcaaggcatccctctagagaacaactaattgattacttgatgctgaaagtggcccaccagcctccatatacacagccccattgttctcctagacaaggccatgaactggcaaaacaagag

SEQ ID NO: 130444 - DNA, 589 bp, Homo sapiens
  Payload ID: 5519
  Gene Symbol: ERBB2IP
  Gene Name: erbb2 interacting protein
  ENST ID: ENST00000511671
  CDS Start-End: 1-589
atcatacagagagttccactcagcgggaagaactcctccaatgatgccaggatcacagagacccctttctgcacgaacatacagcatagatggtccaaatgcatcaagacctcagagtgctcgaccctctattaatgaaataccagagagaactatgtcagttagtgatttcaattattcacggactagtccttcaaaaagaccaaatgcaagggttggttctgagcattctttattagatcctccaggaaaaagtaaagttcctcgtgactggagagaacaagtacttcgacatattgaagccaaaaagttagaaaagagcatgctgtcaaggtcctttaattccaattttactactgtaagcagttttcactgtggcagctctagggatctgcatggcagccagggcagtcttgccttgagtgttgcagacagaagaggttctggtgggcacatttttcgaaagcatccccagacatccagttcaggagatccttgtcaagatggtatattcatttcaggacagcagaactactcatcagccacacttagtcacaaagatgttcctccagacagcttgatgaaagtg

SEQ ID NO: 130445 - DNA, 4386 bp, Homo sapiens
  Payload ID: 5519
  Gene Symbol: ERBB2IP
  Gene Name: erbb2 interacting protein
  Uniprot ID: Q96RT1
  ENST ID: ENST00000506030
  CDS Start-End: 92-4351
aaaaagctgccctgagacggtgtcccgccgaaagaatgttggctcaattaagaaacatcagggagataaattcaacccagtgtgtctaaaaatgactacaaaacgaagtttgtttgtgcggttggtaccatgtcgctgtctacgaggggaagaggagactgtcactactcttgattattctcattgcagcttagaacaagttccgaaagagatttttacttttgaaaaaaccttggaggaactctatttagatgctaatcagattgaagagcttccaaagcaactttttaactgtcagtctttacacaaactgagtttgccagacaatgatttaacaacgttaccagcatccattgcaaaccttattaatctcagggaactggatgtcagcaagaatggaatacaggagtttccagaaaatataaaaaattgtaaagttttgacaattgtggaggccagtgtaaaccctatttccaagctccctgatggattttctcagctgttaaacctaacccagttgtatctgaatgatgcttttcttgagttcttgccagcaaattttggcagattaactaaactccaaatattagagcttagagaaaaccagttaaaaatgttgcctaaaactatgaatagactgacccagctggaaagactggatttgggaagtaacgaattcacggaagtgcctgaagtacttgagcaactaagtggattgaaagagttttggatggatgctaatagactgacttttattccagggtttattggtagtttgaaacagctcacatatttggatgtttctaaaaataatattgaaatggttgaagaaggaatttcaacatgtgaaaaccttcaagacctcctattatcaagcaattcacttcagcagcttcctgagactattggttcgttgaagaatataacaacgcttaaaatagatgaaaaccagttaatgtatctgccagactctataggagggttaatatcagtagaagaactggattgtagtttcaatgaagttgaagctttgccttcatctattgggcagcttactaacttaagaacttttgctgctgatcataattacttacagcagttgcccccagagattggaagctggaaaaatataactgtgctgtttctccattccaataaacttgagacacttccagaggaaatgggtgatatgcaaaaattaaaagtcattaatttaagtgataatagattaaagaatttaccctttagctttacaaagctacagcaattgacagctatgtggctctcagataatcagtccaaacccctgatacctcttcaaaaagaaactgattcagagacccagaaaatggtgcttaccaactacatgttccctcaacagccaaggactgaggatgttatgtttatatcagataatgaaagttttaacccttcattgtgggaggaacagaggaaacagcgggctcaagttgcatttgaatgtgatgaagacaaagatgaaagggaggcacctcccagggagggaaatttaaaaagatatccaacaccatacccagatgagcttaagaatatggtcaaaactgttcaaaccattgtacatagattaaaagatgaagagaccaatgaagactcaggaagagatttgaaaccacatgaagatcaacaagatataaataaagatgtgggtgtgaagacctcagaaagtactactacagtaaaaagcaaagttgatgaaagagaaaaatatatgataggaaactctgtacagaagatcagtgaacctgaagctgagattagtcctgggagtttaccagtgactgcaaatatgaaagcctctgagaacttgaagcatattgttaaccatgatgatgtttttgaggaatctgaagaactttcttctgatgaagagatgaaaatggcggagatgcgaccaccattaattgaaacctctattaaccagccaaaagtcgtagcacttagtaataacaaaaaagatgatacaaaggaaacagattctttatcagatgaagttacacacaatagcaatcagaataacagcaattgttcttctccatctcggatgtctgattcagtttctcttaatactgatagtagtcaagacacctcactctgctctccagtgaaacaaactcatattgatattaattccaaaatcaggcaagaagatgaaaattttaacagccttttacaaaatggagatattttaaacagttcaacagaggaaaagttcaaagctcatgataaaaaagattttaacttacctgaatatgatttgaatgttgaagagcgattagttctaattgagaaaagtgttgactcaacagccacagctgatgacactcacaaattagatcatatcaatatgaatcttaataaacttataactaatgatacatttcaaccagagatcatggaaagatcaaaaacacaggatattgtgcttggaacaagctttttaagcattaattctaaagaggaaactgagcacttggaaaatggaaacaagtatcctaatttggaatccgtaaataaggtaaatggacattctgaggaaacttcccagtctcctaataggactgaaccacatgacagtgattgttctgttgacttaggtatttccaaaagcactgaagatctctcccctcagaaaagtggtccagttggatctgttgtgaaatctcatagcataactaatatggagattggagggctaaaaatctatgatattcttagtgataatggacctcagcagccaagtacaaccgttaaaatcacatctgctgttgatggaaaaaatatagtcaggagcaagtctgccacactgttgtatgatcaaccattgcaggtatttactggttcttcctcatcttctgatttaatatcaggaacaaaggcaattttcaagtttgattcaaatcataatcccgaagagccaaatataataagaggccccacaagtggcccacaatctgcacctcaaatatatggtcctccacagtataatatccaatacagtagcagtgctgcagtcaaagacactttgtggcactccaaacaaaatccccaaatagaccatgccagttttcctcctcagctccttcctagatcagagagcacagaaaatcaaagttatgctaaacattctgccaatatgaatttctctaatcataacaatgttcgagctaatactgcataccatttacatcagagacttggcccagcaagacatggggaaatgtgggccatctcaccaaacgaccgacttattcctgcagtaactcgaagtacaatccagcgacaaagtagtgtgtcctccacagcctctgtaaatcttggtgatccaggctctacaaggcgggctcagattcctgaaggagattatttatcatacagagagttccactcagcgggaagaactcctccaatgatgccaggatcacagagacccctttctgcacgaacatacagcatagatggtccaaatgcatcaagacctcagagtgctcgaccctctattaatgaaataccagagagaactatgtcagttagtgatttcaattattcacggactagtccttcaaaaagaccaaatgcaagggttggttctgagcattctttattagatcctccaggaaaaagtaaagttcctcgtgactggagagaacaagtacttcgacatattgaagccaaaaagttagaaaagagcatgctgtcaaggtcctttaattccaattttactactgtaagcagttttcactgtggcagctctagggatctgcatggcagccagggcagtcttgccttgagtgttgcagacagaagaggttctggtgggcacatttttcgaatgcctttgagtaatggacagatgggccagcctctcaggcctcaggcaaattatagtcaaatacatcacccccctcaggcatctgtggcaaggcatccctctagagaacaactaattgattacttgatgctgaaagtggcccaccagcctccatatacacagccccattgttctcctagacaaggccatgaactggcaaaacaagagattcgagtgagggttgaaaaggatccagaacttggatttagcatatcaggtggtgtcgggggtagaggaaacccattcagacctgatgatgatggtatatttgtaacaagggtacaacctgaaggaccagcatcaaaattactgcagccaggtgataaaattattcaggctaatggctacagttttataaatattgaacatggacaagcagtgtccttgctaaaaactttccagaatacagttgaactcatcattgtacgagaagtttcctcataagcactgtggacaaaaaaagcggggaagacagcaag

SEQ ID NO: 130446 - DNA, 4545 bp, Homo sapiens
  Payload ID: 5520
  Gene Symbol: ERBB2
  Gene Name: erb-b2 receptor tyrosine kinase 2
  Uniprot ID: P04626
  ENST ID: ENST00000269571
  CDS Start-End: 160-3927
ggagaaaccaggggagccccccgggcagccgcgcgccccttcccacggggccctttactgcgccgcgcgcccggcccccacccctcgcagcaccccgcgccccgcgccctcccagccgggtccagccggagccatggggccggagccgcagtgagcaccatggagctggcggccttgtgccgctgggggctcctcctcgccctcttgccccccggagccgcgagcacccaagtgtgcaccggcacagacatgaagctgcggctccctgccagtcccgagacccacctggacatgctccgccacctctaccagggctgccaggtggtgcagggaaacctggaactcacctacctgcccaccaatgccagcctgtccttcctgcaggatatccaggaggtgcagggctacgtgctcatcgctcacaaccaagtgaggcaggtcccactgcagaggctgcggattgtgcgaggcacccagctctttgaggacaactatgccctggccgtgctagacaatggagacccgctgaacaataccacccctgtcacaggggcctccccaggaggcctgcgggagctgcagcttcgaagcctcacagagatcttgaaaggaggggtcttgatccagcggaacccccagctctgctaccaggacacgattttgtggaaggacatcttccacaagaacaaccagctggctctcacactgatagacaccaaccgctctcgggcctgccacccctgttctccgatgtgtaagggctcccgctgctggggagagagttctgaggattgtcagagcctgacgcgcactgtctgtgccggtggctgtgcccgctgcaaggggccactgcccactgactgctgccatgagcagtgtgctgccggctgcacgggccccaagcactctgactgcctggcctgcctccacttcaaccacagtggcatctgtgagctgcactgcccagccctggtcacctacaacacagacacgtttgagtccatgcccaatcccgagggccggtatacattcggcgccagctgtgtgactgcctgtccctacaactacctttctacggacgtgggatcctgcaccctcgtctgccccctgcacaaccaagaggtgacagcagaggatggaacacagcggtgtgagaagtgcagcaagccctgtgcccgagtgtgctatggtctgggcatggagcacttgcgagaggtgagggcagttaccagtgccaatatccaggagtttgctggctgcaagaagatctttgggagcctggcatttctgccggagagctttgatggggacccagcctccaacactgccccgctccagccagagcagctccaagtgtttgagactctggaagagatcacaggttacctatacatctcagcatggccggacagcctgcctgacctcagcgtcttccagaacctgcaagtaatccggggacgaattctgcacaatggcgcctactcgctgaccctgcaagggctgggcatcagctggctggggctgcgctcactgagggaactgggcagtggactggccctcatccaccataacacccacctctgcttcgtgcacacggtgccctgggaccagctctttcggaacccgcaccaagctctgctccacactgccaaccggccagaggacgagtgtgtgggcgagggcctggcctgccaccagctgtgcgcccgagggcactgctggggtccagggcccacccagtgtgtcaactgcagccagttccttcggggccaggagtgcgtggaggaatgccgagtactgcaggggctccccagggagtatgtgaatgccaggcactgtttgccgtgccaccctgagtgtcagccccagaatggctcagtgacctgttttggaccggaggctgaccagtgtgtggcctgtgcccactataaggaccctcccttctgcgtggcccgctgccccagcggtgtgaaacctgacctctcctacatgcccatctggaagtttccagatgaggagggcgcatgccagccttgccccatcaactgcacccactcctgtgtggacctggatgacaagggctgccccgccgagcagagagccagccctctgacgtccatcatctctgcggtggttggcattctgctggtcgtggtcttgggggtggtctttgggatcctcatcaagcgacggcagcagaagatccggaagtacacgatgcggagactgctgcaggaaacggagctggtggagccgctgacacctagcggagcgatgcccaaccaggcgcagatgcggatcctgaaagagacggagctgaggaaggtgaaggtgcttggatctggcgcttttggcacagtctacaagggcatctggatccctgatggggagaatgtgaaaattccagtggccatcaaagtgttgagggaaaacacatcccccaaagccaacaaagaaatcttagacgaagcatacgtgatggctggtgtgggctccccatatgtctcccgccttctgggcatctgcctgacatccacggtgcagctggtgacacagcttatgccctatggctgcctcttagaccatgtccgggaaaaccgcggacgcctgggctcccaggacctgctgaactggtgtatgcagattgccaaggggatgagctacctggaggatgtgcggctcgtacacagggacttggccgctcggaacgtgctggtcaagagtcccaaccatgtcaaaattacagacttcgggctggctcggctgctggacattgacgagacagagtaccatgcagatgggggcaaggtgcccatcaagtggatggcgctggagtccattctccgccggcggttcacccaccagagtgatgtgtggagttatggtgtgactgtgtgggagctgatgacttttggggccaaaccttacgatgggatcccagcccgggagatccctgacctgctggaaaagggggagcggctgccccagccccccatctgcaccattgatgtctacatgatcatggtcaaatgttggatgattgactctgaatgtcggccaagattccgggagttggtgtctgaattctcccgcatggccagggacccccagcgctttgtggtcatccagaatgaggacttgggcccagccagtcccttggacagcaccttctaccgctcactgctggaggacgatgacatgggggacctggtggatgctgaggagtatctggtaccccagcagggcttcttctgtccagaccctgccccgggcgctgggggcatggtccaccacaggcaccgcagctcatctaccaggagtggcggtggggacctgacactagggctggagccctctgaagaggaggcccccaggtctccactggcaccctccgaaggggctggctccgatgtatttgatggtgacctgggaatgggggcagccaaggggctgcaaagcctccccacacatgaccccagccctctacagcggtacagtgaggaccccacagtacccctgccctctgagactgatggctacgttgcccccctgacctgcagcccccagcctgaatatgtgaaccagccagatgttcggccccagcccccttcgccccgagagggccctctgcctgctgcccgacctgctggtgccactctggaaaggcccaagactctctccccagggaagaatggggtcgtcaaagacgtttttgcctttgggggtgccgtggagaaccccgagtacttgacaccccagggaggagctgcccctcagccccaccctcctcctgccttcagcccagccttcgacaacctctattactgggaccaggacccaccagagcggggggctccacccagcaccttcaaagggacacctacggcagagaacccagagtacctgggtctggacgtgccagtgtgaaccagaaggccaagtccgcagaagccctgatgtgtcctcagggagcagggaaggcctgacttctgctggcatcaagaggtgggagggccctccgaccacttccaggggaacctgccatgccaggaacctgtcctaaggaaccttccttcctgcttgagttcccagatggctggaaggggtccagcctcgttggaagaggaacagcactggggagtctttgtggattctgaggccctgcccaatgagactctagggtccagtggatgccacagcccagcttggccctttccttccagatcctgggtactgaaagccttagggaagctggcctgagaggggaagcggccctaagggagtgtctaagaacaaaagcgacccattcagagactgtccctgaaacctagtactgccccccatgaggaaggaacagcaatggtgtcagtatccaggctttgtacagagtgcttttctgtttagtttttactttttttgttttgtttttttaaagatgaaataaagacccagggggagaatgggtgttgtatggggaggcaagtgtggggggtccttctccacacccactttgtccatttgcaaatatattttggaaaacagcta

SEQ ID NO: 130447 - DNA, 4564 bp, Homo sapiens
  Payload ID: 5520
  Gene Symbol: ERBB2
  Gene Name: erb-b2 receptor tyrosine kinase 2
  Uniprot ID: P04626
  ENST ID: ENST00000406381
  CDS Start-End: 269-3946
taccaaatccgaaaatattgtgaccaggaaccattctgtccaactcttctatttcaggtggcaaagcaaagctatattcaagaccacatgcaaagctactccctgagcaaagagtcacagataaaacgggggcaccagtagaatggccaggacaaacgcagtgcagcacagagactcagaccctggcagccatgcctgcgcaggcagtgatgagagtgacatgtactgttgtggacatgcacaaaagtgagtgtgcaccggcacagacatgaagctgcggctccctgccagtcccgagacccacctggacatgctccgccacctctaccagggctgccaggtggtgcagggaaacctggaactcacctacctgcccaccaatgccagcctgtccttcctgcaggatatccaggaggtgcagggctacgtgctcatcgctcacaaccaagtgaggcaggtcccactgcagaggctgcggattgtgcgaggcacccagctctttgaggacaactatgccctggccgtgctagacaatggagacccgctgaacaataccacccctgtcacaggggcctccccaggaggcctgcgggagctgcagcttcgaagcctcacagagatcttgaaaggaggggtcttgatccagcggaacccccagctctgctaccaggacacgattttgtggaaggacatcttccacaagaacaaccagctggctctcacactgatagacaccaaccgctctcgggcctgccacccctgttctccgatgtgtaagggctcccgctgctggggagagagttctgaggattgtcagagcctgacgcgcactgtctgtgccggtggctgtgcccgctgcaaggggccactgcccactgactgctgccatgagcagtgtgctgccggctgcacgggccccaagcactctgactgcctggcctgcctccacttcaaccacagtggcatctgtgagctgcactgcccagccctggtcacctacaacacagacacgtttgagtccatgcccaatcccgagggccggtatacattcggcgccagctgtgtgactgcctgtccctacaactacctttctacggacgtgggatcctgcaccctcgtctgccccctgcacaaccaagaggtgacagcagaggatggaacacagcggtgtgagaagtgcagcaagccctgtgcccgagtgtgctatggtctgggcatggagcacttgcgagaggtgagggcagttaccagtgccaatatccaggagtttgctggctgcaagaagatctttgggagcctggcatttctgccggagagctttgatggggacccagcctccaacactgccccgctccagccagagcagctccaagtgtttgagactctggaagagatcacaggttacctatacatctcagcatggccggacagcctgcctgacctcagcgtcttccagaacctgcaagtaatccggggacgaattctgcacaatggcgcctactcgctgaccctgcaagggctgggcatcagctggctggggctgcgctcactgagggaactgggcagtggactggccctcatccaccataacacccacctctgcttcgtgcacacggtgccctgggaccagctctttcggaacccgcaccaagctctgctccacactgccaaccggccagaggacgagtgtgtgggcgagggcctggcctgccaccagctgtgcgcccgagggcactgctggggtccagggcccacccagtgtgtcaactgcagccagttccttcggggccaggagtgcgtggaggaatgccgagtactgcaggggctccccagggagtatgtgaatgccaggcactgtttgccgtgccaccctgagtgtcagccccagaatggctcagtgacctgttttggaccggaggctgaccagtgtgtggcctgtgcccactataaggaccctcccttctgcgtggcccgctgccccagcggtgtgaaacctgacctctcctacatgcccatctggaagtttccagatgaggagggcgcatgccagccttgccccatcaactgcacccactcctgtgtggacctggatgacaagggctgccccgccgagcagagagccagccctctgacgtccatcatctctgcggtggttggcattctgctggtcgtggtcttgggggtggtctttgggatcctcatcaagcgacggcagcagaagatccggaagtacacgatgcggagactgctgcaggaaacggagctggtggagccgctgacacctagcggagcgatgcccaaccaggcgcagatgcggatcctgaaagagacggagctgaggaaggtgaaggtgcttggatctggcgcttttggcacagtctacaagggcatctggatccctgatggggagaatgtgaaaattccagtggccatcaaagtgttgagggaaaacacatcccccaaagccaacaaagaaatcttagacgaagcatacgtgatggctggtgtgggctccccatatgtctcccgccttctgggcatctgcctgacatccacggtgcagctggtgacacagcttatgccctatggctgcctcttagaccatgtccgggaaaaccgcggacgcctgggctcccaggacctgctgaactggtgtatgcagattgccaaggggatgagctacctggaggatgtgcggctcgtacacagggacttggccgctcggaacgtgctggtcaagagtcccaaccatgtcaaaattacagacttcgggctggctcggctgctggacattgacgagacagagtaccatgcagatgggggcaaggtgcccatcaagtggatggcgctggagtccattctccgccggcggttcacccaccagagtgatgtgtggagttatggtgtgactgtgtgggagctgatgacttttggggccaaaccttacgatgggatcccagcccgggagatccctgacctgctggaaaagggggagcggctgccccagccccccatctgcaccattgatgtctacatgatcatggtcaaatgttggatgattgactctgaatgtcggccaagattccgggagttggtgtctgaattctcccgcatggccagggacccccagcgctttgtggtcatccagaatgaggacttgggcccagccagtcccttggacagcaccttctaccgctcactgctggaggacgatgacatgggggacctggtggatgctgaggagtatctggtaccccagcagggcttcttctgtccagaccctgccccgggcgctgggggcatggtccaccacaggcaccgcagctcatctaccaggagtggcggtggggacctgacactagggctggagccctctgaagaggaggcccccaggtctccactggcaccctccgaaggggctggctccgatgtatttgatggtgacctgggaatgggggcagccaaggggctgcaaagcctccccacacatgaccccagccctctacagcggtacagtgaggaccccacagtacccctgccctctgagactgatggctacgttgcccccctgacctgcagcccccagcctgaatatgtgaaccagccagatgttcggccccagcccccttcgccccgagagggccctctgcctgctgcccgacctgctggtgccactctggaaaggcccaagactctctccccagggaagaatggggtcgtcaaagacgtttttgcctttgggggtgccgtggagaaccccgagtacttgacaccccagggaggagctgcccctcagccccaccctcctcctgccttcagcccagccttcgacaacctctattactgggaccaggacccaccagagcggggggctccacccagcaccttcaaagggacacctacggcagagaacccagagtacctgggtctggacgtgccagtgtgaaccagaaggccaagtccgcagaagccctgatgtgtcctcagggagcagggaaggcctgacttctgctggcatcaagaggtgggagggccctccgaccacttccaggggaacctgccatgccaggaacctgtcctaaggaaccttccttcctgcttgagttcccagatggctggaaggggtccagcctcgttggaagaggaacagcactggggagtctttgtggattctgaggccctgcccaatgagactctagggtccagtggatgccacagcccagcttggccctttccttccagatcctgggtactgaaagccttagggaagctggcctgagaggggaagcggccctaagggagtgtctaagaacaaaagcgacccattcagagactgtccctgaaacctagtactgccccccatgaggaaggaacagcaatggtgtcagtatccaggctttgtacagagtgcttttctgtttagtttttactttttttgttttgtttttttaaagatgaaataaagacccagggggagaatgggtgttgtatggggaggcaagtgtggggggtccttctccacacccactttgtccatttgcaaatatattttggaaaacagcta

SEQ ID NO: 130448 - DNA, 3238 bp, Homo sapiens
  Payload ID: 5520
  Gene Symbol: ERBB2
  Gene Name: erb-b2 receptor tyrosine kinase 2
  ENST ID: ENST00000445658
  CDS Start-End: 264-3203
gcgcttgctcccaatcacaggagaaggaggaggtggaggaggagggctgcttgaggaagtataagaatgaagttgtgaagctgagattcccctccattgggaccggagaaaccaggggagccccccgggcagccgcgcgccccttcccacggggccctttactgcgccgcgcgcccggcccccacccctcgcagcaccccgcgccccgcgccctcccagccgggtccagccggagccatggggccggagccgcagtgagcaccatggagctggcggccttgtgccgctgggggctcctcctcgccctcttgccccccggagccgcgagcacccaagacaactacctttctacggacgtgggatcctgcaccctcgtctgccccctgcacaaccaagaggtgacagcagaggatggaacacagcggtgtgagaagtgcagcaagccctgtgcccgagtgtgctatggtctgggcatggagcacttgcgagaggtgagggcagttaccagtgccaatatccaggagtttgctggctgcaagaagatctttgggagcctggcatttctgccggagagctttgatggggacccagcctccaacactgccccgctccagccagagcagctccaagtgtttgagactctggaagagatcacaggttacctatacatctcagcatggccggacagcctgcctgacctcagcgtcttccagaacctgcaagtaatccggggacgaattctgcacaatggcgcctactcgctgaccctgcaagggctgggcatcagctggctggggctgcgctcactgagggaactgggcagtggactggccctcatccaccataacacccacctctgcttcgtgcacacggtgccctgggaccagctctttcggaacccgcaccaagctctgctccacactgccaaccggccagaggacgagtgtgtgggcgagggcctggcctgccaccagctgtgcgcccgagggcactgctggggtccagggcccacccagtgtgtcaactgcagccagttccttcggggccaggagtgcgtggaggaatgccgagtactgcaggggctccccagggagtatgtgaatgccaggcactgtttgccgtgccaccctgagtgtcagccccagaatggctcagtgacctgttttggaccggaggctgaccagtgtgtggcctgtgcccactataaggaccctcccttctgcgtggcccgctgccccagcggtgtgaaacctgacctctcctacatgcccatctggaagtttccagatgaggagggcgcatgccagccttgccccatcaactgcacccactcctgtgtggacctggatgacaagggctgccccgccgagcagagagccagccctctgacgtccatcatctctgcggtggttggcattctgctggtcgtggtcttgggggtggtctttgggatcctcatcaagcgacggcagcagaagatccggaagtacacgatgcggagactgctgcaggaaacggagctggtggagccgctgacacctagcggagcgatgcccaaccaggcgcagatgcggatcctgaaagagacggagctgaggaaggtgaaggtgcttggatctggcgcttttggcacagtctacaagggcatctggatccctgatggggagaatgtgaaaattccagtggccatcaaagtgttgagggaaaacacatcccccaaagccaacaaagaaatcttagacgaagcatacgtgatggctggtgtgggctccccatatgtctcccgccttctgggcatctgcctgacatccacggtgcagctggtgacacagcttatgccctatggctgcctcttagaccatgtccgggaaaaccgcggacgcctgggctcccaggacctgctgaactggtgtatgcagattgccaaggggatgagctacctggaggatgtgcggctcgtacacagggacttggccgctcggaacgtgctggtcaagagtcccaaccatgtcaaaattacagacttcgggctggctcggctgctggacattgacgagacagagtaccatgcagatgggggcaaggtgcccatcaagtggatggcgctggagtccattctccgccggcggttcacccaccagagtgatgtgtggagttatggtgtgactgtgtgggagctgatgacttttggggccaaaccttacgatgggatcccagcccgggagatccctgacctgctggaaaagggggagcggctgccccagccccccatctgcaccattgatgtctacatgatcatggtcaaatgttggatgattgactctgaatgtcggccaagattccgggagttggtgtctgaattctcccgcatggccagggacccccagcgctttgtggtcatccagaatgaggacttgggcccagccagtcccttggacagcaccttctaccgctcactgctggaggacgatgacatgggggacctggtggatgctgaggagtatctggtaccccagcagggcttcttctgtccagaccctgccccgggcgctgggggcatggtccaccacaggcaccgcagctcatctaccaggagtggcggtggggacctgacactagggctggagccctctgaagaggaggcccccaggtctccactggcaccctccgaaggggctggctccgatgtatttgatggtgacctgggaatgggggcagccaaggggctgcaaagcctccccacacatgaccccagccctctacagcggtacagtgaggaccccacagtacccctgccctctgagactgatggctacgttgcccccctgacctgcagcccccagcctgaatatgtgaaccagccagatgttcggccccagcccccttcgccccgagagggccctctgcctgctgcccgacctgctggtgccactctggaaaggcccaagactctctccccagggaagaatggggtcgtcaaagacgtttttgcctttgggggtgccgtggagaaccccgagtacttgacaccccagggaggagctgcccctcagccccaccctcctcctgccttcagcccagccttcgacaacctctattactgggaccaggacccaccagagcggggggctccacccagcaccttcaaagggacacctacggcagagaacccagagtacctgggtctggacgtgccagtgtgaaccagaaggccaagtccgcagaagccctgatgtgt

SEQ ID NO: 130449 - DNA, 4341 bp, Homo sapiens
  Payload ID: 5520
  Gene Symbol: ERBB2
  Gene Name: erb-b2 receptor tyrosine kinase 2
  Uniprot ID: P04626
  ENST ID: ENST00000541774
  CDS Start-End: 1-3723
atgccccgggggtcctggaagccacaagtgtgcaccggcacagacatgaagctgcggctccctgccagtcccgagacccacctggacatgctccgccacctctaccagggctgccaggtggtgcagggaaacctggaactcacctacctgcccaccaatgccagcctgtccttcctgcaggatatccaggaggtgcagggctacgtgctcatcgctcacaaccaagtgaggcaggtcccactgcagaggctgcggattgtgcgaggcacccagctctttgaggacaactatgccctggccgtgctagacaatggagacccgctgaacaataccacccctgtcacaggggcctccccaggaggcctgcgggagctgcagcttcgaagcctcacagagatcttgaaaggaggggtcttgatccagcggaacccccagctctgctaccaggacacgattttgtggaaggacatcttccacaagaacaaccagctggctctcacactgatagacaccaaccgctctcgggcctgccacccctgttctccgatgtgtaagggctcccgctgctggggagagagttctgaggattgtcagagcctgacgcgcactgtctgtgccggtggctgtgcccgctgcaaggggccactgcccactgactgctgccatgagcagtgtgctgccggctgcacgggccccaagcactctgactgcctggcctgcctccacttcaaccacagtggcatctgtgagctgcactgcccagccctggtcacctacaacacagacacgtttgagtccatgcccaatcccgagggccggtatacattcggcgccagctgtgtgactgcctgtccctacaactacctttctacggacgtgggatcctgcaccctcgtctgccccctgcacaaccaagaggtgacagcagaggatggaacacagcggtgtgagaagtgcagcaagccctgtgcccgagtgtgctatggtctgggcatggagcacttgcgagaggtgagggcagttaccagtgccaatatccaggagtttgctggctgcaagaagatctttgggagcctggcatttctgccggagagctttgatggggacccagcctccaacactgccccgctccagccagagcagctccaagtgtttgagactctggaagagatcacaggttacctatacatctcagcatggccggacagcctgcctgacctcagcgtcttccagaacctgcaagtaatccggggacgaattctgcacaatggcgcctactcgctgaccctgcaagggctgggcatcagctggctggggctgcgctcactgagggaactgggcagtggactggccctcatccaccataacacccacctctgcttcgtgcacacggtgccctgggaccagctctttcggaacccgcaccaagctctgctccacactgccaaccggccagaggacgagtgtgtgggcgagggcctggcctgccaccagctgtgcgcccgagggcactgctggggtccagggcccacccagtgtgtcaactgcagccagttccttcggggccaggagtgcgtggaggaatgccgagtactgcaggggctccccagggagtatgtgaatgccaggcactgtttgccgtgccaccctgagtgtcagccccagaatggctcagtgacctgttttggaccggaggctgaccagtgtgtggcctgtgcccactataaggaccctcccttctgcgtggcccgctgccccagcggtgtgaaacctgacctctcctacatgcccatctggaagtttccagatgaggagggcgcatgccagccttgccccatcaactgcacccactcctgtgtggacctggatgacaagggctgccccgccgagcagagagccagccctctgacgtccatcatctctgcggtggttggcattctgctggtcgtggtcttgggggtggtctttgggatcctcatcaagcgacggcagcagaagatccggaagtacacgatgcggagactgctgcaggaaacggagctggtggagccgctgacacctagcggagcgatgcccaaccaggcgcagatgcggatcctgaaagagacggagctgaggaaggtgaaggtgcttggatctggcgcttttggcacagtctacaagggcatctggatccctgatggggagaatgtgaaaattccagtggccatcaaagtgttgagggaaaacacatcccccaaagccaacaaagaaatcttagacgaagcatacgtgatggctggtgtgggctccccatatgtctcccgccttctgggcatctgcctgacatccacggtgcagctggtgacacagcttatgccctatggctgcctcttagaccatgtccgggaaaaccgcggacgcctgggctcccaggacctgctgaactggtgtatgcagattgccaaggggatgagctacctggaggatgtgcggctcgtacacagggacttggccgctcggaacgtgctggtcaagagtcccaaccatgtcaaaattacagacttcgggctggctcggctgctggacattgacgagacagagtaccatgcagatgggggcaaggtgcccatcaagtggatggcgctggagtccattctccgccggcggttcacccaccagagtgatgtgtggagttatggtgtgactgtgtgggagctgatgacttttggggccaaaccttacgatgggatcccagcccgggagatccctgacctgctggaaaagggggagcggctgccccagccccccatctgcaccattgatgtctacatgatcatggtcaaatgttggatgattgactctgaatgtcggccaagattccgggagttggtgtctgaattctcccgcatggccagggacccccagcgctttgtggtcatccagaatgaggacttgggcccagccagtcccttggacagcaccttctaccgctcactgctggaggacgatgacatgggggacctggtggatgctgaggagtatctggtaccccagcagggcttcttctgtccagaccctgccccgggcgctgggggcatggtccaccacaggcaccgcagctcatctaccaggagtggcggtggggacctgacactagggctggagccctctgaagaggaggcccccaggtctccactggcaccctccgaaggggctggctccgatgtatttgatggtgacctgggaatgggggcagccaaggggctgcaaagcctccccacacatgaccccagccctctacagcggtacagtgaggaccccacagtacccctgccctctgagactgatggctacgttgcccccctgacctgcagcccccagcctgaatatgtgaaccagccagatgttcggccccagcccccttcgccccgagagggccctctgcctgctgcccgacctgctggtgccactctggaaaggcccaagactctctccccagggaagaatggggtcgtcaaagacgtttttgcctttgggggtgccgtggagaaccccgagtacttgacaccccagggaggagctgcccctcagccccaccctcctcctgccttcagcccagccttcgacaacctctattactgggaccaggacccaccagagcggggggctccacccagcaccttcaaagggacacctacggcagagaacccagagtacctgggtctggacgtgccagtgtgaaccagaaggccaagtccgcagaagccctgatgtgtcctcagggagcagggaaggcctgacttctgctggcatcaagaggtgggagggccctccgaccacttccaggggaacctgccatgccaggaacctgtcctaaggaaccttccttcctgcttgagttcccagatggctggaaggggtccagcctcgttggaagaggaacagcactggggagtctttgtggattctgaggccctgcccaatgagactctagggtccagtggatgccacagcccagcttggccctttccttccagatcctgggtactgaaagccttagggaagctggcctgagaggggaagcggccctaagggagtgtctaagaacaaaagcgacccattcagagactgtccctgaaacctagtactgccccccatgaggaaggaacagcaatggtgtcagtatccaggctttgtacagagtgcttttctgtttagtttttactttttttgttttgtttttttaaagatgaaataaagacccagggggagaatgggtgttgtatggggaggcaagtgtggggggtccttctccacacccactttgtccatttgcaaatatattttggaaaacagcta

SEQ ID NO: 130450 - DNA, 1013 bp, Homo sapiens
  Payload ID: 5520
  Gene Symbol: ERBB2
  Gene Name: erb-b2 receptor tyrosine kinase 2
  ENST ID: ENST00000582648
  CDS Start-End: 166-456
gggaccggagaaaccaggggagccccccgggcagccgcgcgccccttcccacggggccctttactgcgccgcgcgcccggcccccacccctcgcagcaccccgcgccccgcgccctcccagccgggtccagccggagccatggggccggagccgcagtgagcaccatggagctggcggccttgtgccgctgggggctcctcctcgccctcttgccccccggagccgcgagcacccaagtgtgcaccggcacagacatgaagctgcggctccctgccagtcccgagacccacctggacatgctccgccacctctaccagggctgccaggtggtgcagggaaacctggaactcacctacctgcccaccaatgccagcctgtccttcctgcagacaactacctttctacggacgtgggatcctgcaccctcgtctgccccctgcacaaccaagaggtgacagcagaggatggaacacagcggtgtgagaagtgcagcaagccctgtgcccgagtgtgctatggtctgggcatggagcacttgcgagaggtgagggcagttaccagtgccaatatccaggagtttgctggctgcaagaagatctttgggagcctggcatttctgccggagagctttgatggggacccagcctccaacactgccccgctccagccagagcagctccaagtgtttgagactctggaagagatcacaggttacctatacatctcagcatggccggacagcctgcctgacctcagcgtcttccagaacctgcaagtaatccggggacgaattctgcacaatggcgcctactcgctgaccctgcaagggctgggcatcagctggctggggctgcgctcactgagggaactgggcagtggactggccctcatccaccataacacccacctctgcttcgtgcacacggtgccctgggaccagctctttcggaacccgcaccaagctctgctccacactgccaaccggccagaggacgagtgtgtgggcgagggc

SEQ ID NO: 130451 - DNA, 583 bp, Homo sapiens
  Payload ID: 5520
  Gene Symbol: ERBB2
  Gene Name: erb-b2 receptor tyrosine kinase 2
  ENST ID: ENST00000584099
  CDS Start-End: 167-583
gaatgcacagggtgggcctagtcagaagaagcctttcccctgaaatccctctacttcccaagcacgcaagctttctcctgctgttaaacctgcagtgtgcaagggacatgggcggaggggtccttcagtcaggcttctccctgtctgagtgtgcaccggcacagacatgaagctgcggctccctgccagtcccgagacccacctggacatgctccgccacctctaccagggctgccaggtggtgcagggaaacctggaactcacctacctgcccaccaatgccagcctgtccttcctgcaggatatccaggaggtgcagggctacgtgctcatcgctcacaaccaagtgaggcaggtcccactgcagaggctgcggattgtgcgaggcacccagctctttgaggacaactatgccctggccgtgctagacaatggagacccgctgaacaataccacccctgtcacaggggcctccccaggaggcctgcgggagctgcagcttcgaagcctcacagagatcttgaaaggaggggtcttgatccagcggaacccccagctctgctaccaggacacgattttgtgg

SEQ ID NO: 130452 - DNA, 4792 bp, Homo sapiens
  Payload ID: 5520
  Gene Symbol: ERBB2
  Gene Name: erb-b2 receptor tyrosine kinase 2
  Uniprot ID: P04626
  ENST ID: ENST00000584601
  CDS Start-End: 798-4475
agtacgcagtcgcggtacaccggctcacggtcgccctgggagccgctcgccagcgccgctgccccagctagcaggaccaaccgcgccgccaggccggccatcctttctccctggctcgccgccgggggaggagcttaggagtatgaagcttccacttccggagtaaccggaagttcctgtgttctttattctactctccgctgaagtccacacagtttaaattaaagttcccggatttttgtgggcgcctgccccgcccctcgtccccctgctgtgtccatatatcgaggcgatagggttaagggaaggcggacgcctgatgggttaatgagcaaactgaagtgttttccatgatcttttttgagtcgcaattgaagtaccacctcccgagggtgattgcttccccatgcggggtagaacctttgctgtcctgttcaccactctacctccagcacagaatttggcttatgcctactcaatgtgaagatgatgaggatgaaaacctttgtgatgatccacttccacttaatgaatggtggcaaagcaaagctatattcaagaccacatgcaaagctactccctgagcaaagagtcacagataaaacgggggcaccagtagaatggccaggacaaacgcagtgcagcacagagactcagaccctggcagccatgcctgcgcaggcagtgatgagagtgacatgtactgttgtggacatgcacaaaagtgagatacttcaaagattccagaagatatgccccgggggtcctggaagccacaagtgtgcaccggcacagacatgaagctgcggctccctgccagtcccgagacccacctggacatgctccgccacctctaccagggctgccaggtggtgcagggaaacctggaactcacctacctgcccaccaatgccagcctgtccttcctgcaggatatccaggaggtgcagggctacgtgctcatcgctcacaaccaagtgaggcaggtcccactgcagaggctgcggattgtgcgaggcacccagctctttgaggacaactatgccctggccgtgctagacaatggagacccgctgaacaataccacccctgtcacaggggcctccccaggaggcctgcgggagctgcagcttcgaagcctcacagagatcttgaaaggaggggtcttgatccagcggaacccccagctctgctaccaggacacgattttgtggaaggacatcttccacaagaacaaccagctggctctcacactgatagacaccaaccgctctcgggcctgccacccctgttctccgatgtgtaagggctcccgctgctggggagagagttctgaggattgtcagagcctgacgcgcactgtctgtgccggtggctgtgcccgctgcaaggggccactgcccactgactgctgccatgagcagtgtgctgccggctgcacgggccccaagcactctgactgcctggcctgcctccacttcaaccacagtggcatctgtgagctgcactgcccagccctggtcacctacaacacagacacgtttgagtccatgcccaatcccgagggccggtatacattcggcgccagctgtgtgactgcctgtccctacaactacctttctacggacgtgggatcctgcaccctcgtctgccccctgcacaaccaagaggtgacagcagaggatggaacacagcggtgtgagaagtgcagcaagccctgtgcccgagtgtgctatggtctgggcatggagcacttgcgagaggtgagggcagttaccagtgccaatatccaggagtttgctggctgcaagaagatctttgggagcctggcatttctgccggagagctttgatggggacccagcctccaacactgccccgctccagccagagcagctccaagtgtttgagactctggaagagatcacaggttacctatacatctcagcatggccggacagcctgcctgacctcagcgtcttccagaacctgcaagtaatccggggacgaattctgcacaatggcgcctactcgctgaccctgcaagggctgggcatcagctggctggggctgcgctcactgagggaactgggcagtggactggccctcatccaccataacacccacctctgcttcgtgcacacggtgccctgggaccagctctttcggaacccgcaccaagctctgctccacactgccaaccggccagaggacgagtgtgtgggcgagggcctggcctgccaccagctgtgcgcccgagggcactgctggggtccagggcccacccagtgtgtcaactgcagccagttccttcggggccaggagtgcgtggaggaatgccgagtactgcaggggctccccagggagtatgtgaatgccaggcactgtttgccgtgccaccctgagtgtcagccccagaatggctcagtgacctgttttggaccggaggctgaccagtgtgtggcctgtgcccactataaggaccctcccttctgcgtggcccgctgccccagcggtgtgaaacctgacctctcctacatgcccatctggaagtttccagatgaggagggcgcatgccagccttgccccatcaactgcacccactcctgtgtggacctggatgacaagggctgccccgccgagcagagagccagccctctgacgtccatcatctctgcggtggttggcattctgctggtcgtggtcttgggggtggtctttgggatcctcatcaagcgacggcagcagaagatccggaagtacacgatgcggagactgctgcaggaaacggagctggtggagccgctgacacctagcggagcgatgcccaaccaggcgcagatgcggatcctgaaagagacggagctgaggaaggtgaaggtgcttggatctggcgcttttggcacagtctacaagggcatctggatccctgatggggagaatgtgaaaattccagtggccatcaaagtgttgagggaaaacacatcccccaaagccaacaaagaaatcttagacgaagcatacgtgatggctggtgtgggctccccatatgtctcccgccttctgggcatctgcctgacatccacggtgcagctggtgacacagcttatgccctatggctgcctcttagaccatgtccgggaaaaccgcggacgcctgggctcccaggacctgctgaactggtgtatgcagattgccaaggggatgagctacctggaggatgtgcggctcgtacacagggacttggccgctcggaacgtgctggtcaagagtcccaaccatgtcaaaattacagacttcgggctggctcggctgctggacattgacgagacagagtaccatgcagatgggggcaaggtgcccatcaagtggatggcgctggagtccattctccgccggcggttcacccaccagagtgatgtgtggagttatggtgtgactgtgtgggagctgatgacttttggggccaaaccttacgatgggatcccagcccgggagatccctgacctgctggaaaagggggagcggctgccccagccccccatctgcaccattgatgtctacatgatcatggtcaaatgttggatgattgactctgaatgtcggccaagattccgggagttggtgtctgaattctcccgcatggccagggacccccagcgctttgtggtcatccagaatgaggacttgggcccagccagtcccttggacagcaccttctaccgctcactgctggaggacgatgacatgggggacctggtggatgctgaggagtatctggtaccccagcagggcttcttctgtccagaccctgccccgggcgctgggggcatggtccaccacaggcaccgcagctcatctaccaggagtggcggtggggacctgacactagggctggagccctctgaagaggaggcccccaggtctccactggcaccctccgaaggggctggctccgatgtatttgatggtgacctgggaatgggggcagccaaggggctgcaaagcctccccacacatgaccccagccctctacagcggtacagtgaggaccccacagtacccctgccctctgagactgatggctacgttgcccccctgacctgcagcccccagcctgaatatgtgaaccagccagatgttcggccccagcccccttcgccccgagagggccctctgcctgctgcccgacctgctggtgccactctggaaaggcccaagactctctccccagggaagaatggggtcgtcaaagacgtttttgcctttgggggtgccgtggagaaccccgagtacttgacaccccagggaggagctgcccctcagccccaccctcctcctgccttcagcccagccttcgacaacctctattactgggaccaggacccaccagagcggggggctccacccagcaccttcaaagggacacctacggcagagaacccagagtacctgggtctggacgtgccagtgtgaaccagaaggccaagtccgcagaagccctgatgtgtcctcagggagcagggaaggcctgacttctgctggcatcaagaggtgggagggccctccgaccacttccaggggaacctgccatgccaggaacctgtcctaaggaaccttccttcctgcttgagttcccagatggctggaaggggtccagcctcgttggaagaggaacagcactggggagtctttgtggattctgaggccctgcccaatgagactctagggtccagtggatgccacagcccagcttggccctttccttccagatcctgggtactgaaagcctt

SEQ ID NO: 130453 - DNA, 2526 bp, Homo sapiens
  Payload ID: 5520
  Gene Symbol: ERBB2
  Gene Name: erb-b2 receptor tyrosine kinase 2
  ENST ID: ENST00000578199
  CDS Start-End: 542-2353
gtccacacagtttaaattaaagttcccggatttttgtgggcgcctgccccgcccctcgtccccctgctgtgtccatatatcgaggcgatagggttaagggaaggcggacgcctgatgggttaatgagcaaactgaagtgttttccatgatcttttttgagtcgcaattgaagtaccacctcccgagggtgattgcttccccatgcggggtagaacctttgctgtcctgttcaccactctacctccagcacagaatttggcttatgcctactcaatgtgaagatgatgaggatgaaaacctttgtgatgatccacttccacttaatgaatggtggcaaagcaaagctatattcaagaccacatgcaaagctactccctgagcaaagagtcacagataaaacgggggcaccagtagaatggccaggacaaacgcagtgcagcacagagactcagaccctggcagccatgcctgcgcaggcagtgatgagagtgacatgtactgttgtggacatgcacaaaagtgagtgtgcaccggcacagacatgaagctgcggctccctgccagtcccgagacccacctggacatgctccgccacctctaccagggctgccaggtggtgcagggaaacctggaactcacctacctgcccaccaatgccagcctgtccttcctgcaggatatccaggaggtgcagggctacgtgctcatcgctcacaaccaagtgaggcaggtcccactgcagaggctgcggattgtgcgaggcacccagctctttgaggacaactatgccctggccgtgctagacaatggagacccgctgaacaataccacccctgtcacaggggcctccccaggaggcctgcgggagctgcagcttcgaagcctcacagagatcttgaaaggaggggtcttgatccagcggaacccccagctctgctaccaggacacgattttgtggaaggacatcttccacaagaacaaccagctggctctcacactgatagacaccaaccgctctcgggcctgccacccctgttctccgatgtgtaagggctcccgctgctggggagagagttctgaggattgtcagagcctgacgcgcactgtctgtgccggtggctgtgcccgctgcaaggggccactgcccactgactgctgccatgagcagtgtgctgccggctgcacgggccccaagcactctgactgcctggcctgcctccacttcaaccacagtggcatctgtgagctgcactgcccagccctggtcacctacaacacagacacgtttgagtccatgcccaatcccgagggccggtatacattcggcgccagctgtgtgactgcctgtccctacaactacctttctacggacgtgggatcctgcaccctcgtctgccccctgcacaaccaagaggtgacagcagaggatggaacacagcggtgtgagaagtgcagcaagccctgtgcccgagtgtgctatggtctgggcatggagcacttgcgagaggtgagggcagttaccagtgccaatatccaggagtttgctggctgcaagaagatctttgggagcctggcatttctgccggagagctttgatggggacccagcctccaacactgccccgctccagccagagcagctccaagtgtttgagactctggaagagatcacaggttacctatacatctcagcatggccggacagcctgcctgacctcagcgtcttccagaacctgcaagtaatccggggacgaattctgcacaatggcgcctactcgctgaccctgcaagggctgggcatcagctggctggggctgcgctcactgagggaactgggcagtggactggccctcatccaccataacacccacctctgcttcgtgcacacggtgccctgggaccagctctttcggaacccgcaccaagctctgctccacactgccaaccggccagaggacgagtgtgtgggcgagggcctggcctgccaccagctgtgcgcccgagggcactgctggggtccagggcccacccagtgtgtcaactgcagccagttccttcggggccaggagtgcgtggaggaatgccgagtactgcaggggctccccagggagtatgtgaatgccaggcactgtttgccgtgccaccctgagtgtcagccccagaatggctcagtgacctgttttggaccggaggctgaccagtgtgtggcctgtgcccactataaggaccctcccttctgcgtggcccgctgccccagcggtgtgaaacctgacctctcctacatgcccatctggaagtttccagatgaggagggcgcatgccagccttgccccatcaactgcacccactcgtgagtccaacggtcttttctgcagaaaggaggactttcctttcaggggtctttctggggctcttactataaaaggggaccaactctccctttgtcatatcttgtttctgatgacaaaaataacacattgttaaaattgtaaaattaaaacatgaaatataaattaatgccctagca

SEQ ID NO: 130454 - DNA, 754 bp, Homo sapiens
  Payload ID: 5520
  Gene Symbol: ERBB2
  Gene Name: erb-b2 receptor tyrosine kinase 2
  ENST ID: ENST00000580074
  CDS Start-End: 1-754
ttccagatgaggagggcgcatgccagccttgccccatcaactgcacccactcccctctgacgtccatcatctctgcggtggttggcattctgctggtcgtggtcttgggggtggtctttgggatcctcatcaagcgacggcagcagaagatccggaagtacacgatgcggagactgctgcaggaaacggagctggtggagccgctgacacctagcggagcgatgcccaaccaggcgcagatgcggatcctgaaagagacggagctgaggaaggtgaaggtgcttggatctggcgcttttggcacagtctacaagggcatctggatccctgatggggagaatgtgaaaattccagtggccatcaaagtgttgagggaaaacacatcccccaaagccaacaaagaaatcttagacgaagcatacgtgatggctggtgtgggctccccatatgtctcccgccttctgggcatctgcctgacatccacggtgcagctggtgacacagcttatgccctatggctgcctcttagaccatgtccgggaaaaccgcggacgcctgggctcccaggacctgctgaactggtgtatgcagattgccaaggggatgagctacctggaggatgtgcggctcgtacacagggacttggccgctcggaacgtgctggtcaagagtcccaaccatgtcaaaattacagacttcgggctggctcggctgctggacattgacgagacagagtaccatgcagatgggggcaa

SEQ ID NO: 130455 - DNA, 4523 bp, Homo sapiens
  Payload ID: 5520
  Gene Symbol: ERBB2
  Gene Name: erb-b2 receptor tyrosine kinase 2
  ENST ID: ENST00000578373
  CDS Start-End: 160-432
ggagaaaccaggggagccccccgggcagccgcgcgccccttcccacggggccctttactgcgccgcgcgcccggcccccacccctcgcagcaccccgcgccccgcgccctcccagccgggtccagccggagccatggggccggagccgcagtgagcaccatggagctggcggccttgtgccgctgggggctcctcctcgccctcttgccccccggagccgcgagcacccaagtgtgcaccggcacagacatgaagctgcggctccctgccagtcccgagacccacctggacatgctccgccacctctaccagggctgccaggtggtgcagggaaacctggaactcacctacctgcccaccaatgccagcctgtccttcctgcaggtgaggcccgtgggcaacccagccaggccctgcctccagctgggctgagccctctgtttacaggatatccaggaggtgcagggctacgtgctcatcgctcacaaccaagtgaggcaggtcccactgcagaggctgcggattgtgcgaggcacccagctctttgaggacaactatgccctggccgtgctagacaatggagacccgctgaacaataccacccctgtcacaggggcctccccaggaggcctgcgggagctgcagcttcgaagcctcacagagatcttgaaaggaggggtcttgatccagcggaacccccagctctgctaccaggacacgattttgtggaaggacatcttccacaagaacaaccagctggctctcacactgatagacaccaaccgctctcgggcctgccacccctgttctccgatgtgtaagggctcccgctgctggggagagagttctgaggattgtcagagcctgacgcgcactgtctgtgccggtggctgtgcccgctgcaaggggccactgcccactgactgctgccatgagcagtgtgctgccggctgcacgggccccaagcactctgactgcctggcctgcctccacttcaaccacagtggcatctgtgagctgcactgcccagccctggtcacctacaacacagacacgtttgagtccatgcccaatcccgagggccggtatacattcggcgccagctgtgtgactgcctgtccctacaactacctttctacggacgtgggatcctgcaccctcgtctgccccctgcacaaccaagaggtgacagcagaggatggaacacagcggtgtgagaagtgcagcaagccctgtgcccgagtgtgctatggtctgggcatggagcacttgcgagaggtgagggcagttaccagtgccaatatccaggagtttgctggctgcaagaagatctttgggagcctggcatttctgccggagagctttgatggggacccagcctccaacactgccccgctccagccagagcagctccaagtgtttgagactctggaagagatcacaggttacctatacatctcagcatggccggacagcctgcctgacctcagcgtcttccagaacctgcaagtaatccggggacgaattctgcacaatggcgcctactcgctgaccctgcaagggctgggcatcagctggctggggctgcgctcactgagggaactgggcagtggactggccctcatccaccataacacccacctctgcttcgtgcacacggtgccctgggaccagctctttcggaacccgcaccaagctctgctccacactgccaaccggccagaggacgagtgtgtgggcgagggcctggcctgccaccagctgtgcgcccgagggcactgctggggtccagggcccacccagtgtgtcaactgcagccagttccttcggggccaggagtgcgtggaggaatgccgagtactgcaggggctccccagggagtatgtgaatgccaggcactgtttgccgtgccaccctgagtgtcagccccagaatggctcagtgacctgttttggaccggaggctgaccagtgtgtggcctgtgcccactataaggaccctcccttctgcgtggcccgctgccccagcggtgtgaaacctgacctctcctacatgcccatctggaagtttccagatgaggagggcgcatgccagccttgccccatcaactgcacccactcctgtgtggacctggatgacaagggctgccccgccgagcagagagccagccctctgacgtccatcatctctgcggtggttggcattctgctggtcgtggtcttgggggtggtctttgggatcctcatcaagcgacggcagcagaagatccggaagtacacgatgcggagactgctgcaggaaacggagctggtggagccgctgacacctagcggagcgatgcccaaccaggcgcagatgcggatcctgaaagagacggagctgaggaaggtgaaggtgcttggatctggcgcttttggcacagtctacaagggcatctggatccctgatggggagaatgtgaaaattccagtggccatcaaagtgttgagggaaaacacatcccccaaagccaacaaagaaatcttagacgaagcatacgtgatggctggtgtgggctccccatatgtctcccgccttctgggcatctgcctgacatccacggtgcagctggtgacacagcttatgccctatggctgcctcttagaccatgtccgggaaaaccgcggacgcctgggctcccaggacctgctgaactggtgtatgcagattgccaaggggatgagctacctggaggatgtgcggctcgtacacagggacttggccgctcggaacgtgctggtcaagagtcccaaccatgtcaaaattacagacttcgggctggctcggctgctggacattgacgagacagagtaccatgcagatgggggcaaggtgcccatcaagtggatggcgctggagtccattctccgccggcggttcacccaccagagtgatgtgtggagttatggtgtgactgtgtgggagctgatgacttttggggccaaaccttacgatgggatcccagcccgggagatccctgacctgctggaaaagggggagcggctgccccagccccccatctgcaccattgatgtctacatgatcatggtcaaatgttggatgattgactctgaatgtcggccaagattccgggagttggtgtctgaattctcccgcatggccagggacccccagcgctttgtggtcatccagaatgaggacttgggcccagccagtcccttggacagcaccttctaccgctcactgctggaggacgatgacatgggggacctggtggatgctgaggagtatctggtaccccagcagggcttcttctgtccagaccctgccccgggcgctgggggcatggtccaccacaggcaccgcagctcatctaccaggagtggcggtggggacctgacactagggctggagccctctgaagaggaggcccccaggtctccactggcaccctccgaaggggctggctccgatgtatttgatggtgacctgggaatgggggcagccaaggggctgcaaagcctccccacacatgaccccagccctctacagcggtacagtgaggaccccacagtacccctgccctctgagactgatggctacgttgcccccctgacctgcagcccccagcctgaatatgtgaaccagccagatgttcggccccagcccccttcgccccgagagggccctctgcctgctgcccgacctgctggtgccactctggaaaggcccaagactctctccccagggaagaatggggtcgtcaaagacgtttttgcctttgggggtgccgtggagaaccccgagtacttgacaccccagggaggagctgcccctcagccccaccctcctcctgccttcagcccagccttcgacaacctctattactgggaccaggacccaccagagcggggggctccacccagcaccttcaaagggacacctacggcagagaacccagagtacctgggtctggacgtgccagtgtgaaccagaaggccaagtccgcagaagccctgatgtgtcctcagggagcagggaaggcctgacttctgctggcatcaagaggtgggagggccctccgaccacttccaggggaacctgccatgccaggaacctgtcctaaggaaccttccttcctgcttgagttcccagatggctggaaggggtccagcctcgttggaagaggaacagcactggggagtctttgtggattctgaggccctgcccaatgagactctagggtccagtggatgccacagcccagcttggccctttccttccagatcctgggtactgaaagccttagggaagctggcctgagaggggaagcggccctaagggagtgtctaagaacaaaagcgacccattcagagactgtccctgaaacctagtactgccccccatgaggaaggaacagcaatggtgtcagtatccaggctttgtacagagtgcttttctgtttagtttttactttttttgttttgtttttttaaagatgaaataaagacccagggggagaa

SEQ ID NO: 130456 - DNA, 3730 bp, Homo sapiens
  Payload ID: 5520
  Gene Symbol: ERBB2
  Gene Name: erb-b2 receptor tyrosine kinase 2
  ENST ID: ENST00000584450
  CDS Start-End: 216-3383
gcttgaggaagtataagaatgaagttgtgaagctgagattcccctccattgggaccggagaaaccaggggagccccccgggcagccgcgcgccccttcccacggggccctttactgcgccgcgcgcccggcccccacccctcgcagcaccccgcgccccgcgccctcccagccgggtccagccggagccatggggccggagccgcagtgagcaccatggagctggcggccttgtgccgctgggggctcctcctcgccctcttgccccccggagccgcgagcacccaagtgtgcaccggcacagacatgaagctgcggctccctgccagtcccgagacccacctggacatgctccgccacctctaccagggctgccaggtggtgcagggaaacctggaactcacctacctgcccaccaatgccagcctgtccttcctgcaggatatccaggaggtgcagggctacgtgctcatcgctcacaaccaagtgaggcaggtcccactgcagaggctgcggattgtgcgaggcacccagctctttgaggacaactatgccctggccgtgctagacaatggagacccgctgaacaataccacccctgtcacaggggcctccccaggaggcctgcgggagctgcagcttcgaagcctcacagagatcttgaaaggaggggtcttgatccagcggaacccccagctctgctaccaggacacgattttgtggaaggacatcttccacaagaacaaccagctggctctcacactgatagacaccaaccgctctcgggcctgccacccctgttctccgatgtgtaagggctcccgctgctggggagagagttctgaggattgtcagagcctgacgcgcactgtctgtgccggtggctgtgcccgctgcaaggggccactgcccactgactgctgccatgagcagtgtgctgccggctgcacgggccccaagcactctgactgcctggcctgcctccacttcaaccacagtggcatctgtgagctgcactgcccagccctggtcacctacaacacagacacgtttgagtccatgcccaatcccgagggccggtatacattcggcgccagctgtgtgactgcctgtccctacaactacctttctacggacgtgggatcctgcaccctcgtctgccccctgcacaaccaagaggtgacagcagaggatggaacacagcggtgtgagaagtgcagcaagccctgtgcccgagtgtgctatggtctgggcatggagcacttgcgagaggtgagggcagttaccagtgccaatatccaggagtttgctggctgcaagaagatctttgggagcctggcatttctgccggagagctttgatggggacccagcctccaacactgccccgctccagccagagcagctccaagtgtttgagactctggaagagatcacaggttacctatacatctcagcatggccggacagcctgcctgacctcagcgtcttccagaacctgcaagtaatccggggacgaattctgcacaatggcgcctactcgctgaccctgcaagggctgggcatcagctggctggggctgcgctcactgagggaactgggcagtggactggccctcatccaccataacacccacctctgcttcgtgcacacggtgccctgggaccagctctttcggaacccgcaccaagctctgctccacactgccaaccggccagaggacgagtgtgtgggcgagggcctggcctgccaccagctgtgcgcccgagggcactgctggggtccagggcccacccagtgtgtcaactgcagccagttccttcggggccaggagtgcgtggaggaatgccgagtactgcaggggctccccagggagtatgtgaatgccaggcactgtttgccgtgccaccctgagtgtcagccccagaatggctcagtgacctgttttggaccggaggctgaccagtgtgtggcctgtgcccactataaggaccctcccttctgcgtggcccgctgccccagcggtgtgaaacctgacctctcctacatgcccatctggaagtttccagatgaggagggcgcatgccagccttgccccatcaactgcacccactcctgtgtggacctggatgacaagggctgccccgccgagcagagagccagccctctgacgtccatcatctctgcggtggttggcattctgctggtcgtggtcttgggggtggtctttgggatcctcatcaagcgacggcagcagaagatccggaagtacacgatgcggagactgctgcaggaaacggagctggtggagccgctgacacctagcggagcgatgcccaaccaggcgcagatgcggatcctgaaagagacggagctgaggaaggtgaaggtgcttggatctggcgcttttggcacagtctacaagggcatctggatccctgatggggagaatgtgaaaattccagtggccatcaaagtgttgagggaaaacacatcccccaaagccaacaaagaaatcttagacgaagcatacgtgatggctggtgtgggctccccatatgtctcccgccttctgggcatctgcctgacatccacggtgcagctggtgacacagcttatgccctatggctgcctcttagaccatgtccgggaaaaccgcggacgcctgggctcccaggacctgctgaactggtgtatgcagattgccaaggggatgagctacctggaggatgtgcggctcgtacacagggacttggccgctcggaacgtgctggtcaagagtcccaaccatgtcaaaattacagacttcgggctggctcggctgctggacattgacgagacagagtaccatgcagatgggggcaaggtgcccatcaagtggatggcgctggagtccattctccgccggcggttcacccaccagagtgatgtgtggagttatggtgtgactgtgtgggagctgatgacttttggggccaaaccttacgatgggatcccagcccgggagatccctgacctgctggaaaagggggagcggctgccccagccccccatctgcaccattgatgtctacatgatcatggtcaaatgttggatgattgactctgaatgtcggccaagattccgggagttggtgtctgaattctcccgcatggccagggacccccagcgctttgtggtcatccagaatgaggacttgggcccagccagtcccttggacagcaccttctaccgctcactgctggaggacgatgacatgggggacctggtggatgctgaggagtatctggtaccccagcagggcttcttctgtccagaccctgccccgggcgctgggggcatggtccaccacaggcaccgcagctcatctaccaggaatatgtgaaccagccagatgttcggccccagcccccttcgccccgagagggccctctgcctgctgcccgacctgctggtgccactctggaaaggcccaagactctctccccagggaagaatggggtcgtcaaagacgtttttgcctttgggggtgccgtggagaaccccgagtacttgacaccccagggaggagctgcccctcagccccaccctcctcctgccttcagcccagccttcgacaacctctattactgggaccaggacccaccagagcggggggctccacccagcaccttcaaagggacacctacggcagagaacccagagtacctgggtctggacgtgccagtgtga

SEQ ID NO: 130457 - DNA, 559 bp, Homo sapiens
  Payload ID: 5520
  Gene Symbol: ERBB2
  Gene Name: erb-b2 receptor tyrosine kinase 2
  ENST ID: ENST00000578709
  CDS Start-End: 253-559
acacagggctgtgggtgagagagacagctgaagtgtcagcgtgaggggccagtgtggggctgcggctgggagggctggggtggggcccagggtagttgtgcctgtccttgggtgatggaatgatctggaaagagattccttccctgccctccacctgtgagaagcccctctagagtgacatctccatcttatgtttggccacccatcctccccctgggaagagagccgaggtgggtgtgcaccggcacagacatgaagctgcggctccctgccagtcccgagacccacctggacatgctccgccacctctaccagggctgccaggtggtgcagggaaacctggaactcacctacctgcccaccaatgccagcctgtccttcctgcaggatatccaggaggtgcagggctacgtgctcatcgctcacaaccaagtgaggcaggtcccactgcagaggctgcggattgtgcgaggcacccagctctttgaggacaactatgccctggccgtgctagacaatggagacccgctgaacaataccacccctgtcacaggggcct

SEQ ID NO: 130458 - DNA, 529 bp, Homo sapiens
  Payload ID: 5520
  Gene Symbol: ERBB2
  Gene Name: erb-b2 receptor tyrosine kinase 2
  ENST ID: ENST00000582818
  CDS Start-End: 1-529
gccgtgccaccctgagtgtcagccccagaatggctcagtgacctgttttggaccggaggctgaccagtgtgtggcctgtgcccactataaggaccctcccttctgcgtggcccgctgccccagcggtgtgaaacctgacctctcctacatgcccatctggaagtttccagatgaggagggcgcatgccagccttgccccatcaactgcacccactcctgtgtggacctggatgacaagggctgccccgccgagcagagagccagccctctgacgtccatcatctctgcggtggttggcattctgctggtcgtggtcttgggggtggtctttgggatcctcatcaagcgacggcagcagaagatccggaagtacacgatgcggagactgctgcaggaaacggagctggtggagccgctgacacctagcggagcgatgcccaaccaggcgcagatgcggatcctgaaagagacggagctgaggaaggtgaagggcatctggatccctgatggggagaatgtgaaaattcca

SEQ ID NO: 130459 - DNA, 497 bp, Homo sapiens
  Payload ID: 5520
  Gene Symbol: ERBB2
  Gene Name: erb-b2 receptor tyrosine kinase 2
  ENST ID: ENST00000578502
  CDS Start-End: 1-497
accacagtggcatctgtgagctgcactgcccagccctggtcacctacaacacagacacgtttgagtccatgcccaatcccgagggccggtatacattcggcgccagctgtgtgactgcctgtccctacaactacctttctacggacgtgggatcctgcaccctcgtctgccccctgcacaaccaagaggtgacagcagaggatggaacacagcggtgtgagaagtgcagcaagccctgtgcccgagtgtgctatggtctgggcatggagcacttgcgagaggtgagggcagttaccagtgccaatatccaggagtttgctggctgcaagaagatctttgggagcctggcatttctgccggagagctttgatggagtctcactctgtcagcaggctggagtgcagtggtacgatcttggctcactgcaacctctgcctcctggattcaagcaattctcctgcctcagtctcctgagtagctgggactacagggaccca

SEQ ID NO: 130460 - DNA, 5919 bp, Homo sapiens
  Payload ID: 5521
  Gene Symbol: ERBB3
  Gene Name: erb-b2 receptor tyrosine kinase 3
  Uniprot ID: P21860
  ENST ID: ENST00000267101
  CDS Start-End: 441-4469
attacccttccctggatctgggggctttcggaatctcgacctccccttggcctatctcctgcagaaaaattagggtgagccccatcctcgatctgctccgccaagttgcgggaccgcggggcgtggcacgctcggggcaggcggtccgaggctccgcaatccctactccagcctcgcgcgggagggggcgcggccgtgactcacccccttccctctgcgttcctccctccctctctctctctctctcacacacacacacccctcccctgccatccctccccggactccggctccggctccgattgcaatttgcaacctccgctgccgtcgccgcagcagccaccaattcgccagcggttcaggtggctcttgcctcgatgtcctagcctaggggcccccgggccggacttggctgggctcccttcaccctctgcggagtcatgagggcgaacgacgctctgcaggtgctgggcttgcttttcagcctggcccggggctccgaggtgggcaactctcaggcagtgtgtcctgggactctgaatggcctgagtgtgaccggcgatgctgagaaccaataccagacactgtacaagctctacgagaggtgtgaggtggtgatggggaaccttgagattgtgctcacgggacacaatgccgacctctccttcctgcagtggattcgagaagtgacaggctatgtcctcgtggccatgaatgaattctctactctaccattgcccaacctccgcgtggtgcgagggacccaggtctacgatgggaagtttgccatcttcgtcatgttgaactataacaccaactccagccacgctctgcgccagctccgcttgactcagctcaccgagattctgtcagggggtgtttatattgagaagaacgataagctttgtcacatggacacaattgactggagggacatcgtgagggaccgagatgctgagatagtggtgaaggacaatggcagaagctgtcccccctgtcatgaggtttgcaaggggcgatgctggggtcctggatcagaagactgccagacattgaccaagaccatctgtgctcctcagtgtaatggtcactgctttgggcccaaccccaaccagtgctgccatgatgagtgtgccgggggctgctcaggccctcaggacacagactgctttgcctgccggcacttcaatgacagtggagcctgtgtacctcgctgtccacagcctcttgtctacaacaagctaactttccagctggaacccaatccccacaccaagtatcagtatggaggagtttgtgtagccagctgtccccataactttgtggtggatcaaacatcctgtgtcagggcctgtcctcctgacaagatggaagtagataaaaatgggctcaagatgtgtgagccttgtgggggactatgtcccaaagcctgtgagggaacaggctctgggagccgcttccagactgtggactcgagcaacattgatggatttgtgaactgcaccaagatcctgggcaacctggactttctgatcaccggcctcaatggagacccctggcacaagatccctgccctggacccagagaagctcaatgtcttccggacagtacgggagatcacaggttacctgaacatccagtcctggccgccccacatgcacaacttcagtgttttttccaatttgacaaccattggaggcagaagcctctacaaccggggcttctcattgttgatcatgaagaacttgaatgtcacatctctgggcttccgatccctgaaggaaattagtgctgggcgtatctatataagtgccaataggcagctctgctaccaccactctttgaactggaccaaggtgcttcgggggcctacggaagagcgactagacatcaagcataatcggccgcgcagagactgcgtggcagagggcaaagtgtgtgacccactgtgctcctctgggggatgctggggcccaggccctggtcagtgcttgtcctgtcgaaattatagccgaggaggtgtctgtgtgacccactgcaactttctgaatggggagcctcgagaatttgcccatgaggccgaatgcttctcctgccacccggaatgccaacccatggagggcactgccacatgcaatggctcgggctctgatacttgtgctcaatgtgcccattttcgagatgggccccactgtgtgagcagctgcccccatggagtcctaggtgccaagggcccaatctacaagtacccagatgttcagaatgaatgtcggccctgccatgagaactgcacccaggggtgtaaaggaccagagcttcaagactgtttaggacaaacactggtgctgatcggcaaaacccatctgacaatggctttgacagtgatagcaggattggtagtgattttcatgatgctgggcggcacttttctctactggcgtgggcgccggattcagaataaaagggctatgaggcgatacttggaacggggtgagagcatagagcctctggaccccagtgagaaggctaacaaagtcttggccagaatcttcaaagagacagagctaaggaagcttaaagtgcttggctcgggtgtctttggaactgtgcacaaaggagtgtggatccctgagggtgaatcaatcaagattccagtctgcattaaagtcattgaggacaagagtggacggcagagttttcaagctgtgacagatcatatgctggccattggcagcctggaccatgcccacattgtaaggctgctgggactatgcccagggtcatctctgcagcttgtcactcaatatttgcctctgggttctctgctggatcatgtgagacaacaccggggggcactggggccacagctgctgctcaactggggagtacaaattgccaagggaatgtactaccttgaggaacatggtatggtgcatagaaacctggctgcccgaaacgtgctactcaagtcacccagtcaggttcaggtggcagattttggtgtggctgacctgctgcctcctgatgataagcagctgctatacagtgaggccaagactccaattaagtggatggcccttgagagtatccactttgggaaatacacacaccagagtgatgtctggagctatggtgtgacagtttgggagttgatgaccttcggggcagagccctatgcagggctacgattggctgaagtaccagacctgctagagaagggggagcggttggcacagccccagatctgcacaattgatgtctacatggtgatggtcaagtgttggatgattgatgagaacattcgcccaacctttaaagaactagccaatgagttcaccaggatggcccgagacccaccacggtatctggtcataaagagagagagtgggcctggaatagcccctgggccagagccccatggtctgacaaacaagaagctagaggaagtagagctggagccagaactagacctagacctagacttggaagcagaggaggacaacctggcaaccaccacactgggctccgccctcagcctaccagttggaacacttaatcggccacgtgggagccagagccttttaagtccatcatctggatacatgcccatgaaccagggtaatcttggggagtcttgccaggagtctgcagtttctgggagcagtgaacggtgcccccgtccagtctctctacacccaatgccacggggatgcctggcatcagagtcatcagaggggcatgtaacaggctctgaggctgagctccaggagaaagtgtcaatgtgtaggagccggagcaggagccggagcccacggccacgcggagatagcgcctaccattcccagcgccacagtctgctgactcctgttaccccactctccccacccgggttagaggaagaggatgtcaacggttatgtcatgccagatacacacctcaaaggtactccctcctcccgggaaggcaccctttcttcagtgggtctcagttctgtcctgggtactgaagaagaagatgaagatgaggagtatgaatacatgaaccggaggagaaggcacagtccacctcatccccctaggccaagttcccttgaggagctgggttatgagtacatggatgtggggtcagacctcagtgcctctctgggcagcacacagagttgcccactccaccctgtacccatcatgcccactgcaggcacaactccagatgaagactatgaatatatgaatcggcaacgagatggaggtggtcctgggggtgattatgcagccatgggggcctgcccagcatctgagcaagggtatgaagagatgagagcttttcaggggcctggacatcaggccccccatgtccattatgcccgcctaaaaactctacgtagcttagaggctacagactctgcctttgataaccctgattactggcatagcaggcttttccccaaggctaatgcccagagaacgtaactcctgctccctgtggcactcagggagcatttaatggcagctagtgcctttagagggtaccgtcttctccctattccctctctctcccaggtcccagccccttttccccagtcccagacaattccattcaatctttggaggcttttaaacattttgacacaaaattcttatggtatgtagccagctgtgcactttcttctctttcccaaccccaggaaaggttttccttattttgtgtgctttcccagtcccattcctcagcttcttcacaggcactcctggagatatgaaggattactctccatatcccttcctctcaggctcttgactacttggaactaggctcttatgtgtgcctttgtttcccatcagactgtcaagaagaggaaagggaggaaacctagcagaggaaagtgtaattttggtttatgactcttaaccccctagaaagacagaagcttaaaatctgtgaagaaagaggttaggagtagatattgattactatcataattcagcacttaactatgagccaggcatcatactaaacttcacctacattatctcacttagtcctttatcatccttaaaacaattctgtgacatacatattatctcattttacacaaagggaagtcgggcatggtggctcatgcctgtaatctcagcactttgggaggctgaggcagaaggattacctgaggcaaggagtttgagaccagcttagccaacatagtaagacccccatctctttaaaaaaaaaaaaaaaaaaaaaaaaaaaactttagaactgggtgcagtggctcatgcctgtaatcccagccagcactttgggaggctgagatgggaagatcacttgagcccagaattagagataagcctatggaaacatagcaagacactgtctctacaggggaaaaaaaaaaaagaaactgagccttaaagagatgaaataaattaagcagtagatccaggatgcaaaatcctcccaattcctgtgcatgtgctcttattgtaaggtgccaagaaaaactgatttaagttacagcccttgtttaaggggcactgtttcttgtttttgcactgaatcaagtctaaccccaacagccacatcctcctatacctagacatctcatctcaggaagtggtggtgggggtagtcagaaggaaaaataactggacatctttgtgtaaaccataatccacatgtgccgtaaatgatcttcactccttatccgagggcaaattcacaaggatccccaagatccacttttagaagccattctcatccagcagtgagaagcttccaggtaggacagaaaaaagatccagcttcagctgcacacctctgtccccttggatggggaactaagggaaaacgtctgttgtatcactgaagttttttgttttgtttttatacgtgtctgaataaaaatgccaaagttttttttca

SEQ ID NO: 130461 - DNA, 4353 bp, Homo sapiens
  Payload ID: 5521
  Gene Symbol: ERBB3
  Gene Name: erb-b2 receptor tyrosine kinase 3
  Uniprot ID: P21860
  ENST ID: ENST00000415288
  CDS Start-End: 221-4072
atttattccaggacctagagagaggcaggatgagggtagagaattaaccccttagtacccaaaagaagcacagaggggtcccaggttgaaaaaggaaatcttttcaccttcccattcatggaatgtgtgtcctgggactctgaatggcctgagtgtgaccggcgatgctgagaaccaataccagacactgtacaagctctacgagaggtgtgaggtggtgatggggaaccttgagattgtgctcacgggacacaatgccgacctctccttcctgcagtggattcgagaagtgacaggctatgtcctcgtggccatgaatgaattctctactctaccattgcccaacctccgcgtggtgcgagggacccaggtctacgatgggaagtttgccatcttcgtcatgttgaactataacaccaactccagccacgctctgcgccagctccgcttgactcagctcaccgagattctgtcagggggtgtttatattgagaagaacgataagctttgtcacatggacacaattgactggagggacatcgtgagggaccgagatgctgagatagtggtgaaggacaatggcagaagctgtcccccctgtcatgaggtttgcaaggggcgatgctggggtcctggatcagaagactgccagacattgaccaagaccatctgtgctcctcagtgtaatggtcactgctttgggcccaaccccaaccagtgctgccatgatgagtgtgccgggggctgctcaggccctcaggacacagactgctttgcctgccggcacttcaatgacagtggagcctgtgtacctcgctgtccacagcctcttgtctacaacaagctaactttccagctggaacccaatccccacaccaagtatcagtatggaggagtttgtgtagccagctgtccccataactttgtggtggatcaaacatcctgtgtcagggcctgtcctcctgacaagatggaagtagataaaaatgggctcaagatgtgtgagccttgtgggggactatgtcccaaagcctgtgagggaacaggctctgggagccgcttccagactgtggactcgagcaacattgatggatttgtgaactgcaccaagatcctgggcaacctggactttctgatcaccggcctcaatggagacccctggcacaagatccctgccctggacccagagaagctcaatgtcttccggacagtacgggagatcacaggttacctgaacatccagtcctggccgccccacatgcacaacttcagtgttttttccaatttgacaaccattggaggcagaagcctctacaaccggggcttctcattgttgatcatgaagaacttgaatgtcacatctctgggcttccgatccctgaaggaaattagtgctgggcgtatctatataagtgccaataggcagctctgctaccaccactctttgaactggaccaaggtgcttcgggggcctacggaagagcgactagacatcaagcataatcggccgcgcagagactgcgtggcagagggcaaagtgtgtgacccactgtgctcctctgggggatgctggggcccaggccctggtcagtgcttgtcctgtcgaaattatagccgaggaggtgtctgtgtgacccactgcaactttctgaatggggagcctcgagaatttgcccatgaggccgaatgcttctcctgccacccggaatgccaacccatggagggcactgccacatgcaatggctcgggctctgatacttgtgctcaatgtgcccattttcgagatgggccccactgtgtgagcagctgcccccatggagtcctaggtgccaagggcccaatctacaagtacccagatgttcagaatgaatgtcggccctgccatgagaactgcacccaggggtgtaaaggaccagagcttcaagactgtttaggacaaacactggtgctgatcggcaaaacccatctgacaatggctttgacagtgatagcaggattggtagtgattttcatgatgctgggcggcacttttctctactggcgtgggcgccggattcagaataaaagggctatgaggcgatacttggaacggggtgagagcatagagcctctggaccccagtgagaaggctaacaaagtcttggccagaatcttcaaagagacagagctaaggaagcttaaagtgcttggctcgggtgtctttggaactgtgcacaaaggagtgtggatccctgagggtgaatcaatcaagattccagtctgcattaaagtcattgaggacaagagtggacggcagagttttcaagctgtgacagatcatatgctggccattggcagcctggaccatgcccacattgtaaggctgctgggactatgcccagggtcatctctgcagcttgtcactcaatatttgcctctgggttctctgctggatcatgtgagacaacaccggggggcactggggccacagctgctgctcaactggggagtacaaattgccaagggaatgtactaccttgaggaacatggtatggtgcatagaaacctggctgcccgaaacgtgctactcaagtcacccagtcaggttcaggtggcagattttggtgtggctgacctgctgcctcctgatgataagcagctgctatacagtgaggccaagactccaattaagtggatggcccttgagagtatccactttgggaaatacacacaccagagtgatgtctggagctatggtgtgacagtttgggagttgatgaccttcggggcagagccctatgcagggctacgattggctgaagtaccagacctgctagagaagggggagcggttggcacagccccagatctgcacaattgatgtctacatggtgatggtcaagtgttggatgattgatgagaacattcgcccaacctttaaagaactagccaatgagttcaccaggatggcccgagacccaccacggtatctggtcataaagagagagagtgggcctggaatagcccctgggccagagccccatggtctgacaaacaagaagctagaggaagtagagctggagccagaactagacctagacctagacttggaagcagaggaggacaacctggcaaccaccacactgggctccgccctcagcctaccagttggaacacttaatcggccacgtgggagccagagccttttaagtccatcatctggatacatgcccatgaaccagggtaatcttggggagtcttgccaggagtctgcagtttctgggagcagtgaacggtgcccccgtccagtctctctacacccaatgccacggggatgcctggcatcagagtcatcagaggggcatgtaacaggctctgaggctgagctccaggagaaagtgtcaatgtgtaggagccggagcaggagccggagcccacggccacgcggagatagcgcctaccattcccagcgccacagtctgctgactcctgttaccccactctccccacccgggttagaggaagaggatgtcaacggttatgtcatgccagatacacacctcaaaggtactccctcctcccgggaaggcaccctttcttcagtgggtctcagttctgtcctgggtactgaagaagaagatgaagatgaggagtatgaatacatgaaccggaggagaaggcacagtccacctcatccccctaggccaagttcccttgaggagctgggttatgagtacatggatgtggggtcagacctcagtgcctctctgggcagcacacagagttgcccactccaccctgtacccatcatgcccactgcaggcacaactccagatgaagactatgaatatatgaatcggcaacgagatggaggtggtcctgggggtgattatgcagccatgggggcctgcccagcatctgagcaagggtatgaagagatgagagcttttcaggggcctggacatcaggccccccatgtccattatgcccgcctaaaaactctacgtagcttagaggctacagactctgcctttgataaccctgattactggcatagcaggcttttccccaaggctaatgcccagagaacgtaactcctgctccctgtggcactcagggagcatttaatggcagctagtgcctttagagggtaccgtcttctccctattccctctctctcccaggtcccagccccttttccccagtcccagacaattccattcaatctttggaggcttttaaacattttgacacaaaattcttatggtatgtagccagctgtgcactttcttctctttcccaaccccaggaaaggttttccttattttgtgtgctttcccagtcccattcctcagcttcttcacaggcactcctg

SEQ ID NO: 130462 - DNA, 1027 bp, Homo sapiens
  Payload ID: 5521
  Gene Symbol: ERBB3
  Gene Name: erb-b2 receptor tyrosine kinase 3
  Uniprot ID: P21860
  ENST ID: ENST00000411731
  CDS Start-End: 165-716
tccccggactccggctccggctccgattgcaatttgcaacctccgctgccgtcgccgcagcagccaccaattcgccagcggttcaggtggctcttgcctcgatgtcctagcctaggggcccccgggccggacttggctgggctcccttcaccctctgcggagtcatgagggcgaacgacgctctgcaggtgctgggcttgcttttcagcctggcccggggctccgaggtgggcaactctcaggcagtgtgtcctgggactctgaatggcctgagtgtgaccggcgatgctgagaaccaataccagacactgtacaagctctacgagaggtgtgaggtggtgatggggaaccttgagattgtgctcacgggacacaatgccgacctctccttcctgcagtggattcgagaagtgacaggctatgtcctcgtggccatgaatgaattctctactctaccattgcccaacctccgcgtggtgcgagggacccaggtctacgatgggaagtttgccatcttcgtcatgttgaactataacaccaactccagccacgctctgcgccagctccgcttgactcagctcaccggtcagttcccgatggttccttctggcctcacccctcagccagcccaagactggtacctccttgatgatgacccaagactgctcactctaagtgcctcttccaaggtgcctgtcaccttggccgctgtctaaaggtccattgctccctaagcaatagagggcccccagtagggggagctaggggcatctgctccagggaaaggaaccctgtgtccttgtggggctggagtcagagctggatctgttaaccgtttttctaatttcaaagtacagtgtaccggaggccaggcctgatggcttacacctgtaatcccagcattttgggaggccaaggagggcagatcacttgagatcaggagtttgagaccagcctggccaacatggcgaaaccctgtctctactaaaaatacaaaaaaataaaataaaataaaaaattagctggc

SEQ ID NO: 130463 - DNA, 2755 bp, Homo sapiens
  Payload ID: 5521
  Gene Symbol: ERBB3
  Gene Name: erb-b2 receptor tyrosine kinase 3
  Uniprot ID: P21860
  ENST ID: ENST00000551242
  CDS Start-End: 97-1092
aattcgccagcggttcaggtggctcttgcctcgatgtcctagcctaggggcccccgggccggacttggctgggctcccttcaccctctgcggagtcatgagggcgaacgacgctctgcaggtgctgggcttgcttttcagcctggcccggggctccgaggtgggcaactctcaggcagtgtgtcctgggactctgaatggcctgagtgtgaccggcgatgctgagaaccaataccagacactgtacaagctctacgagaggtgtgaggtggtgatggggaaccttgagattgtgctcacgggacacaatgccgacctctccttcctgcagtggattcgagaagtgacaggctatgtcctcgtggccatgaatgaattctctactctaccattgcccaacctccgcgtggtgcgagggacccaggtctacgatgggaagtttgccatcttcgtcatgttgaactataacaccaactccagccacgctctgcgccagctccgcttgactcagctcaccgagattctgtcagggggtgtttatattgagaagaacgataagctttgtcacatggacacaattgactggagggacatcgtgagggaccgagatgctgagatagtggtgaaggacaatggcagaagctgtcccccctgtcatgaggtttgcaaggggcgatgctggggtcctggatcagaagactgccagacattgaccaagaccatctgtgctcctcagtgtaatggtcactgctttgggcccaaccccaaccagtgctgccatgatgagtgtgccgggggctgctcaggccctcaggacacagactgctttgcctgccggcacttcaatgacagtggagcctgtgtacctcgctgtccacagcctcttgtctacaacaagctaactttccagctggaacccaatccccacaccaagtatcagtatggaggagtttgtgtagccagctgtccccataactttgtggtggatcaaacatcctgtgtcagggcctgtcctcctgacaagatggaagtagataaaaatgggctcaagatgtgtgagccttgtgggggactatgtcccaaagccttttaagtccatcatctggatacatgcccatgaaccagggtaatcttggggagtcttgccaggagtctgcagtttctgggagcagtgaacggtgcccccgtccagtctctctacacccaatgccacggggatgcctggcatcagagtcatcagaggggcatgtaacaggctctgaggctgagctccaggagaaagtgtcaatgtgtaggagccggagcaggagccggagcccacggccacgcggagatagcgcctaccattcccagcgccacagtctgctgactcctgttaccccactctccccacccgggttagaggaagaggatgtcaacggttatgtcatgccagatacacacctcaaaggtactccctcctcccgggaaggcaccctttcttcagtgggtctcagttctgtcctgggtactgaagaagaagatgaagatgaggagtatgaatacatgaaccggaggagaaggcacagtccacctcatccccctaggccaagttcccttgaggagctgggttatgagtacatggatgtggggtcagacctcagtgcctctctgggcagcacacagagttgcccactccaccctgtacccatcatgcccactgcaggcacaactccagatgaagactatgaatatatgaatcggcaacgagatggaggtggtcctgggggtgattatgcagccatgggggcctgcccagcatctgagcaagggtatgaagagatgagagcttttcaggggcctggacatcaggccccccatgtccattatgcccgcctaaaaactctacgtagcttagaggctacagactctgcctttgataaccctgattactggcatagcaggcttttccccaaggctaatgcccagagaacgtaactcctgctccctgtggcactcagggagcatttaatggcagctagtgcctttagagggtaccgtcttctccctattccctctctctcccaggtcccagccccttttccccagtcccagacaattccattcaatctttggaggcttttaaacattttgacacaaaattcttatggtatgtagccagctgtgcactttcttctctttcccaaccccaggaaaggttttccttattttgtgtgctttcccagtcccattcctcagcttcttcacaggcactcctggagatatgaaggattactctccatatcccttcctctcaggctcttgactacttggaactaggctcttatgtgtgcctttgtttcccatcagactgtcaagaagaggaaagggaggaaacctagcagaggaaagtgtaattttggtttatgactcttaaccccctagaaagacagaagcttaaaatctgtgaagaaagaggttaggagtagatattgattactatcataattcagcacttaactatgagccaggcatcatactaaacttcacctacattatctcacttagtcctttatcatccttaaaacaattctgtgacatacatattatctcattttacacaaagggaagtcgggcatggtggctcatgcctgtaatctcagcactttgggaggctgaggcagaaggattacctgaggcaaggagtttgagaccagcttagccaacatagtaagacccccatctctttaaaaaaaaaaaaaaaaaaaaaaaaaaaa

SEQ ID NO: 130464 - DNA, 4382 bp, Homo sapiens
  Payload ID: 5521
  Gene Symbol: ERBB3
  Gene Name: erb-b2 receptor tyrosine kinase 3
  ENST ID: ENST00000551085
  CDS Start-End: 134-2899
atttgcaacctccgctgccgtcgccgcagcagccaccaattcgccagcggttcaggtggctcttgcctcgatgtcctagcctaggggcccccgggccggacttggctgggctcccttcaccctctgcggagtcatgagggcgaacgacgctctgcaggtgctgggcttgcttttcagcctggcccggggctccgaggtgggcaactctcaggcagtgtgtcctgggactctgaatggcctgagtgtgaccggcgatgctgagaaccaataccagacactgtacaagctctacgagaggtgtgaggtggtgatggggaaccttgagattgtgctcacgggacacaatgccgacctctccttcctgcagtggattcgagaagtgacaggctatgtcctcgtggccatgaatgaattctctactctaccattgcccaacctccgcgtggtgcgagggacccaggtctacgatgggaagtttgccatcttcgtcatgttgaactataacaccaactccagccacgctctgcgccagctccgcttgactcagctcaccgagattctgtcagggggtgtttatattgagaagaacgataagctttgtcacatggacacaattgactggagggacatcgtgagggaccgagatgctgagatagtggtgaaggacaatggcagaagctgtcccccctgtcatgaggtttgcaaggggcgatgctggggtcctggatcagaagactgccagacattgaccaagaccatctgtgctcctcagtgtaatggtcactgctttgggcccaaccccaaccagtgctgccatgatgagtgtgccgggggctgctcaggccctcaggacacagactgctttgcctgccggcacttcaatgacagtggagcctgtgtacctcgctgtccacagcctcttgtctacaacaagctaactttccagctggaacccaatccccacaccaagtatcagtatggaggagtttgtgtagccagctgtccccataactttgtggtggatcaaacatcctgtgtcagggcctgtcctcctgacaagatggaagtagataaaaatgggctcaagatgtgtgagccttgtgggggactatgtcccaaagcctgtgagggaacaggctctgggagccgcttccagactgtggactcgagcaacattgatggatttgtgaactgcaccaagatcctgggcaacctggactttctgatcaccggcctcaatggagacccctggcacaagatccctgccctggacccagagaagctcaatgtcttccggacagtacgggagatcacaggttacctgaacatccagtcctggccgccccacatgcacaacttcagtgttttttccaatttgacaaccattggaggcagaagcctctacaaccggggcttctcattgttgatcatgaagaacttgaatgtcacatctctgggcttccgatccctgaaggaaattagtgctgggcgtatctatataagtgccaataggcagctctgctaccaccactctttgaactggaccaaggtgcttcgggggcctacggaagagcgactagacatcaagcataatcggccgcgcagagactgcgtggcagagggcaaagtgtgtgacccactgtgctcctctgggggatgctggggcccaggccctggtcagtgcttgtcctgtcgaaattatagccgaggaggtgtctgtgtgacccactgcaactttctgaatggggagcctcgagaatttgcccatgaggccgaatgcttctcctgccacccggaatgccaacccatggagggcactgccacatgcaatggctcgggctctgatacttgtgctcaatgtgcccattttcgagatgggccccactgtgtgagcagctgcccccatggagtcctaggtgccaagggcccaatctacaagtacccagatgttcagaatgaatgtcggccctgccatgagaactgcacccaggggtgtaaaggaccagagcttcaagactgtttaggacaaacactggtgctgatcggcaaaacccatctgacaatggctttgacagtgatagcaggattggtagtgattttcatgatgctgggcggcacttttctctactggcgtgggcgccggattcagaataaaagggctatgaggcgatacttggaacggggtgagagcatagagcctctggaccccagtgagaaggctaacaaagtcttggccagaatcttcaaagagacagagctaaggaagcttaaagtgcttggctcgggtgtctttggaactgtgcacaaaggagtgtggatccctgagggtgaatcaatcaagattccagtctgcattaaagtcattgaggacaagagtggacggcagagttttcaagctgtgacagatcatatgctggccattggcagcctggaccatgcccacattgtaaggctgctgggactatgcccagggtcatctctgcagcttgtcactcaatatttgcctctgggttctctgctggatcatgtgagacaacaccggggggcactggggccacagctgctgctcaactggggagtacaaattgccaagggaatgtactaccttgaggaacatggtatggtgcatagaaacctggctgcccgaaacgtgctactcaagtcacccagtcaggttcaggtggcagattttggtgtggctgacctgctgcctcctgatgataagcagctgctatacagtgaggccaagactccaattaagtggatggcccttgagagtatccactttgggaaatacacacaccagagtgatgtctggagctatggtcagtgcatctggatgccctctctaccatcactggccccagtttcaaatttaccttttgagaccccctcttagaatctctaagcacttcagatttttgtgttagatcaggttctgccttcccttcacttcatgcccatgtctactattttgccagtgactagtccatgtcttcctgcaacaggtgtgacagtttgggagttgatgaccttcggggcagagccctatgcagggctacgattggctgaagtaccagacctgctagagaagggggagcggttggcacagccccagatctgcacaattgatgtctacatggtgatggtcaagtgttggatgattgatgagaacattcgcccaacctttaaagaactagccaatgagttcaccaggatggcccgagacccaccacggtatctggtcataaagagagagagtgggcctggaatagcccctgggccagagccccatggtctgacaaacaagaagctagaggaagtagagctggagccagaactagacctagacctagacttggaagcagaggaggacaacctggcaaccaccacactgggctccgccctcagcctaccagttggaacacttaatcggccacgtgggagccagagccttttaagtccatcatctggatacatgcccatgaaccagggtaatcttggggagtcttgccaggagtctgcagtttctgggagcagtgaacggtgcccccgtccagtctctctacacccaatgccacggggatgcctggcatcagagtcatcagaggggcatgtaacaggctctgaggctgagctccaggagaaagtgtcaatgtgtaggagccggagcaggagccggagcccacggccacgcggagatagcgcctaccattcccagcgccacagtctgctgactcctgttaccccactctccccacccgggttagaggaagaggatgtcaacggttatgtcatgccagatacacacctcaaaggtactccctcctcccgggaaggcaccctttcttcagtgggtctcagttctgtcctgggtactgaagaagaagatgaagatgaggagtatgaatacatgaaccggaggagaaggcacagtccacctcatccccctaggccaagttcccttgaggagctgggttatgagtacatggatgtggggtcagacctcagtgcctctctgggcagcacacagagttgcccactccaccctgtacccatcatgcccactgcaggcacaactccagatgaagactatgaatatatgaatcggcaacgagatggaggtggtcctgggggtgattatgcagccatgggggcctgcccagcatctgagcaagggtatgaagagatgagagcttttcaggggcctggacatcaggccccccatgtccattatgcccgcctaaaaactctacgtagcttagaggctacagactctgcctttgataaccctgattactggcatagcaggcttttccccaaggctaatgcccagagaacgtaactcctgctccctgtggcactcagggagcatttaatgg

SEQ ID NO: 130465 - DNA, 561 bp, Homo sapiens
  Payload ID: 5521
  Gene Symbol: ERBB3
  Gene Name: erb-b2 receptor tyrosine kinase 3
  ENST ID: ENST00000549282
  CDS Start-End: 183-561
attcattacccttccctggatctgggggctttcggaatctcgacctccccttggcctatctcctgcagaaaaattaggcagccaccaattcgccagcggttcaggtggctcttgcctcgatgtcctagcctaggggcccccgggccggacttggctgggctcccttcaccctctgcggagtcatgagggcgaacgacgctctgcaggtgctgggcttgcttttcagcctggcccggggctccgaggtgggcaactctcaggcagtgtgtcctgggactctgaatggcctgagtgtgaccggcgatgctgagaaccaataccagacactgtacaagctctacgagaggtgtgaggtggtgatggggaaccttgagattgtgctcacgggacacaatgccgacctctccttcctgcagtggattcgagaagtgacaggctatgtcctcgtggccatgaatgaattctctactctaccattgcccaacctccgcgtggtgcgagggacccaggtctacgatgggaagtttgccatcttcgtcatgttgaactataacaccaact

SEQ ID NO: 130466 - DNA, 572 bp, Homo sapiens
  Payload ID: 5521
  Gene Symbol: ERBB3
  Gene Name: erb-b2 receptor tyrosine kinase 3
  ENST ID: ENST00000550869
  CDS Start-End: 135-266
aatttgcaacctccgctgccgtcgccgcagcagccaccaattcgccagcggttcaggtggctcttgcctcgatgtcctagcctaggggcccccgggccggacttggctgggctcccttcaccctctgcggagtcatgagggcgaacgacgctctgcaggtgccaagggcccaatctacaagtacccagatgttcagaatgaatgtcggccctgccatgagaactgcacccaggggtgtaaaggaccagagcttcaagactgtttaggacaaacactggtgctgatcggcaaaacccatctgacaatggctttgacagtgatagcaggattggtagtgattttcatgatgctgggcggcacttttctctactggcgtgggcgccggattcagaataaaagggctatgaggcgatacttggaacggggtgagagcatagagcctctggaccccagtgagaaggctaacaaagtcttggccagaatcttcaaagagacagagctaaggaagcttaaagtgcttggctcgggtgtctttggaactgtgcacaaaggagtgtggatccctgagggtg

SEQ ID NO: 130467 - DNA, 3289 bp, Homo sapiens
  Payload ID: 5521
  Gene Symbol: ERBB3
  Gene Name: erb-b2 receptor tyrosine kinase 3
  ENST ID: ENST00000549832
  CDS Start-End: 457-1845
aaaaaaaaaaaattagccaggcgtggcggcatgcatctgtactcccagctactcgggaggctgaggcaggagaatggcgtgaacccaggaggcggagcttgcagtgggccgagatcgcaccactgcactccagtctgggcgacagagcgagactccgtctcaaaaaaaaaaaaaaaagaatttgggacttggaaatcctaagaaaatttgtggaaataaacttgtgatacctctatctttaatccgcagactccaattaagtggatggcccttgagagtatccactttgggaaatacacacaccagagtgatgtctggagctatggtcagtgcatctggatgccctctctaccatcactggccccagtttcaaatttaccttttgagaccccctcttagaatctctaagcacttcagatttttgtgttagatcaggttctgccttcccttcacttcatgcccatgtctactattttgccagtgactagtccatgtcttcctgcaacaggtgtgacagtttgggagttgatgaccttcggggcagagccctatgcagggctacgattggctgaagtaccagacctgctagagaagggggagcggttggcacagccccagatctgcacaattgatgtctacatggtgatggtcaagtgttggatgattgatgagaacattcgcccaacctttaaagaactagccaatgagttcaccaggatggcccgagacccaccacggtatctggtcataaagagagagagtgggcctggaatagcccctgggccagagccccatggtctgacaaacaagaagctagaggaagtagagctggagccagaactagacctagacctagacttggaagcagaggaggacaacctggcaaccaccacactgggctccgccctcagcctaccagttggaacacttaatcggccacgtgggagccagagccttttaagtccatcatctggatacatgcccatgaaccagggtaatcttggggagtcttgccaggagtctgcagtttctgggagcagtgaacggtgcccccgtccagtctctctacacccaatgccacggggatgcctggcatcagagtcatcagaggggcatgtaacaggctctgaggctgagctccaggagaaagtgtcaatgtgtaggagccggagcaggagccggagcccacggccacgcggagatagcgcctaccattcccagcgccacagtctgctgactcctgttaccccactctccccacccgggttagaggaagaggatgtcaacggttatgtcatgccagatacacacctcaaaggtactccctcctcccgggaaggcaccctttcttcagtgggtctcagttctgtcctgggtactgaagaagaagatgaagatgaggagtatgaatacatgaaccggaggagaaggcacagtccacctcatccccctaggccaagttcccttgaggagctgggttatgagtacatggatgtggggtcagacctcagtgcctctctgggcagcacacagagttgcccactccaccctgtacccatcatgcccactgcaggcacaactccagatgaagactatgaatatatgaatcggcaacgagatggaggtggtcctgggggtgattatgcagccatgggggcctgcccagcatctgagcaagggtatgaagagatgagagcttttcaggggcctggacatcaggccccccatgtccattatgcccgcctaaaaactctacgtagcttagaggctacagactctgcctttgataaccctgattactggcatagcaggcttttccccaaggctaatgcccagagaacgtaactcctgctccctgtggcactcagggagcatttaatggcagctagtgcctttagagggtaccgtcttctccctattccctctctctcccaggtcccagccccttttccccagtcccagacaattccattcaatctttggaggcttttaaacattttgacacaaaattcttatggtatgtagccagctgtgcactttcttctctttcccaaccccaggaaaggttttccttattttgtgtgctttcccagtcccattcctcagcttcttcacaggcactcctggagatatgaaggattactctccatatcccttcctctcaggctcttgactacttggaactaggctcttatgtgtgcctttgtttcccatcagactgtcaagaagaggaaagggaggaaacctagcagaggaaagtgtaattttggtttatgactcttaaccccctagaaagacagaagcttaaaatctgtgaagaaagaggttaggagtagatattgattactatcataattcagcacttaactatgagccaggcatcatactaaacttcacctacattatctcacttagtcctttatcatccttaaaacaattctgtgacatacatattatctcattttacacaaagggaagtcgggcatggtggctcatgcctgtaatctcagcactttgggaggctgaggcagaaggattacctgaggcaaggagtttgagaccagcttagccaacatagtaagacccccatctctttaaaaaaaaaaaaaaaaaaaaaaaaaaaactttagaactgggtgcagtggctcatgcctgtaatcccagccagcactttgggaggctgagatgggaagatcacttgagcccagaattagagataagcctatggaaacatagcaagacactgtctctacaggggaaaaaaaaaaaagaaactgagccttaaagagatgaaataaattaagcagtagatccaggatgcaaaatcctcccaattcctgtgcatgtgctcttattgtaaggtgccaagaaaaactgatttaagttacagcccttgtttaaggggcactgtttcttgtttttgcactgaatcaagtctaaccccaacagccacatcctcctatacctagacatctcatctcaggaagtggtggtgggggtagtcagaaggaaaaataactggacatctttgtgtaaaccataatccacatgtgccgtaaatgatcttcactccttatccgagggcaaattcacaaggatccccaagatccacttttagaagccattctcatccagcagtgagaagcttccaggtaggacagaaaaaagatccagcttcagctgcacacctctgtccccttggatggggaactaagggaaaacgtctgttgtatcactgaagttttttgttttgtttttatacgtgtctgaataaaaatgccaaagtttt

SEQ ID NO: 130468 - DNA, 2729 bp, Homo sapiens
  Payload ID: 5521
  Gene Symbol: ERBB3
  Gene Name: erb-b2 receptor tyrosine kinase 3
  ENST ID: ENST00000550070
  CDS Start-End: 1-1950
tgcttgtcctgtcgaaattatagccgaggaggtgtctgtgtgacccactgcaactttctgaatggggagcctcgagaatttgcccatgaggccgaatgcttctcctgccacccggaatgccaacccatggagggcactgccacatgcaatggctcgggctctgatacttgtgctcaatgtgcccattttcgagatgggccccactgtgtgagcagctgcccccatggagtcctaggtgccaagggcccaatctacaagtacccagatgttcagaatgaatgtcggccctgccatgagaactgcacccaggggtgtaaaggaccagagcttcaagactgtttaggacaaacactggtgctgatcggcaaaacccatctgacaatggctttgacagtgatagcaggattggtagtgattttcatgatgctgggcggcacttttctctactggcgtgggcgccggattcagaataaaagggctatgaggcgatacttggaacggggtgagagcatagagcctctggaccccagtgagaagactccaattaagtggatggcccttgagagtatccactttgggaaatacacacaccagagtgatgtctggagctatggtgtgacagtttgggagttgatgaccttcggggcagagccctatgcagggctacgattggctgaagtaccagacctgctagagaagggggagcggttggcacagccccagatctgcacaattgatgtctacatggtgatggtcaagtgttggatgattgatgagaacattcgcccaacctttaaagaactagccaatgagttcaccaggatggcccgagacccaccacggtatctggtcataaagagagagagtgggcctggaatagcccctgggccagagccccatggtctgacaaacaagaagctagaggaagtagagctggagccagaactagacctagacctagacttggaagcagaggaggacaacctggcaaccaccacactgggctccgccctcagcctaccagttggaacacttaatcggccacgtgggagccagagccttttaagtccatcatctggatacatgcccatgaaccagggtaatcttggggagtcttgccaggagtctgcagtttctgggagcagtgaacggtgcccccgtccagtctctctacacccaatgccacggggatgcctggcatcagagtcatcagaggggcatgtaacaggctctgaggctgagctccaggagaaagtgtcaatgtgtaggagccggagcaggagccggagcccacggccacgcggagatagcgcctaccattcccagcgccacagtctgctgactcctgttaccccactctccccacccgggttagaggaagaggatgtcaacggttatgtcatgccagatacacacctcaaaggtactccctcctcccgggaaggcaccctttcttcagtgggtctcagttctgtcctgggtactgaagaagaagatgaagatgaggagtatgaatacatgaaccggaggagaaggcacagtccacctcatccccctaggccaagttcccttgaggagctgggttatgagtacatggatgtggggtcagacctcagtgcctctctgggcagcacacagagttgcccactccaccctgtacccatcatgcccactgcaggcacaactccagatgaagactatgaatatatgaatcggcaacgagatggaggtggtcctgggggtgattatgcagccatgggggcctgcccagcatctgagcaagggtatgaagagatgagagcttttcaggggcctggacatcaggccccccatgtccattatgcccgcctaaaaactctacgtagcttagaggctacagactctgcctttgataaccctgattactggcatagcaggcttttccccaaggctaatgcccagagaacgtaactcctgctccctgtggcactcagggagcatttaatggcagctagtgcctttagagggtaccgtcttctccctattccctctctctcccaggtcccagccccttttccccagtcccagacaattccattcaatctttggaggcttttaaacattttgacacaaaattcttatggtatgtagccagctgtgcactttcttctctttcccaaccccaggaaaggttttccttattttgtgtgctttcccagtcccattcctcagcttcttcacaggcactcctggagatatgaaggattactctccatatcccttcctctcaggctcttgactacttggaactaggctcttatgtgtgcctttgtttcccatcagactgtcaagaagaggaaagggaggaaacctagcagaggaaagtgtaattttggtttatgactcttaaccccctagaaagacagaagcttaaaatctgtgaagaaagaggttaggagtagatattgattactatcataattcagcacttaactatgagccaggcatcatactaaacttcacctacattatctcacttagtcctttatcatccttaaaacaattctgtgacatacatattatctcattttacacaaagggaagtcgggcatggtggctcatgcctgtaatctcagcactttgggaggctgaggcagaaggattacctgaggcaaggagtttgagaccagcttagccaacatagtaagacccccatctctttaaaaaaaaaaaaaaaaaaaaaaaaaaaa

SEQ ID NO: 130469 - DNA, 3237 bp, Homo sapiens
  Payload ID: 5521
  Gene Symbol: ERBB3
  Gene Name: erb-b2 receptor tyrosine kinase 3
  ENST ID: ENST00000553131
  CDS Start-End: 735-2486
agaacactggtcagagaaatgggaggcatgcattctagtcctgattttgccattaatttgccacatgactttgaagaagttacttatcttctctgtgcctcggtttatgcatctatacagaggaaataacatttgtccttccaggatggctgtaagggtaaagggggatgatgtatgtgaaagtgctttggaaagcacagagcactgtataaaaggtactcaaggtggtaatagtactaccaactctccctagctgtccccttccccactttgtgctcctccatcaaagggaaaacccaacccctttgattcctgatctcatgagcacaaataacttcctcagttctcagggtctgtacctcaatatgcctataatccattccaggactaacggtgcttcctcttcctgccctttcagctgtgctgcttttggcattcacctatgaggagcgggttggagtgggacatgggaatggcctttcctgagtaactccttcccatttgctcctcagagcatagagcctctggaccccagtgagaaggctaacaaagtcttggccagaatcttcaaagagacagagctaaggaagcttaaagtgcttggctcgggtgtctttggaactgtgcacaaaggagtgtggatccctgagggtgaatcaatcaagattccagtctgcattaaagtcattgaggacaagagtggacggcagagttttcaagctgtgacagatcatatgctggccattggcagcctggaccatgcccacattgtaaggctgctgggactatgcccagggtcatctctgcagcttgtcactcaatatttgcctctgggttctctgctggatcatgtgagacaacaccggggggcactggggccacagctgctgctcaactggggagtacaaattgccaagggaatgtactaccttgaggaacatggtatggtgcatagaaacctggctgcccgaaacgtgctactcaagtcacccagtcaggttcaggtggcagattttggtgtggctgacctgctgcctcctgatgataagcagctgctatacagtgaggccaagactccaattaagtggatggcccttgagagtatccactttgggaaatacacacaccagagtgatgtctggagctatggtgtgacagtttgggagttgatgaccttcggggcagagccctatgcagggctacgattggctgaagtaccagacctgctagagaagggggagcggttggcacagccccagatctgcacaattgatgtctacatggtgatggtcaagtgttggatgattgatgagaacattcgcccaacctttaaagaactagccaatgagttcaccaggatggcccgagacccaccacggtatctggtcataaagagagagagtgggcctggaatagcccctgggccagagccccatggtctgacaaacaagaagctagaggaagtagagctggagccagaactagacctagacctagacttggaagcagaggaggacaacctggcaaccaccacactgggctccgccctcagcctaccagttggaacacttaatcggccacgtgggagccagagccttttaagtccatcatctggatacatgcccatgaaccagggtaatcttggggagtcttgccaggagtctgcagtttctgggagcagtgaacggtgcccccgtccagtctctctacacccaatgccacggggatgcctggcatcagagtcatcagaggggcatgtaacaggctctgaggctgagctccaggagaaagtgtcaatgtgtaggagccggagcaggagccggagcccacggccacgcggagatagcgcctaccattcccagcgccacagtctgctgactcctgttaccccactctccccacccgggttagaggaagaggatgtcaacggttatgtcatgccagatacacacctcaaaggtactccctcctcccgggaaggcaccctttcttcagtgggtctcagttctgtcctgggtactgaagaagaagatgaagatgaggagtatgaatacatgaaccggaggagaaggcacagtccacctcatccccctaggccaagttcccttgaggagctgggttatgagtacatggatgtggggtcagacctcagtgcctctctgggcagcacacagagttgcccactccaccctgtacccatcatgcccactgcaggcacaactccagatgaagactatgaatatatgaatcggcaacgagatggaggtggtcctgggggtgattatgcagccatgggggcctgcccagcatctgagcaagggtatgaagagatgagagcttttcaggggcctggacatcaggccccccatgtccattatgcccgcctaaaaactctacgtagcttagaggctacagactctgcctttgataaccctgattactggcatagcaggcttttccccaaggctaatgcccagagaacgtaactcctgctccctgtggcactcagggagcatttaatggcagctagtgcctttagagggtaccgtcttctccctattccctctctctcccaggtcccagccccttttccccagtcccagacaattccattcaatctttggaggcttttaaacattttgacacaaaattcttatggtatgtagccagctgtgcactttcttctctttcccaaccccaggaaaggttttccttattttgtgtgctttcccagtcccattcctcagcttcttcacaggcactcctggagatatgaaggattactctccatatcccttcctctcaggctcttgactacttggaactaggctcttatgtgtgcctttgtttcccatcagactgtcaagaagaggaaagggaggaaacctagcagaggaaagtgtaattttggtttatgactcttaaccccctagaaagacagaagcttaaaatctgtgaagaaagaggttaggagtagatattgattactatcataattcagcacttaactatgagccaggcatcatactaaacttcacctacattatctcacttagtcctttatcatccttaaaacaattctgtgacatacatattatctcattttacacaaagggaagtcgggcatggtggctcatgcctgtaatctcagcactttgggaggctgaggcagaaggattacctgaggcaaggagtttgagaccagcttagccaacatagtaagacccccatctcttt

SEQ ID NO: 130470 - DNA, 560 bp, Homo sapiens
  Payload ID: 5521
  Gene Symbol: ERBB3
  Gene Name: erb-b2 receptor tyrosine kinase 3
  ENST ID: ENST00000549061
  CDS Start-End: 212-560
attcattacccttccctggatctgggggctttcggaatctcgacctccccttggcctatctcctgcagaaaaattaggcctggcccggggctccgaggtgggcaactctcaggcagtgtgtcctgggactctgaatggcctgagtgtgaccggcgatgctgagaaccaataccagacactgtacaagctctacgagaggtgtgaggtggtgatggggaaccttgagattgtgctcacgggacacaatgccgacctctccttcctgcagtggattcgagaagtgacaggctatgtcctcgtggccatgaatgaattctctactctaccattgcccaacctccgcgtggtgcgagggacccaggtctacgatgggaagtttgccatcttcgtcatgttgaactataacaccaactccagccacgctctgcgccagctccgcttgactcagctcaccgagattctgtcagggggtgtttatattgagaagaacgataagctttgtcacatggacacaattgactggagggacatcgtgagggaccgagatgctgagatagtgg

SEQ ID NO: 130471 - DNA, 676 bp, Homo sapiens
  Payload ID: 5521
  Gene Symbol: ERBB3
  Gene Name: erb-b2 receptor tyrosine kinase 3
  ENST ID: ENST00000549672
  CDS Start-End: 332-676
agagatatttattccaggacctagagagaggcaggatgagggtagagaagtgagtgccctagttggagggggagaggagggtaatcaaagttgcggccttttcctaacttctcttttctagggagagaaacaaattccctgtcttccttctcagttaaccccttagtacccaaaagaagcacagaggggtcccaggttgaaaaaggaaatcttttcaccttcccattcatggaatgtgtgtcctgggactctgaatggcctgagtgtgaccggcgatgctgagaaccaataccagacactgtacaagctctacgagaggtgtgaggtggtgatggggaaccttgagattgtgctcacgggacacaatgccgacctctccttcctgcagtggattcgagaagtgacaggctatgtcctcgtggccatgaatgaattctctactctaccattgcccaacctccgcgtggtgcgagggacccaggtctacgatgggaagtttgccatcttcgtcatgttgaactataacaccaactccagccacgctctgcgccagctccgcttgactcagctcaccgagattctgtcagggggtgtttatattgagaagaacgataagctttgtcacatggacacaattgactggagggacatcgtgagggaccgagatgctgagata

SEQ ID NO: 130472 - DNA, 266 bp, Homo sapiens
  Payload ID: 5521
  Gene Symbol: ERBB3
  Gene Name: erb-b2 receptor tyrosine kinase 3
  ENST ID: ENST00000550828
  CDS Start-End: 1-246
ctagacatcaagcataatcggccgcgcagagactgcgtggcagagggcaaagtgtgtgacccactgtgctcctctgggggatgctggggcccaggccctggtcagtgcttgtcctgtcgaaattatagccgaggaggtgtctgtgtgacccactgcaactttctgaatgggtacagtaaggggagccagtcaaggatgggtgggggtggggccctgcaatggaactgttcaggtggcatacaataaaagtctttagacagctttct

SEQ ID NO: 130473 - DNA, 2194 bp, Homo sapiens
  Payload ID: 5522
  Gene Symbol: ERBB4
  Gene Name: erb-b2 receptor tyrosine kinase 4
  ENST ID: ENST00000260943
  CDS Start-End: 1-2194
tgaagccggcgacaggactttgggtctgggtgagccttctcgtggcggcggggaccgtccagcccagcgattctcagtcagtgtgtgcaggaacggagaataaactgagctctctctctgacctggaacagcagtaccgagccttgcgcaagtactatgaaaactgtgaggttgtcatgggcaacctggagataaccagcattgagcacaaccgggacctctccttcctgcggtctgttcgagaagtcacaggctacgtgttagtggctcttaatcagtttcgttacctgcctctggagaatttacgcattattcgtgggacaaaactttatgaggatcgatatgccttggcaatatttttaaactacagaaaagatggaaactttggacttcaagaacttggattaaagaacttgacagaaatcctaaatggtggagtctatgtagaccagaacaaattcctttgttatgcagacaccattcattggcaagatattgttcggaacccatggccttccaacttgactcttgtgtcaacaaatggtagttcaggatgtggacgttgccataagtcctgtactggccgttgctggggacccacagaaaatcattgccagactttgacaaggacggtgtgtgcagaacaatgtgacggcagatgctacggaccttacgtcagtgactgctgccatcgagaatgtgctggaggctgctcaggacctaaggacacagactgctttgcctgcatgaatttcaatgacagtggagcatgtgttactcagtgtccccaaacctttgtctacaatccaaccacctttcaactggagcacaatttcaatgcaaagtacacatatggagcattctgtgtcaagaaatgtccacataactttgtggtagattccagttcttgtgtgcgtgcctgccctagttccaagatggaagtagaagaaaatgggattaaaatgtgtaaaccttgcactgacatttgcccaaaagcttgtgatggcattggcacaggatcattgatgtcagctcagactgtggattccagtaacattgacaaattcataaactgtaccaagatcaatgggaatttgatctttctagtcactggtattcatggggacccttacaatgcaattgaagccatagacccagagaaactgaacgtctttcggacagtcagagagataacaggtttcctgaacatacagtcatggccaccaaacatgactgacttcagtgttttttctaacctggtgaccattggtggaagagtactctatagtggcctgtccttgcttatcctcaagcaacagggcatcacctctctacagttccagtccctgaaggaaatcagcgcaggaaacatctatattactgacaacagcaacctgtgttattatcataccattaactggacaacactcttcagcacaatcaaccagagaatagtaatccgggacaacagaaaagctgaaaattgtactgctgaaggaatggtgtgcaaccatctgtgttccagtgatggctgttggggacctgggccagaccaatgtctgtcgtgtcgccgcttcagtagaggaaggatctgcatagagtcttgtaacctctatgatggtgaatttcgggagtttgagaatggctccatctgtgtggagtgtgacccccagtgtgagaagatggaagatggcctcctcacatgccatggaccgggtcctgacaactgtacaaagtgctctcattttaaagatggcccaaactgtgtggaaaaatgtccagatggcttacagggggcaaacagtttcattttcaagtatgctgatccagatcgggagtgccacccatgccatccaaactgcacccaagggtgcataggctcaagtattgaagactgcatcggcctgatggatagaactcccctgattgcagctggagtaattggtgggctcttcattctggtcattgtgggtctgacatttgctgtttatgttagaaggaagagcatcaaaaagaaaagagccttgagaagattcttggaaacagagttggtggaaccattaactcccagtggcacagcacccaatcaagctcaacttcgtattttgaaagaaactgagctgaagagggtaaaagtccttggctcaggtgcttttggaacggtttataaaggtatttgggtacctgaaggaga

SEQ ID NO: 130474 - DNA, 12136 bp, Homo sapiens
  Payload ID: 5522
  Gene Symbol: ERBB4
  Gene Name: erb-b2 receptor tyrosine kinase 4
  Uniprot ID: Q15303
  ENST ID: ENST00000342788
  CDS Start-End: 312-4238
ggagcgagcaagcgaaggctcacgcggggaaatagctgcacagtccggcccagagcgccaagcgcacacaccgagcacactcccacacgcgcacacacgcgctcacactcgccccctcctcgggccccggccctggacccgcgggcgcggactcggtcgcccgccctgggagtcgccacaccgcgcgcgccgcgcccgcccccctcgcacccccacgcgcgcccggctgggggatctcctccgcgtgcccgaaagggggatatgccatttggacatgtaattgtcagcacgggatctgagacttccaaaaaatgaagccggcgacaggactttgggtctgggtgagccttctcgtggcggcggggaccgtccagcccagcgattctcagtcagtgtgtgcaggaacggagaataaactgagctctctctctgacctggaacagcagtaccgagccttgcgcaagtactatgaaaactgtgaggttgtcatgggcaacctggagataaccagcattgagcacaaccgggacctctccttcctgcggtctgttcgagaagtcacaggctacgtgttagtggctcttaatcagtttcgttacctgcctctggagaatttacgcattattcgtgggacaaaactttatgaggatcgatatgccttggcaatatttttaaactacagaaaagatggaaactttggacttcaagaacttggattaaagaacttgacagaaatcctaaatggtggagtctatgtagaccagaacaaattcctttgttatgcagacaccattcattggcaagatattgttcggaacccatggccttccaacttgactcttgtgtcaacaaatggtagttcaggatgtggacgttgccataagtcctgtactggccgttgctggggacccacagaaaatcattgccagactttgacaaggacggtgtgtgcagaacaatgtgacggcagatgctacggaccttacgtcagtgactgctgccatcgagaatgtgctggaggctgctcaggacctaaggacacagactgctttgcctgcatgaatttcaatgacagtggagcatgtgttactcagtgtccccaaacctttgtctacaatccaaccacctttcaactggagcacaatttcaatgcaaagtacacatatggagcattctgtgtcaagaaatgtccacataactttgtggtagattccagttcttgtgtgcgtgcctgccctagttccaagatggaagtagaagaaaatgggattaaaatgtgtaaaccttgcactgacatttgcccaaaagcttgtgatggcattggcacaggatcattgatgtcagctcagactgtggattccagtaacattgacaaattcataaactgtaccaagatcaatgggaatttgatctttctagtcactggtattcatggggacccttacaatgcaattgaagccatagacccagagaaactgaacgtctttcggacagtcagagagataacaggtttcctgaacatacagtcatggccaccaaacatgactgacttcagtgttttttctaacctggtgaccattggtggaagagtactctatagtggcctgtccttgcttatcctcaagcaacagggcatcacctctctacagttccagtccctgaaggaaatcagcgcaggaaacatctatattactgacaacagcaacctgtgttattatcataccattaactggacaacactcttcagcacaatcaaccagagaatagtaatccgggacaacagaaaagctgaaaattgtactgctgaaggaatggtgtgcaaccatctgtgttccagtgatggctgttggggacctgggccagaccaatgtctgtcgtgtcgccgcttcagtagaggaaggatctgcatagagtcttgtaacctctatgatggtgaatttcgggagtttgagaatggctccatctgtgtggagtgtgacccccagtgtgagaagatggaagatggcctcctcacatgccatggaccgggtcctgacaactgtacaaagtgctctcattttaaagatggcccaaactgtgtggaaaaatgtccagatggcttacagggggcaaacagtttcattttcaagtatgctgatccagatcgggagtgccacccatgccatccaaactgcacccaagggtgtaacggtcccactagtcatgactgcatttactacccatggacgggccattccactttaccacaacatgctagaactcccctgattgcagctggagtaattggtgggctcttcattctggtcattgtgggtctgacatttgctgtttatgttagaaggaagagcatcaaaaagaaaagagccttgagaagattcttggaaacagagttggtggaaccattaactcccagtggcacagcacccaatcaagctcaacttcgtattttgaaagaaactgagctgaagagggtaaaagtccttggctcaggtgcttttggaacggtttataaaggtatttgggtacctgaaggagaaactgtgaagattcctgtggctattaagattcttaatgagacaactggtcccaaggcaaatgtggagttcatggatgaagctctgatcatggcaagtatggatcatccacacctagtccggttgctgggtgtgtgtctgagcccaaccatccagctggttactcaacttatgccccatggctgcctgttggagtatgtccacgagcacaaggataacattggatcacaactgctgcttaactggtgtgtccagatagctaagggaatgatgtacctggaagaaagacgactcgttcatcgggatttggcagcccgtaatgtcttagtgaaatctccaaaccatgtgaaaatcacagattttgggctagccagactcttggaaggagatgaaaaagagtacaatgctgatggaggaaagatgccaattaaatggatggctctggagtgtatacattacaggaaattcacccatcagagtgacgtttggagctatggagttactatatgggaactgatgacctttggaggaaaaccctatgatggaattccaacgcgagaaatccctgatttattagagaaaggagaacgtttgcctcagcctcccatctgcactattgacgtttacatggtcatggtcaaatgttggatgattgatgctgacagtagacctaaatttaaggaactggctgctgagttttcaaggatggctcgagaccctcaaagatacctagttattcagggtgatgatcgtatgaagcttcccagtccaaatgacagcaagttctttcagaatctcttggatgaagaggatttggaagatatgatggatgctgaggagtacttggtccctcaggctttcaacatcccacctcccatctatacttccagagcaagaattgactcgaataggagtgaaattggacacagccctcctcctgcctacacccccatgtcaggaaaccagtttgtataccgagatggaggttttgctgctgaacaaggagtgtctgtgccctacagagccccaactagcacaattccagaagctcctgtggcacagggtgctactgctgagatttttgatgactcctgctgtaatggcaccctacgcaagccagtggcaccccatgtccaagaggacagtagcacccagaggtacagtgctgaccccaccgtgtttgccccagaacggagcccacgaggagagctggatgaggaaggttacatgactcctatgcgagacaaacccaaacaagaatacctgaatccagtggaggagaacccttttgtttctcggagaaaaaatggagaccttcaagcattggataatcccgaatatcacaatgcatccaatggtccacccaaggccgaggatgagtatgtgaatgagccactgtacctcaacacctttgccaacaccttgggaaaagctgagtacctgaagaacaacatactgtcaatgccagagaaggccaagaaagcgtttgacaaccctgactactggaaccacagcctgccacctcggagcacccttcagcacccagactacctgcaggagtacagcacaaaatatttttataaacagaatgggcggatccggcctattgtggcagagaatcctgaatacctctctgagttctccctgaagccaggcactgtgctgccgcctccaccttacagacaccggaatactgtggtgtaagctcagttgtggttttttaggtggagagacacacctgctccaatttccccacccccctctctttctctggtggtcttccttctaccccaaggccagtagttttgacacttcccagtggaagatacagagatgcaatgatagttatgtgcttacctaacttgaacattagagggaaagactgaaagagaaagataggaggaaccacaatgtttcttcatttctctgcatgggttggtcaggagaatgaaacagctagagaaggaccagaaaatgtaaggcaatgctgcctactatcaaactagctgtcactttttttctttttctttttctttctttgtttctttcttcctcttcttttttttttttttttttaaagcagatggttgaaacacccatgctatctgttcctatctgcaggaactgatgtgtgcatatttagcatccctggaaatcataataaagtttccattagaacaaaagaataacattttctataacatatgatggtgtctgaaattgagaatccagtttctttccccagcagtttctgtcctagcaagtaagaatggccaactcaactttcataatttaaaaatctccattaaagttataactagtaattatgttttcaacactttttggtttttttcattttgttttgctctgaccgattcctttatatttgctcccctatttttggctttaatttctaattgcaaagatgtttacatcaaagcttcttcacagaatttaagcaagaaatattttaatatagtgaaatggccactactttaagtatacaatctttaaaataagaaagggaggctaatatttttcatgctatcaaattatcttcaccctcatcctttacatttttcaacatttttttttctccataaatgacactacttgataggccgttggttgtctgaagagtagaagggaaactaagagacagttctctgtggttcaggaaaactactgatactttcaggggtggcccaatgagggaatccattgaactggaagaaacacactggattgggtatgtctacctggcagatactcagaaatgtagtttgcacttaagctgtaattttatttgttctttttctgaactccattttggattttgaatcaagcaatatggaagcaaccagcaaattaactaatttaagtacatttttaaaaaaagagctaagataaagactgtggaaatgccaaaccaagcaaattaggaaccttgcaacggtatccagggactatgatgagaggccagcacattatcttcatatgtcacctttgctacgcaaggaaatttgttcagttcgtatacttcgtaagaaggaatgcgagtaaggattggcttgaattccatggaatttctagtatgagactatttatatgaagtagaaggtaactctttgcacataaattggtataataaaaagaaaaacacaaacattcaaagcttagggataggtccttgggtcaaaagttgtaaataaatgtgaaacatcttctcatgcaattattttattatccaacacactaatcttttgatactttatataattccctttcttcatatactgcatccagtactagaaccatcattattatgtatcattttgaaagaatacctgatgagatgaaggatgagaacaaatgacagagatgagtctccaagtaaagggggcctcacatcaataattaggaaacttagatataagtcgcccttttctgaaaattctaccccaagtcatttagatttttaaaaaatatttctaatgttaaaatattgggaccaaattagaatcaatagtataagattaattaattagagtaaaaatatctattaaggcagagaaagtttagagaaaaaaatccaaagaaatttgtgtttcttcctattctgaacaagtaaatccatccatccatccatccaaacctcctttatctaactgtgtctactaaaagcaccatgttttgtggggaacactcagataaatggaatatcatcctcaacttcaaaattctatgatctaggagatttaattaaaatgacattttaatttttctatgcgttccaacaatcagattgcatagtctcttttgtgaatagctgtcatataatcagttgtactgtaagatatctcctttaaactcatttgggatataagttaaacatccttcaaattgttgatgttgacaaacaggataatttcaataatattattcaaacataaactggtctaggagaatattgcatcactgactaattagcctatctagagtctaacttcaccattaaaccaaaagcagatggtggtccttggccaagaatattggagacattggagttggtttttttctaagctataagaagtgaggcgagctgaaaaagtatggtagagcaggagaagggtttgtgagattccttctagtgaagttcaccctcaaacttttcaggggtaaagacacagagtgattcaggggccacaatctaatagctcagggctctcctatccattcagagaagtctctaggaaaagggatctcatatcagtacttatgaaaaattgaatataagcctccctttctaaataaatctgcatcgagtcatcacagccctctttttggatactataccttgattttttttttctgatttacaatatgcatatggtttctactgggctatagaaagcagaatcactcattttggagaaggaaaaaatgaatagttaaaacaaacttttaactgttaaggtaacagaaatgtatttagtgaatgtctctttcctcctaagaacacaagacttctacatgttgggtaatacctagagatgcatgtaggaataatccaaaatgacccaaatgctttataatagcaccactttataattcttttgaatgatttctgtagtatataattgacttcagttgtttgagtgttttttgttttatttttgtcccccctgggaaaacatatttcagcatgtataagagggagaaaaaaagtttcattccttccagagaataacttatttagtccagtagggtagaattttaaaatgtcagttaaagtcttcaaagtgcttggggggatatcagattccagaggccaattgtagcaattgaaatttgcagaatcaattatgtaaatctgagacaaattagtattaaaattacacggagtatattttttaaatcacccaactttgtagattatacctattttgggcaggtatggaaaaattttgcagttaaatgattgcctaaagaaagtggtaaacaggtgaggaaagatggcctctgatctaggatagatccagaaccacaaagcatctgcaccacaaaaggtgttagactaccaagcagctcctggttttctgcatagtattagtagcacagcttaggatgagaatcctttctccagtaacattcttaaaatagcatgaaaaacaacgcaaaactcaaatttctattaaaacacacaaactaaaatcaagtgattcttttttgtagattagggagaaggactgaatatctaatttaagagaaggaatagtgtttaagtgttatagtgtgtgagctaataccttctaaaggaaagacatggcatgaagattgtgcatacttacaatgctaaggaaaaatcaagaaaaggactgtgtgaggctctgctactagatgaagttggaaggactattaatgtgcttcttgaagtatcaaaaatgaaaagaaaattaaaattgtttaagcctgacagggaaggatgtaaatacaagtttttctagagctctctaacctttatttcaaaactggaattattcatccatctgtaattgttgataatttaactagtatatgtagttcataaggtaatagaaaaggtgatcatgaaagcatgtatataactggacagaaccacgataatgctataagatgtagatttagttaggttatcagatgttaaatgattttaatattattaaataaatcaaactagaaaactaaccacaagtataatgtaacaaagttaaatgcaggatataaaaatgtaggatggattttgcatagtaaaaagataagtttgccatttaaaattgttgtttgttgggtttagctgaaagtaggcatatatggttccacttgggaaaacttgctttaaagcattacaatgaacaattttttctcattctcttattcctttatcactttttaaatgtaaagaaaattgtatttatttatttttttaaataaacaccaccttgcagaatttaataggcaaacatgttacatatgactaagtaagggtcttcaagatgaagtaaagaaaatgtaaatgttctattaccttatgcagagacaaaaaaaaaaaggagtggtgtcatttagctagcaaacaaacaaaatacagttaattggtgatatgtcctttcttttctcactatgccctcttgcctccaaaaatgacaacaaagaatcacaatttttctgataaataaatgctaaaccaagcgtttcaaactattgcattgccattcttttggactttagttattagaatgatgattgttatagggcaaatgagaaatccatgtgcatcagcttctagttgttaaaaaaaccagataaattaacttctactgtatactgtgggcagaggatcctagagctgatcctacaacatcagcttctagttgttaaaaaaaaaaaaagaaacagataaattaacttctactgtatatactgtgggcagaggatcttactgtgcctctgtttgtgtacatggacttcggtgtgtatcagtttgaaggacagccttgccccatgtaaacatataaatgcagattggtatcgcctggttgctatttgcttaagaacaaatattatacagatgagatcaggcataattttaaaagatcattatcagtggagacctcattattactgatattacaatggggccagtttttatacttctgggtagaattaataaaatttttctgatcccagagatctgagttctctctgcagttggaaacaagaagctgttgtgggcattgtgtcgggccaggggcccttgtgtttgtgtgggcaaatatcttttagcagtgtgagctgcttttttcttttcattaaaagtctctctaaaataatagaaatttcagatactcggttcaagtctcactgattttgtagaggtccaaaaatgtaggatctgtcacttttgcaggcccctgcctcacctaattcctggccaggtgacattttgggcagaagtaaatgcttctatagtcacaagctaaaatgactctaagccccaatttcacggggggtattcacatgcttcctctggaaaatactctttgacagtcagctttgcaagtaagtgattaccttgttaggaatcaaagaaaaatgtatttctctctgacctttagaggaaaatagaatccttcccttttttgcccattgacacaactggcactgctctcttccctttctaccaccctggttcaaagtagtcccccgatgctgtcctgttcctttcttaagccatagtggatctctgagatcctacaccccactttgtgaaacactgacttcatctttgccctcgaatgcctgattttttcataagagattctagcaatttggacactgtttaagtgaactatcaaactaccgcatagagaatatttaagctattaaaattatggtttcccatgaagatcaattctctgtgtccttccctataggaatttgagacgagttagccctgtgatgaatcttgaaactcacatatgtccacatacacttggtagaacttcgatttaatctttacataaaagctgtacatataaccaagaagttatttttgccagtaaattaacttatttgctttattcatcttatttggttcctaatcgtaaatattttgtagctgctgtaaatttttttctcccaaatgaggagtcttattatcataaaggtaaaggctattcagctttgataaccacctgcaattcttttttggatcattcatccatctaacaaatacataatgaggacagttcatgttaatgaaaatccatgttgtttaatagaatgccatcctttacctacttttgctctttatggacgtttttcttttcatgctctagtgagctttccctatatcatgagaagtggttatatttgtgcaaatatacaaatataggaaaacaaagattcatacctgtaggcaatagtctaacttgtccaaaccactttgcctttactgctatttttatccccaatgcgtagatatttcccccaggcctatagcctttgtgaaggaaagcaaatcatacctcctgtatattgacacgaatctggttttcaaatgtcatttccagattttttagttaattgggggttgtccttttcccttaatgtgagagtcattttcctgtatatttctggatctctcaggggctgggaggggggagtgaggggactacaaccatagcactccaagaacccttttgggattactccagtaatcaactacgaaagttattttctaaatgtagatatgtaaggtgttcttttaaagtaaggtactttgaaatatgtagcataaactggtactgctgttaaatgggtcgattattaaacggagcagctgtgtgagggcagctaactttgaatgcctgtctccctggctggtgtgtctccttctcatgttgagagcaccagggattgcgtggctgcatgctgaaaccgcattttcccatggtgtatgactagttcatctctttcttgagcaccattacaagaagatcaaatgaaaatgagatcaatgtggaagacaattcatagcacaaaaaaagtcatcttaaatctactctcaaacattcatcttatacatgcatcaaagtaatttactgacatcagtttgggtgagagagggagtcactttactgaaaaggcagaggcttaaggtgtatacatttgtactcacttccttattttcttaacttgtaagcagaaaacaagccctctctcttgtgaagtatcttcaaaggattggggtgcaaaaataccttgctggtaagccatcaatgttttatttaaatccctgcattcaaagttagctgcctttttgaaataaacaaacaaaaaatactactgtatgtttgaaaatgtgaatagtatttttatagcttgttaaagacatggctagttgcatttgtaaataagtataatgttgctttgattttcttttgtggacatctttatttggaacataattgtctttagggttgatttgtatataagtaattggcctgtgattgtttcttttttggttggaagttatcattttgacattacttgtgattctgtgttcagcactattgtgatgtgttcaacctctgcactcgcttacacaataggatatgccaattgtgtgtggtgtaatgttattttgatttttttccatgttattgatgaaggatcatgcacctaacacatactaacttttttaatgttaggcatatttttagtatactttctcttattctttcttctcctccaaccttttacccatcctccttcctttccctcattcctgttgttatttgagaatgagggagaaacagtattttacatttatgtaattaggcttttccgttagttctcaaggatcctcttttggctcttgggaaagaattgtacctgtacaaggcaattatagaatgcgaactgctttgcctcattccatactgatcatcccagctgaacaatttgaaaactgttctgcctttttgttacatgaatctgtcagaaatatatttttaatttaatataaatgaaattcaataaaatatgaaacaaacgtt

SEQ ID NO: 130475 - DNA, 11755 bp, Homo sapiens
  Payload ID: 5522
  Gene Symbol: ERBB4
  Gene Name: erb-b2 receptor tyrosine kinase 4
  ENST ID: ENST00000402597
  CDS Start-End: 108-3857
ttgtctttgcagtgtgtgcaggaacggagaataaactgagctctctctctgacctggaacagcagtaccgagccttgcgcaagtactatgaaaactgtgaggttgtcatgggcaacctggagataaccagcattgagcacaaccgggacctctccttcctgcggtctgttcgagaagtcacaggctacgtgttagtggctcttaatcagtttcgttacctgcctctggagaatttacgcattattcgtgggacaaaactttatgaggatcgatatgccttggcaatatttttaaactacagaaaagatggaaactttggacttcaagaacttggattaaagaacttgacagaaatcctaaatggtggagtctatgtagaccagaacaaattcctttgttatgcagacaccattcattggcaagatattgttcggaacccatggccttccaacttgactcttgtgtcaacaaatggtagttcaggatgtggacgttgccataagtcctgtactggccgttgctggggacccacagaaaatcattgccagactttgacaaggacggtgtgtgcagaacaatgtgacggcagatgctacggaccttacgtcagtgactgctgccatcgagaatgtgctggaggctgctcaggacctaaggacacagactgctttgcctgcatgaatttcaatgacagtggagcatgtgttactcagtgtccccaaacctttgtctacaatccaaccacctttcaactggagcacaatttcaatgcaaagtacacatatggagcattctgtgtcaagaaatgtccacataactttgtggtagattccagttcttgtgtgcgtgcctgccctagttccaagatggaagtagaagaaaatgggattaaaatgtgtaaaccttgcactgacatttgcccaaaagcttgtgatggcattggcacaggatcattgatgtcagctcagactgtggattccagtaacattgacaaattcataaactgtaccaagatcaatgggaatttgatctttctagtcactggtattcatggggacccttacaatgcaattgaagccatagacccagagaaactgaacgtctttcggacagtcagagagataacaggtttcctgaacatacagtcatggccaccaaacatgactgacttcagtgttttttctaacctggtgaccattggtggaagagtactctatagtggcctgtccttgcttatcctcaagcaacagggcatcacctctctacagttccagtccctgaaggaaatcagcgcaggaaacatctatattactgacaacagcaacctgtgttattatcataccattaactggacaacactcttcagcacaatcaaccagagaatagtaatccgggacaacagaaaagctgaaaattgtactgctgaaggaatggtgtgcaaccatctgtgttccagtgatggctgttggggacctgggccagaccaatgtctgtcgtgtcgccgcttcagtagaggaaggatctgcatagagtcttgtaacctctatgatggtgaatttcgggagtttgagaatggctccatctgtgtggagtgtgacccccagtgtgagaagatggaagatggcctcctcacatgccatggaccgggtcctgacaactgtacaaagtgctctcattttaaagatggcccaaactgtgtggaaaaatgtccagatggcttacagggggcaaacagtttcattttcaagtatgctgatccagatcgggagtgccacccatgccatccaaactgcacccaagggtgtaacggtcccactagtcatgactgcatttactacccatggacgggccattccactttaccacaacatgctagaactcccctgattgcagctggagtaattggtgggctcttcattctggtcattgtgggtctgacatttgctgtttatgttagaaggaagagcatcaaaaagaaaagagccttgagaagattcttggaaacagagttggtggaaccattaactcccagtggcacagcacccaatcaagctcaacttcgtattttgaaagaaactgagctgaagagggtaaaagtccttggctcaggtgcttttggaacggtttataaaggtatttgggtacctgaaggagaaactgtgaagattcctgtggctattaagattcttaatgagacaactggtcccaaggcaaatgtggagttcatggatgaagctctgatcatggcaagtatggatcatccacacctagtccggttgctgggtgtgtgtctgagcccaaccatccagctggttactcaacttatgccccatggctgcctgttggagtatgtccacgagcacaaggataacattggatcacaactgctgcttaactggtgtgtccagatagctaagggaatgatgtacctggaagaaagacgactcgttcatcgggatttggcagcccgtaatgtcttagtgaaatctccaaaccatgtgaaaatcacagattttgggctagccagactcttggaaggagatgaaaaagagtacaatgctgatggaggaaagatgccaattaaatggatggctctggagtgtatacattacaggaaattcacccatcagagtgacgtttggagctatggagttactatatgggaactgatgacctttggaggaaaaccctatgatggaattccaacgcgagaaatccctgatttattagagaaaggagaacgtttgcctcagcctcccatctgcactattgacgtttacatggtcatggtcaaatgttggatgattgatgctgacagtagacctaaatttaaggaactggctgctgagttttcaaggatggctcgagaccctcaaagatacctagttattcagggtgatgatcgtatgaagcttcccagtccaaatgacagcaagttctttcagaatctcttggatgaagaggatttggaagatatgatggatgctgaggagtacttggtccctcaggctttcaacatcccacctcccatctatacttccagagcaagaattgactcgaataggagtgaaattggacacagccctcctcctgcctacacccccatgtcaggaaaccagtttgtataccgagatggaggttttgctgctgaacaaggagtgtctgtgccctacagagccccaactagcacaattccagaagctcctgtggcacagggtgctactgctgagatttttgatgactcctgctgtaatggcaccctacgcaagccagtggcaccccatgtccaagaggacagtagcacccagaggtacagtgctgaccccaccgtgtttgccccagaacggagcccacgaggagagctggatgaggaaggttacatgactcctatgcgagacaaacccaaacaagaatacctgaatccagtggaggagaacccttttgtttctcggagaaaaaatggagaccttcaagcattggataatcccgaatatcacaatgcatccaatggtccacccaaggccgaggatgagtatgtgaatgagccactgtacctcaacacctttgccaacaccttgggaaaagctgagtacctgaagaacaacatactgtcaatgccagagaaggccaagaaagcgtttgacaaccctgactactggaaccacagcctgccacctcggagcacccttcagcacccagactacctgcaggagtacagcacaaaatatttttataaacagaatgggcggatccggcctattgtggcagagaatcctgaatacctctctgagttctccctgaagccaggcactgtgctgccgcctccaccttacagacaccggaatactgtggtgtaagctcagttgtggttttttaggtggagagacacacctgctccaatttccccacccccctctctttctctggtggtcttccttctaccccaaggccagtagttttgacacttcccagtggaagatacagagatgcaatgatagttatgtgcttacctaacttgaacattagagggaaagactgaaagagaaagataggaggaaccacaatgtttcttcatttctctgcatgggttggtcaggagaatgaaacagctagagaaggaccagaaaatgtaaggcaatgctgcctactatcaaactagctgtcactttttttctttttctttttctttctttgtttctttcttcctcttcttttttttttttttttttaaagcagatggttgaaacacccatgctatctgttcctatctgcaggaactgatgtgtgcatatttagcatccctggaaatcataataaagtttccattagaacaaaagaataacattttctataacatatgatggtgtctgaaattgagaatccagtttctttccccagcagtttctgtcctagcaagtaagaatggccaactcaactttcataatttaaaaatctccattaaagttataactagtaattatgttttcaacactttttggtttttttcattttgttttgctctgaccgattcctttatatttgctcccctatttttggctttaatttctaattgcaaagatgtttacatcaaagcttcttcacagaatttaagcaagaaatattttaatatagtgaaatggccactactttaagtatacaatctttaaaataagaaagggaggctaatatttttcatgctatcaaattatcttcaccctcatcctttacatttttcaacatttttttttctccataaatgacactacttgataggccgttggttgtctgaagagtagaagggaaactaagagacagttctctgtggttcaggaaaactactgatactttcaggggtggcccaatgagggaatccattgaactggaagaaacacactggattgggtatgtctacctggcagatactcagaaatgtagtttgcacttaagctgtaattttatttgttctttttctgaactccattttggattttgaatcaagcaatatggaagcaaccagcaaattaactaatttaagtacatttttaaaaaaagagctaagataaagactgtggaaatgccaaaccaagcaaattaggaaccttgcaacggtatccagggactatgatgagaggccagcacattatcttcatatgtcacctttgctacgcaaggaaatttgttcagttcgtatacttcgtaagaaggaatgcgagtaaggattggcttgaattccatggaatttctagtatgagactatttatatgaagtagaaggtaactctttgcacataaattggtataataaaaagaaaaacacaaacattcaaagcttagggataggtccttgggtcaaaagttgtaaataaatgtgaaacatcttctcatgcaattattttattatccaacacactaatcttttgatactttatataattccctttcttcatatactgcatccagtactagaaccatcattattatgtatcattttgaaagaatacctgatgagatgaaggatgagaacaaatgacagagatgagtctccaagtaaagggggcctcacatcaataattaggaaacttagatataagtcgcccttttctgaaaattctaccccaagtcatttagatttttaaaaaatatttctaatgttaaaatattgggaccaaattagaatcaatagtataagattaattaattagagtaaaaatatctattaaggcagagaaagtttagagaaaaaaatccaaagaaatttgtgtttcttcctattctgaacaagtaaatccatccatccatccatccaaacctcctttatctaactgtgtctactaaaagcaccatgttttgtggggaacactcagataaatggaatatcatcctcaacttcaaaattctatgatctaggagatttaattaaaatgacattttaatttttctatgcgttccaacaatcagattgcatagtctcttttgtgaatagctgtcatataatcagttgtactgtaagatatctcctttaaactcatttgggatataagttaaacatccttcaaattgttgatgttgacaaacaggataatttcaataatattattcaaacataaactggtctaggagaatattgcatcactgactaattagcctatctagagtctaacttcaccattaaaccaaaagcagatggtggtccttggccaagaatattggagacattggagttggtttttttctaagctataagaagtgaggcgagctgaaaaagtatggtagagcaggagaagggtttgtgagattccttctagtgaagttcaccctcaaacttttcaggggtaaagacacagagtgattcaggggccacaatctaatagctcagggctctcctatccattcagagaagtctctaggaaaagggatctcatatcagtacttatgaaaaattgaatataagcctccctttctaaataaatctgcatcgagtcatcacagccctctttttggatactataccttgattttttttttctgatttacaatatgcatatggtttctactgggctatagaaagcagaatcactcattttggagaaggaaaaaatgaatagttaaaacaaacttttaactgttaaggtaacagaaatgtatttagtgaatgtctctttcctcctaagaacacaagacttctacatgttgggtaatacctagagatgcatgtaggaataatccaaaatgacccaaatgctttataatagcaccactttataattcttttgaatgatttctgtagtatataattgacttcagttgtttgagtgttttttgttttatttttgtcccccctgggaaaacatatttcagcatgtataagagggagaaaaaaagtttcattccttccagagaataacttatttagtccagtagggtagaattttaaaatgtcagttaaagtcttcaaagtgcttggggggatatcagattccagaggccaattgtagcaattgaaatttgcagaatcaattatgtaaatctgagacaaattagtattaaaattacacggagtatattttttaaatcacccaactttgtagattatacctattttgggcaggtatggaaaaattttgcagttaaatgattgcctaaagaaagtggtaaacaggtgaggaaagatggcctctgatctaggatagatccagaaccacaaagcatctgcaccacaaaaggtgttagactaccaagcagctcctggttttctgcatagtattagtagcacagcttaggatgagaatcctttctccagtaacattcttaaaatagcatgaaaaacaacgcaaaactcaaatttctattaaaacacacaaactaaaatcaagtgattcttttttgtagattagggagaaggactgaatatctaatttaagagaaggaatagtgtttaagtgttatagtgtgtgagctaataccttctaaaggaaagacatggcatgaagattgtgcatacttacaatgctaaggaaaaatcaagaaaaggactgtgtgaggctctgctactagatgaagttggaaggactattaatgtgcttcttgaagtatcaaaaatgaaaagaaaattaaaattgtttaagcctgacagggaaggatgtaaatacaagtttttctagagctctctaacctttatttcaaaactggaattattcatccatctgtaattgttgataatttaactagtatatgtagttcataaggtaatagaaaaggtgatcatgaaagcatgtatataactggacagaaccacgataatgctataagatgtagatttagttaggttatcagatgttaaatgattttaatattattaaataaatcaaactagaaaactaaccacaagtataatgtaacaaagttaaatgcaggatataaaaatgtaggatggattttgcatagtaaaaagataagtttgccatttaaaattgttgtttgttgggtttagctgaaagtaggcatatatggttccacttgggaaaacttgctttaaagcattacaatgaacaattttttctcattctcttattcctttatcactttttaaatgtaaagaaaattgtatttatttatttttttaaataaacaccaccttgcagaatttaataggcaaacatgttacatatgactaagtaagggtcttcaagatgaagtaaagaaaatgtaaatgttctattaccttatgcagagacaaaaaaaaaaaggagtggtgtcatttagctagcaaacaaacaaaatacagttaattggtgatatgtcctttcttttctcactatgccctcttgcctccaaaaatgacaacaaagaatcacaatttttctgataaataaatgctaaaccaagcgtttcaaactattgcattgccattcttttggactttagttattagaatgatgattgttatagggcaaatgagaaatccatgtgcatcagcttctagttgttaaaaaaaccagataaattaacttctactgtatactgtgggcagaggatcctagagctgatcctacaacatcagcttctagttgttaaaaaaaaaaaaagaaacagataaattaacttctactgtatatactgtgggcagaggatcttactgtgcctctgtttgtgtacatggacttcggtgtgtatcagtttgaaggacagccttgccccatgtaaacatataaatgcagattggtatcgcctggttgctatttgcttaagaacaaatattatacagatgagatcaggcataattttaaaagatcattatcagtggagacctcattattactgatattacaatggggccagtttttatacttctgggtagaattaataaaatttttctgatcccagagatctgagttctctctgcagttggaaacaagaagctgttgtgggcattgtgtcgggccaggggcccttgtgtttgtgtgggcaaatatcttttagcagtgtgagctgcttttttcttttcattaaaagtctctctaaaataatagaaatttcagatactcggttcaagtctcactgattttgtagaggtccaaaaatgtaggatctgtcacttttgcaggcccctgcctcacctaattcctggccaggtgacattttgggcagaagtaaatgcttctatagtcacaagctaaaatgactctaagccccaatttcacggggggtattcacatgcttcctctggaaaatactctttgacagtcagctttgcaagtaagtgattaccttgttaggaatcaaagaaaaatgtatttctctctgacctttagaggaaaatagaatccttcccttttttgcccattgacacaactggcactgctctcttccctttctaccaccctggttcaaagtagtcccccgatgctgtcctgttcctttcttaagccatagtggatctctgagatcctacaccccactttgtgaaacactgacttcatctttgccctcgaatgcctgattttttcataagagattctagcaatttggacactgtttaagtgaactatcaaactaccgcatagagaatatttaagctattaaaattatggtttcccatgaagatcaattctctgtgtccttccctataggaatttgagacgagttagccctgtgatgaatcttgaaactcacatatgtccacatacacttggtagaacttcgatttaatctttacataaaagctgtacatataaccaagaagttatttttgccagtaaattaacttatttgctttattcatcttatttggttcctaatcgtaaatattttgtagctgctgtaaatttttttctcccaaatgaggagtcttattatcataaaggtaaaggctattcagctttgataaccacctgcaattcttttttggatcattcatccatctaacaaatacataatgaggacagttcatgttaatgaaaatccatgttgtttaatagaatgccatcctttacctacttttgctctttatggacgtttttcttttcatgctctagtgagctttccctatatcatgagaagtggttatatttgtgcaaatatacaaatataggaaaacaaagattcatacctgtaggcaatagtctaacttgtccaaaccactttgcctttactgctatttttatccccaatgcgtagatatttcccccaggcctatagcctttgtgaaggaaagcaaatcatacctcctgtatattgacacgaatctggttttcaaatgtcatttccagattttttagttaattgggggttgtccttttcccttaatgtgagagtcattttcctgtatatttctggatctctcaggggctgggaggggggagtgaggggactacaaccatagcactccaagaacccttttgggattactccagtaatcaactacgaaagttattttctaaatgtagatatgtaaggtgttcttttaaagtaaggtactttgaaatatgtagcataaactggtactgctgttaaatgggtcgattattaaacggagcagctgtgtgagggcagctaactttgaatgcctgtctccctggctggtgtgtctccttctcatgttgagagcaccagggattgcgtggctgcatgctgaaaccgcattttcccatggtgtatgactagttcatctctttcttgagcaccattacaagaagatcaaatgaaaatgagatcaatgtggaagacaattcatagcacaaaaaaagtcatcttaaatctactctcaaacattcatcttatacatgcatcaaagtaatttactgacatcagtttgggtgagagagggagtcactttactgaaaaggcagaggcttaaggtgtatacatttgtactcacttccttattttcttaacttgtaagcagaaaacaagccctctctcttgtgaagtatcttcaaaggattggggtgcaaaaataccttgctggtaagccatcaatgttttatttaaatccctgcattcaaagttagctgcctttttgaaataaacaaacaaaaaatactactgtatgtttgaaaatgtgaatagtatttttatagcttgttaaagacatggctagttgcatttgtaaataagtataatgttgctttgattttcttttgtggacatctttatttggaacataattgtctttagggttgatttgtatataagtaattggcctgtgattgtttcttttttggttggaagttatcattttgacattacttgtgattctgtgttcagcactattgtgatgtgttcaacctctgcactcgcttacacaataggatatgccaattgtgtgtggtgtaatgttattttgatttttttccatgttattgatgaaggatcatgcacctaacacatactaacttttttaatgttaggcatatttttagtatactttctcttattctttcttctcctccaaccttttacccatcctccttcctttccctcattcctgttgttatttgagaatgagggagaaacagtattttacatttatgtaattaggcttttccgttagttctcaaggatcctcttttggctcttgggaaagaattgtacctgtacaaggcaattatagaatgcgaactgctttgcctcattccatactgatcatcccagctgaacaatttgaaaactgttctgcctttttgttacatgaatctgtcagaaatatatttttaatttaatataaatgaaattcaataaaatatgaaacaaacgtt

SEQ ID NO: 130476 - DNA, 12084 bp, Homo sapiens
  Payload ID: 5522
  Gene Symbol: ERBB4
  Gene Name: erb-b2 receptor tyrosine kinase 4
  Uniprot ID: Q15303
  ENST ID: ENST00000436443
  CDS Start-End: 312-4190
ggagcgagcaagcgaaggctcacgcggggaaatagctgcacagtccggcccagagcgccaagcgcacacaccgagcacactcccacacgcgcacacacgcgctcacactcgccccctcctcgggccccggccctggacccgcgggcgcggactcggtcgcccgccctgggagtcgccacaccgcgcgcgccgcgcccgcccccctcgcacccccacgcgcgcccggctgggggatctcctccgcgtgcccgaaagggggatatgccatttggacatgtaattgtcagcacgggatctgagacttccaaaaaatgaagccggcgacaggactttgggtctgggtgagccttctcgtggcggcggggaccgtccagcccagcgattctcagtcagtgtgtgcaggaacggagaataaactgagctctctctctgacctggaacagcagtaccgagccttgcgcaagtactatgaaaactgtgaggttgtcatgggcaacctggagataaccagcattgagcacaaccgggacctctccttcctgcggtctgttcgagaagtcacaggctacgtgttagtggctcttaatcagtttcgttacctgcctctggagaatttacgcattattcgtgggacaaaactttatgaggatcgatatgccttggcaatatttttaaactacagaaaagatggaaactttggacttcaagaacttggattaaagaacttgacagaaatcctaaatggtggagtctatgtagaccagaacaaattcctttgttatgcagacaccattcattggcaagatattgttcggaacccatggccttccaacttgactcttgtgtcaacaaatggtagttcaggatgtggacgttgccataagtcctgtactggccgttgctggggacccacagaaaatcattgccagactttgacaaggacggtgtgtgcagaacaatgtgacggcagatgctacggaccttacgtcagtgactgctgccatcgagaatgtgctggaggctgctcaggacctaaggacacagactgctttgcctgcatgaatttcaatgacagtggagcatgtgttactcagtgtccccaaacctttgtctacaatccaaccacctttcaactggagcacaatttcaatgcaaagtacacatatggagcattctgtgtcaagaaatgtccacataactttgtggtagattccagttcttgtgtgcgtgcctgccctagttccaagatggaagtagaagaaaatgggattaaaatgtgtaaaccttgcactgacatttgcccaaaagcttgtgatggcattggcacaggatcattgatgtcagctcagactgtggattccagtaacattgacaaattcataaactgtaccaagatcaatgggaatttgatctttctagtcactggtattcatggggacccttacaatgcaattgaagccatagacccagagaaactgaacgtctttcggacagtcagagagataacaggtttcctgaacatacagtcatggccaccaaacatgactgacttcagtgttttttctaacctggtgaccattggtggaagagtactctatagtggcctgtccttgcttatcctcaagcaacagggcatcacctctctacagttccagtccctgaaggaaatcagcgcaggaaacatctatattactgacaacagcaacctgtgttattatcataccattaactggacaacactcttcagcacaatcaaccagagaatagtaatccgggacaacagaaaagctgaaaattgtactgctgaaggaatggtgtgcaaccatctgtgttccagtgatggctgttggggacctgggccagaccaatgtctgtcgtgtcgccgcttcagtagaggaaggatctgcatagagtcttgtaacctctatgatggtgaatttcgggagtttgagaatggctccatctgtgtggagtgtgacccccagtgtgagaagatggaagatggcctcctcacatgccatggaccgggtcctgacaactgtacaaagtgctctcattttaaagatggcccaaactgtgtggaaaaatgtccagatggcttacagggggcaaacagtttcattttcaagtatgctgatccagatcgggagtgccacccatgccatccaaactgcacccaagggtgtaacggtcccactagtcatgactgcatttactacccatggacgggccattccactttaccacaacatgctagaactcccctgattgcagctggagtaattggtgggctcttcattctggtcattgtgggtctgacatttgctgtttatgttagaaggaagagcatcaaaaagaaaagagccttgagaagattcttggaaacagagttggtggaaccattaactcccagtggcacagcacccaatcaagctcaacttcgtattttgaaagaaactgagctgaagagggtaaaagtccttggctcaggtgcttttggaacggtttataaaggtatttgggtacctgaaggagaaactgtgaagattcctgtggctattaagattcttaatgagacaactggtcccaaggcaaatgtggagttcatggatgaagctctgatcatggcaagtatggatcatccacacctagtccggttgctgggtgtgtgtctgagcccaaccatccagctggttactcaacttatgccccatggctgcctgttggagtatgtccacgagcacaaggataacattggatcacaactgctgcttaactggtgtgtccagatagctaagggaatgatgtacctggaagaaagacgactcgttcatcgggatttggcagcccgtaatgtcttagtgaaatctccaaaccatgtgaaaatcacagattttgggctagccagactcttggaaggagatgaaaaagagtacaatgctgatggaggaaagatgccaattaaatggatggctctggagtgtatacattacaggaaattcacccatcagagtgacgtttggagctatggagttactatatgggaactgatgacctttggaggaaaaccctatgatggaattccaacgcgagaaatccctgatttattagagaaaggagaacgtttgcctcagcctcccatctgcactattgacgtttacatggtcatggtcaaatgttggatgattgatgctgacagtagacctaaatttaaggaactggctgctgagttttcaaggatggctcgagaccctcaaagatacctagttattcagggtgatgatcgtatgaagcttcccagtccaaatgacagcaagttctttcagaatctcttggatgaagaggatttggaagatatgatggatgctgaggagtacttggtccctcaggctttcaacatcccacctcccatctatacttccagagcaagaattgactcgaataggaaccagtttgtataccgagatggaggttttgctgctgaacaaggagtgtctgtgccctacagagccccaactagcacaattccagaagctcctgtggcacagggtgctactgctgagatttttgatgactcctgctgtaatggcaccctacgcaagccagtggcaccccatgtccaagaggacagtagcacccagaggtacagtgctgaccccaccgtgtttgccccagaacggagcccacgaggagagctggatgaggaaggttacatgactcctatgcgagacaaacccaaacaagaatacctgaatccagtggaggagaacccttttgtttctcggagaaaaaatggagaccttcaagcattggataatcccgaatatcacaatgcatccaatggtccacccaaggccgaggatgagtatgtgaatgagccactgtacctcaacacctttgccaacaccttgggaaaagctgagtacctgaagaacaacatactgtcaatgccagagaaggccaagaaagcgtttgacaaccctgactactggaaccacagcctgccacctcggagcacccttcagcacccagactacctgcaggagtacagcacaaaatatttttataaacagaatgggcggatccggcctattgtggcagagaatcctgaatacctctctgagttctccctgaagccaggcactgtgctgccgcctccaccttacagacaccggaatactgtggtgtaagctcagttgtggttttttaggtggagagacacacctgctccaatttccccacccccctctctttctctggtggtcttccttctaccccaaggccagtagttttgacacttcccagtggaagatacagagatgcaatgatagttatgtgcttacctaacttgaacattagagggaaagactgaaagagaaagataggaggaaccacaatgtttcttcatttctctgcatgggttggtcaggagaatgaaacagctagagaaggaccagaaaatgtaaggcaatgctgcctactatcaaactagctgtcactttttttctttttctttttctttctttgtttctttcttcctcttcttttttttttttttttttaaagcagatggttgaaacacccatgctatctgttcctatctgcaggaactgatgtgtgcatatttagcatccctggaaatcataataaagtttccattagaacaaaagaataacattttctataacatatgatggtgtctgaaattgagaatccagtttctttccccagcagtttctgtcctagcaagtaagaatggccaactcaactttcataatttaaaaatctccattaaagttataactagtaattatgttttcaacactttttggtttttttcattttgttttgctctgaccgattcctttatatttgctcccctatttttggctttaatttctaattgcaaagatgtttacatcaaagcttcttcacagaatttaagcaagaaatattttaatatagtgaaatggccactactttaagtatacaatctttaaaataagaaagggaggctaatatttttcatgctatcaaattatcttcaccctcatcctttacatttttcaacatttttttttctccataaatgacactacttgataggccgttggttgtctgaagagtagaagggaaactaagagacagttctctgtggttcaggaaaactactgatactttcaggggtggcccaatgagggaatccattgaactggaagaaacacactggattgggtatgtctacctggcagatactcagaaatgtagtttgcacttaagctgtaattttatttgttctttttctgaactccattttggattttgaatcaagcaatatggaagcaaccagcaaattaactaatttaagtacatttttaaaaaaagagctaagataaagactgtggaaatgccaaaccaagcaaattaggaaccttgcaacggtatccagggactatgatgagaggccagcacattatcttcatatgtcacctttgctacgcaaggaaatttgttcagttcgtatacttcgtaagaaggaatgcgagtaaggattggcttgaattccatggaatttctagtatgagactatttatatgaagtagaaggtaactctttgcacataaattggtataataaaaagaaaaacacaaacattcaaagcttagggataggtccttgggtcaaaagttgtaaataaatgtgaaacatcttctcatgcaattattttattatccaacacactaatcttttgatactttatataattccctttcttcatatactgcatccagtactagaaccatcattattatgtatcattttgaaagaatacctgatgagatgaaggatgagaacaaatgacagagatgagtctccaagtaaagggggcctcacatcaataattaggaaacttagatataagtcgcccttttctgaaaattctaccccaagtcatttagatttttaaaaaatatttctaatgttaaaatattgggaccaaattagaatcaatagtataagattaattaattagagtaaaaatatctattaaggcagagaaagtttagagaaaaaaatccaaagaaatttgtgtttcttcctattctgaacaagtaaatccatccatccatccatccaaacctcctttatctaactgtgtctactaaaagcaccatgttttgtggggaacactcagataaatggaatatcatcctcaacttcaaaattctatgatctaggagatttaattaaaatgacattttaatttttctatgcgttccaacaatcagattgcatagtctcttttgtgaatagctgtcatataatcagttgtactgtaagatatctcctttaaactcatttgggatataagttaaacatccttcaaattgttgatgttgacaaacaggataatttcaataatattattcaaacataaactggtctaggagaatattgcatcactgactaattagcctatctagagtctaacttcaccattaaaccaaaagcagatggtggtccttggccaagaatattggagacattggagttggtttttttctaagctataagaagtgaggcgagctgaaaaagtatggtagagcaggagaagggtttgtgagattccttctagtgaagttcaccctcaaacttttcaggggtaaagacacagagtgattcaggggccacaatctaatagctcagggctctcctatccattcagagaagtctctaggaaaagggatctcatatcagtacttatgaaaaattgaatataagcctccctttctaaataaatctgcatcgagtcatcacagccctctttttggatactataccttgattttttttttctgatttacaatatgcatatggtttctactgggctatagaaagcagaatcactcattttggagaaggaaaaaatgaatagttaaaacaaacttttaactgttaaggtaacagaaatgtatttagtgaatgtctctttcctcctaagaacacaagacttctacatgttgggtaatacctagagatgcatgtaggaataatccaaaatgacccaaatgctttataatagcaccactttataattcttttgaatgatttctgtagtatataattgacttcagttgtttgagtgttttttgttttatttttgtcccccctgggaaaacatatttcagcatgtataagagggagaaaaaaagtttcattccttccagagaataacttatttagtccagtagggtagaattttaaaatgtcagttaaagtcttcaaagtgcttggggggatatcagattccagaggccaattgtagcaattgaaatttgcagaatcaattatgtaaatctgagacaaattagtattaaaattacacggagtatattttttaaatcacccaactttgtagattatacctattttgggcaggtatggaaaaattttgcagttaaatgattgcctaaagaaagtggtaaacaggtgaggaaagatggcctctgatctaggatagatccagaaccacaaagcatctgcaccacaaaaggtgttagactaccaagcagctcctggttttctgcatagtattagtagcacagcttaggatgagaatcctttctccagtaacattcttaaaatagcatgaaaaacaacgcaaaactcaaatttctattaaaacacacaaactaaaatcaagtgattcttttttgtagattagggagaaggactgaatatctaatttaagagaaggaatagtgtttaagtgttatagtgtgtgagctaataccttctaaaggaaagacatggcatgaagattgtgcatacttacaatgctaaggaaaaatcaagaaaaggactgtgtgaggctctgctactagatgaagttggaaggactattaatgtgcttcttgaagtatcaaaaatgaaaagaaaattaaaattgtttaagcctgacagggaaggatgtaaatacaagtttttctagagctctctaacctttatttcaaaactggaattattcatccatctgtaattgttgataatttaactagtatatgtagttcataaggtaatagaaaaggtgatcatgaaagcatgtatataactggacagaaccacgataatgctataagatgtagatttagttaggttatcagatgttaaatgattttaatattattaaataaatcaaactagaaaactaaccacaagtataatgtaacaaagttaaatgcaggatataaaaatgtaggatggattttgcatagtaaaaagataagtttgccatttaaaattgttgtttgttgggtttagctgaaagtaggcatatatggttccacttgggaaaacttgctttaaagcattacaatgaacaattttttctcattctcttattcctttatcactttttaaatgtaaagaaaattgtatttatttatttttttaaataaacaccaccttgcagaatttaataggcaaacatgttacatatgactaagtaagggtcttcaagatgaagtaaagaaaatgtaaatgttctattaccttatgcagagacaaaaaaaaaaaggagtggtgtcatttagctagcaaacaaacaaaatacagttaattggtgatatgtcctttcttttctcactatgccctcttgcctccaaaaatgacaacaaagaatcacaatttttctgataaataaatgctaaaccaagcgtttcaaactattgcattgccattcttttggactttagttattagaatgatgattgttatagggcaaatgagaaatccatgtgcatcagcttctagttgttaaaaaaaccagataaattaacttctactgtatactgtgggcagaggatcctagagctgatcctacaacatcagcttctagttgttaaaaaaaaaaaaagaaacagataaattaacttctactgtatatactgtgggcagaggatcttactgtgcctctgtttgtgtacatggacttcggtgtgtatcagtttgaaggacagccttgccccatgtaaacatataaatgcagattggtatcgcctggttgctatttgcttaagaacaaatattatacagatgagatcaggcataattttaaaagatcattatcagtggagacctcattattactgatattacaatggggccagtttttatacttctgggtagaattaataaaatttttctgatcccagagatctgagttctctctgcagttggaaacaagaagctgttgtgggcattgtgtcgggccaggggcccttgtgtttgtgtgggcaaatatcttttagcagtgtgagctgcttttttcttttcattaaaagtctctctaaaataatagaaatttcagatactcggttcaagtctcactgattttgtagaggtccaaaaatgtaggatctgtcacttttgcaggcccctgcctcacctaattcctggccaggtgacattttgggcagaagtaaatgcttctatagtcacaagctaaaatgactctaagccccaatttcacggggggtattcacatgcttcctctggaaaatactctttgacagtcagctttgcaagtaagtgattaccttgttaggaatcaaagaaaaatgtatttctctctgacctttagaggaaaatagaatccttcccttttttgcccattgacacaactggcactgctctcttccctttctaccaccctggttcaaagtagtcccccgatgctgtcctgttcctttcttaagccatagtggatctctgagatcctacaccccactttgtgaaacactgacttcatctttgccctcgaatgcctgattttttcataagagattctagcaatttggacactgtttaagtgaactatcaaactaccgcatagagaatatttaagctattaaaattatggtttcccatgaagatcaattctctgtgtccttccctataggaatttgagacgagttagccctgtgatgaatcttgaaactcacatatgtccacatacacttggtagaacttcgatttaatctttacataaaagctgtacatataaccaagaagttatttttgccagtaaattaacttatttgctttattcatcttatttggttcctaatcgtaaatattttgtagctgctgtaaatttttttctcccaaatgaggagtcttattatcataaaggtaaaggctattcagctttgataaccacctgcaattcttttttggatcattcatccatctaacaaatacataatgaggacagttcatgttaatgaaaatccatgttgtttaatagaatgccatcctttacctacttttgctctttatggacgtttttcttttcatgctctagtgagctttccctatatcatgagaagtggttatatttgtgcaaatatacaaatataggaaaacaaagattcatacctgtaggcaatagtctaacttgtccaaaccactttgcctttactgctatttttatccccaatgcgtagatatttcccccaggcctatagcctttgtgaaggaaagcaaatcatacctcctgtatattgacacgaatctggttttcaaatgtcatttccagattttttagttaattgggggttgtccttttcccttaatgtgagagtcattttcctgtatatttctggatctctcaggggctgggaggggggagtgaggggactacaaccatagcactccaagaacccttttgggattactccagtaatcaactacgaaagttattttctaaatgtagatatgtaaggtgttcttttaaagtaaggtactttgaaatatgtagcataaactggtactgctgttaaatgggtcgattattaaacggagcagctgtgtgagggcagctaactttgaatgcctgtctccctggctggtgtgtctccttctcatgttgagagcaccagggattgcgtggctgcatgctgaaaccgcattttcccatggtgtatgactagttcatctctttcttgagcaccattacaagaagatcaaatgaaaatgagatcaatgtggaagacaattcatagcacaaaaaaagtcatcttaaatctactctcaaacattcatcttatacatgcatcaaagtaatttactgacatcagtttgggtgagagagggagtcactttactgaaaaggcagaggcttaaggtgtatacatttgtactcacttccttattttcttaacttgtaagcagaaaacaagccctctctcttgtgaagtatcttcaaaggattggggtgcaaaaataccttgctggtaagccatcaatgttttatttaaatccctgcattcaaagttagctgcctttttgaaataaacaaacaaaaaatactactgtatgtttgaaaatgtgaatagtatttttatagcttgttaaagacatggctagttgcatttgtaaataagtataatgttgctttgattttcttttgtggacatctttatttggaacataattgtctttagggttgatttgtatataagtaattggcctgtgattgtttcttttttggttggaagttatcattttgacattacttgtgattctgtgttcagcactattgtgatgtgttcaacctctgcactcgcttacacaataggatatgccaattgtgtgtggtgtaatgttattttgatttttttccatgttattgatgaaggatcatgcacctaacacatactaacttttttaatgttaggcatatttttagtatactttctcttattctttcttctcctccaaccttttacccatcctccttcctttccctcattcctgttgttatttgagaatgagggagaaacagtattttacatttatgtaattaggcttttccgttagttctcaaggatcctcttttggctcttgggaaagaattgtacctgtacaaggcaattatagaatgcgaactgctttgcctcattccatactgatcatcccagctgaacaatttgaaaactgttctgcctttttgttacatgaatctgtcagaaatatatttttaatttaatataaatgaaattcaataaaatatgaaacaaa

SEQ ID NO: 130477 - DNA, 569 bp, Homo sapiens
  Payload ID: 5522
  Gene Symbol: ERBB4
  Gene Name: erb-b2 receptor tyrosine kinase 4
  ENST ID: ENST00000435846
  CDS Start-End: 185-569
atttgttctcctggttccctctctgtgagatcttcttaatctgtgtctttcaagggaaggtcattgctgctctgaaggaagctgcattttgtgtgcaggaacggagaataaactgagctctctctctgacctggaacagcagtaccgagccttgcgcaagtactatgaaaactgtgaggttgtcatgggcaacctggagataaccagcattgagcacaaccgggacctctccttcctgcggtctgttcgagaagtcacaggctacgtgttagtggctcttaatcagtttcgttacctgcctctggagaatttacgcattattcgtgggacaaaactttatgaggatcgatatgccttggcaatatttttaaactacagaaaagatggaaactttggacttcaagaacttggattaaagaacttgacagaaatcctaaatggtggagtctatgtagaccagaacaaattcctttgttatgcagacaccattcattggcaagatattgttcggaacccatggccttccaacttgactcttgtgtcaacaaatggtagttcaggatgtggac

SEQ ID NO: 130478 - DNA, 868 bp, Homo sapiens; identical to SEQ ID NO: 129445
  Payload ID: 5523
  Gene Symbol:
  Gene Name: ERC1
  ENST ID: ENST00000635679
  CDS Start-End: 433-868

SEQ ID NO: 130479 - DNA, 4955 bp, Homo sapiens; identical to SEQ ID NO: 129436
  Payload ID: 5523
  Gene Symbol:
  Gene Name: ERC1
  ENST ID: ENST00000634346
  CDS Start-End: 407-3253

SEQ ID NO: 130480 - DNA, 2881 bp, Homo sapiens; identical to SEQ ID NO: 129443
  Payload ID: 5523
  Gene Symbol:
  Gene Name: ERC1
  ENST ID: ENST00000635459
  CDS Start-End: 207-2369

SEQ ID NO: 130481 - DNA, 1275 bp, Homo sapiens; identical to SEQ ID NO: 129449
  Payload ID: 5523
  Gene Symbol:
  Gene Name: ERC1
  ENST ID: ENST00000635535
  CDS Start-End: 244-1275

SEQ ID NO: 130482 - DNA, 2071 bp, Homo sapiens; identical to SEQ ID NO: 129448
  Payload ID: 5523
  Gene Symbol:
  Gene Name: ERC1
  ENST ID: ENST00000635646
  CDS Start-End: 1-857

SEQ ID NO: 130483 - DNA, 9202 bp, Homo sapiens; identical to SEQ ID NO: 129450
  Payload ID: 5523
  Gene Symbol:
  Gene Name: ERC1
  ENST ID: ENST00000635644
  CDS Start-End: 158-3508

SEQ ID NO: 130484 - DNA, 9241 bp, Homo sapiens; identical to SEQ ID NO: 129441
  Payload ID: 5523
  Gene Symbol:
  Gene Name: ERC1
  ENST ID: ENST00000635703
  CDS Start-End: 272-3538

SEQ ID NO: 130485 - DNA, 7040 bp, Homo sapiens; identical to SEQ ID NO: 129440
  Payload ID: 5523
  Gene Symbol:
  Gene Name: ERC1
  ENST ID: ENST00000635345
  CDS Start-End: 378-3356

SEQ ID NO: 130486 - DNA, 4390 bp, Homo sapiens; identical to SEQ ID NO: 129442
  Payload ID: 5523
  Gene Symbol:
  Gene Name: ERC1
  ENST ID: ENST00000634365
  CDS Start-End: 529-3891

SEQ ID NO: 130487 - DNA, 5789 bp, Homo sapiens; identical to SEQ ID NO: 129438
  Payload ID: 5523
  Gene Symbol:
  Gene Name: ERC1
  ENST ID: ENST00000635430
  CDS Start-End: 182-3532

SEQ ID NO: 130488 - DNA, 550 bp, Homo sapiens; identical to SEQ ID NO: 129447
  Payload ID: 5523
  Gene Symbol:
  Gene Name: ERC1
  ENST ID: ENST00000634786
  CDS Start-End: 1-269

SEQ ID NO: 130489 - DNA, 4323 bp, Homo sapiens; identical to SEQ ID NO: 129444
  Payload ID: 5523
  Gene Symbol:
  Gene Name: ERC1
  ENST ID: ENST00000634904
  CDS Start-End: 529-3459

SEQ ID NO: 130490 - DNA, 9118 bp, Homo sapiens; identical to SEQ ID NO: 129439
  Payload ID: 5523
  Gene Symbol:
  Gene Name: ERC1
  ENST ID: ENST00000634945
  CDS Start-End: 158-3424

SEQ ID NO: 130491 - DNA, 5796 bp, Homo sapiens; identical to SEQ ID NO: 129437
  Payload ID: 5523
  Gene Symbol:
  Gene Name: ERC1
  ENST ID: ENST00000635531
  CDS Start-End: 133-3393

SEQ ID NO: 130492 - DNA, 546 bp, Homo sapiens; identical to SEQ ID NO: 129446
  Payload ID: 5523
  Gene Symbol:
  Gene Name: ERC1
  ENST ID: ENST00000635607
  CDS Start-End: 278-546

SEQ ID NO: 130493 - DNA, 2832 bp, Homo sapiens; identical to SEQ ID NO: 129451
  Payload ID: 5523
  Gene Symbol:
  Gene Name: ERC1
  ENST ID: ENST00000635106
  CDS Start-End: 158-2320

SEQ ID NO: 130494 - DNA, 3411 bp, Homo sapiens
  Payload ID: 5524
  Gene Symbol: ERCC6-PGBD3
  Gene Name: ERCC6-PGBD3 readthrough
  ENST ID: ENST00000447839
  CDS Start-End: 94-3279
acggcccgtcgagctgggttccaaggcggctggcggcggtagcgtctctgtttccttgtgggcgctcgcgcggccctgggtagtctgtagagaatgccaaatgagggaatcccccactcaagtcaaactcaggagcaagactgtttacagagtcaacctgtcagtaataatgaagaaatggcaatcaagcaagaaagtggtggtgatggggaggtggaggagtacctctcctttcgttctgtgggtgacgggctgtccacctctgctgtggggtgcgcatcagcagctccgaggagagggccagccctgctgcacatcgaccgacatcagatccaggcagtagagcctagcgcccaggcccttgagctgcagggtttgggtgtggacgtctatgaccaggacgtgctggaacagggagtgcttcagcaggtggacaatgccatccatgaggccagccgtgcctcccagctcgttgacgtggagaaggagtatcggtcggtcctggatgacctcacgtcatgtacgacatccctaaggcaaatcaataaaattattgaacagcttagccctcaagctgccaccagcagagacatcaacaggaaactagattctgtaaaacgacagaagtataataaggaacaacagctaaaaaagatcactgcaaaacaaaagcatctccaggccatccttggaggagcagaggtgaaaattgaactagatcacgccagtctggaggaggatgcagagccggggccatccagtcttggcagcatgctcatgcctgtccaggagactgcctgggaagagctcatccgcactggccagatgacaccttttggtacccagatccctcagaaacaggagaaaaagcccagaaaaatcatgcttaatgaagcatcaggcttcgaaaagtatttggcagatcaagcaaaactgtcttttgaaaggaagaagcaaggttgtaataaaagagcagctagaaaagctccagccccagtcacgcctccagccccagtgcaaaataaaaacaaaccaaacaagaaagccagagttctgtccaaaaaagaggagcgtttgaaaaagcacatcaagaaactccagaagagggctttgcagttccaggggaaagtgggattgccaaaggcaaggagaccttgggagtcagacatgaggccagaggcagagggagactctgagggtgaagagtctgagtatttccccacagaggaggaggaagaggaggaagatgacgaggtggagggggcagaggcggacctgtctggagatggtactgactatgagctgaagcctctgcccaagggcgggaaacggcagaagaaagtgccagtgcaggagattgatgatgactttttcccaagttctggggaagaagctgaagctgcttctgtaggagaaggaggaggaggaggtcggaaagtgggaagataccgagatgatggagatgaagattattataagcagcggttaagtcccaagatgcctcgaacactaagtttacatgaaataactgaccttttagagacagatgacagcatagaagcaagtgctatagtgatacaaccacctgaaaatgctacagcacctgtttctgatgaggaatcaggagatgaagaaggtggaacaataaataatctgccaggttctttgttgcacacagctgcgtatcttattcaagatggctctgatgctgagtctgactcagatgatccctcatacgcacctaaagatgactctcctgatgaagttccatctacgtttactgtgcagcaacctccaccatcaaggaggaggaaaatgacaaaaattctttgcaaatggaaaaaagccgacctaactgtacaacccgtagcaggtagagttacagcaccaccaaacgatttcttcaccgtaatgagaactcccacagaaattcttgaactttttcttgatgacgaggtcattgaactcattgtcaagtactccaacttatatgcttgcagtaaaggtgtacatcttggcttgactagctctgaattcaaatgttttctgggaattatttttctgagtggttatgtctcagttcctagaaggcgtatgttttgggaacaaagaacagatgtgcataatgtactggttagtgctgccatgagacgtgaccggtttgaaactatattttctaatttgcatgttgctgacaatgcaaatttggatccagtggacaaattttccaaattgcgacctctcataagcaaacttaatgagagatgcatgaaatttgttccaaatgaaacatatttcagctttgatgaattcatggttccttattttggtcgtcacgggtgcaaacaatttattcggggaaagcccattcggtttggctataagttttggtgtggtgccacctgtctgggctacatttgctggtttcagccgtatcagggtaaaaacccaaatactaaacatgaggaatatggtgtcggtgcgtcacttgtccttcagtttagtgaggcacttacagaggcacaccctggacaataccattttgtattcaataactttttcaccagtattgcacttcttgataagctcagttcaatgggacatcaggcaacaggtacagtgagaaaggatcacattgacagagttccactggaatcagatgtagctttaaagaaaaaagaaagaggcacatttgattatcgaattgatggcaaaggcaatattgtctgcagatggaatgataacagtgttgtcactgttgcctcatctggtgctggtatccatcccctgtgtcttgtcagtcgttactcccagaaactgaaaaagaagatacaagttcagcagccaaacatgatcaaagtgtataaccagttcatgggaggcgtagacagagctgatgaaaacattgataagtatcgggcatcaatccgtggaaagaaatggtattcaagccctcttttgttctgtttcgaactggtcttacaaaatgcttggcaattgcataaaacatatgatgagaaaccagtggattttctggagtttcgtcgacgtgtggtatgccattatctggagacccatggtcatcctccagaacctggccaaaaaggaagacctcagaagcgtaacattgactcacgttatgatggcataaatcatgtgatagtcaaacagggaaagcaaacgcgatgcgctgaatgtcataagaacacaacttttcgatgtgaaaaatgtgatgttgccttacatgtgaagtgttccgttgaatatcacactgaatagcaggtgtcaccacctcctgagataagaaacatagttttatacattatgtacagtgtagcagtggttttgcctagtgttccaattttggaacgtcacataacaatggaacataataaatttttttttctcttc

SEQ ID NO: 130495 - DNA, 3439 bp, Homo sapiens
  Payload ID: 5524
  Gene Symbol: ERCC6-PGBD3
  Gene Name: ERCC6-PGBD3 readthrough
  ENST ID: ENST00000515869
  CDS Start-End: 122-3307
aggtgcgcgcgtggcggagggggaacagagaagcaggacagctctccatccttcccgtgttcagtcgtgggagacaacaagagaggtcacagcctggcgaccaaaaagtagtctgtagagaatgccaaatgagggaatcccccactcaagtcaaactcaggagcaagactgtttacagagtcaacctgtcagtaataatgaagaaatggcaatcaagcaagaaagtggtggtgatggggaggtggaggagtacctctcctttcgttctgtgggtgacgggctgtccacctctgctgtggggtgcgcatcagcagctccgaggagagggccagccctgctgcacatcgaccgacatcagatccaggcagtagagcctagcgcccaggcccttgagctgcagggtttgggtgtggacgtctatgaccaggacgtgctggaacagggagtgcttcagcaggtggacaatgccatccatgaggccagccgtgcctcccagctcgttgacgtggagaaggagtatcggtcggtcctggatgacctcacgtcatgtacgacatccctaaggcaaatcaataaaattattgaacagcttagccctcaagctgccaccagcagagacatcaacaggaaactagattctgtaaaacgacagaagtataataaggaacaacagctaaaaaagatcactgcaaaacaaaagcatctccaggccatccttggaggagcagaggtgaaaattgaactagatcacgccagtctggaggaggatgcagagccggggccatccagtcttggcagcatgctcatgcctgtccaggagactgcctgggaagagctcatccgcactggccagatgacaccttttggtacccagatccctcagaaacaggagaaaaagcccagaaaaatcatgcttaatgaagcatcaggcttcgaaaagtatttggcagatcaagcaaaactgtcttttgaaaggaagaagcaaggttgtaataaaagagcagctagaaaagctccagccccagtcacgcctccagccccagtgcaaaataaaaacaaaccaaacaagaaagccagagttctgtccaaaaaagaggagcgtttgaaaaagcacatcaagaaactccagaagagggctttgcagttccaggggaaagtgggattgccaaaggcaaggagaccttgggagtcagacatgaggccagaggcagagggagactctgagggtgaagagtctgagtatttccccacagaggaggaggaagaggaggaagatgacgaggtggagggggcagaggcggacctgtctggagatggtactgactatgagctgaagcctctgcccaagggcgggaaacggcagaagaaagtgccagtgcaggagattgatgatgactttttcccaagttctggggaagaagctgaagctgcttctgtaggagaaggaggaggaggaggtcggaaagtgggaagataccgagatgatggagatgaagattattataagcagcggttaagtcccaagatgcctcgaacactaagtttacatgaaataactgaccttttagagacagatgacagcatagaagcaagtgctatagtgatacaaccacctgaaaatgctacagcacctgtttctgatgaggaatcaggagatgaagaaggtggaacaataaataatctgccaggttctttgttgcacacagctgcgtatcttattcaagatggctctgatgctgagtctgactcagatgatccctcatacgcacctaaagatgactctcctgatgaagttccatctacgtttactgtgcagcaacctccaccatcaaggaggaggaaaatgacaaaaattctttgcaaatggaaaaaagccgacctaactgtacaacccgtagcaggtagagttacagcaccaccaaacgatttcttcaccgtaatgagaactcccacagaaattcttgaactttttcttgatgacgaggtcattgaactcattgtcaagtactccaacttatatgcttgcagtaaaggtgtacatcttggcttgactagctctgaattcaaatgttttctgggaattatttttctgagtggttatgtctcagttcctagaaggcgtatgttttgggaacaaagaacagatgtgcataatgtactggttagtgctgccatgagacgtgaccggtttgaaactatattttctaatttgcatgttgctgacaatgcaaatttggatccagtggacaaattttccaaattgcgacctctcataagcaaacttaatgagagatgcatgaaatttgttccaaatgaaacatatttcagctttgatgaattcatggttccttattttggtcgtcacgggtgcaaacaatttattcggggaaagcccattcggtttggctataagttttggtgtggtgccacctgtctgggctacatttgctggtttcagccgtatcagggtaaaaacccaaatactaaacatgaggaatatggtgtcggtgcgtcacttgtccttcagtttagtgaggcacttacagaggcacaccctggacaataccattttgtattcaataactttttcaccagtattgcacttcttgataagctcagttcaatgggacatcaggcaacaggtacagtgagaaaggatcacattgacagagttccactggaatcagatgtagctttaaagaaaaaagaaagaggcacatttgattatcgaattgatggcaaaggcaatattgtctgcagatggaatgataacagtgttgtcactgttgcctcatctggtgctggtatccatcccctgtgtcttgtcagtcgttactcccagaaactgaaaaagaagatacaagttcagcagccaaacatgatcaaagtgtataaccagttcatgggaggcgtagacagagctgatgaaaacattgataagtatcgggcatcaatccgtggaaagaaatggtattcaagccctcttttgttctgtttcgaactggtcttacaaaatgcttggcaattgcataaaacatatgatgagaaaccagtggattttctggagtttcgtcgacgtgtggtatgccattatctggagacccatggtcatcctccagaacctggccaaaaaggaagacctcagaagcgtaacattgactcacgttatgatggcataaatcatgtgatagtcaaacagggaaagcaaacgcgatgcgctgaatgtcataagaacacaacttttcgatgtgaaaaatgtgatgttgccttacatgtgaagtgttccgttgaatatcacactgaatagcaggtgtcaccacctcctgagataagaaacatagttttatacattatgtacagtgtagcagtggttttgcctagtgttccaattttggaacgtcacataacaatggaacataataaatttttttttctcttc

SEQ ID NO: 130496 - DNA, 5014 bp, Homo sapiens
  Payload ID: 5525
  Gene Symbol: ERGIC2
  Gene Name: ERGIC and golgi 2
  Uniprot ID: Q96RQ1
  ENST ID: ENST00000360150
  CDS Start-End: 77-1210
tctgtgaaacatggcggtaggctgggaccataacacaagcatgactatatgaaggaagaggaaggttttcctgaagatgaggcgactgaatcggaaaaaaactttaagtttggtaaaagagttggatgcctttccgaaggttcctgagagctatgtagagacttcagccagtggaggtacagtttctctaatagcatttacaactatggctttattaaccataatggaattctcagtatatcaagatacatggatgaagtatgaatacgaagtagacaaggatttttctagcaaattaagaattaatatagatattactgttgccatgaagtgtcaatatgttggagcggatgtattggatttagcagaaacaatggttgcatctgcagatggtttagtttatgaaccaacagtatttgatctttcaccacagcagaaagagtggcagaggatgctgcagctgattcagagtaggctacaagaagagcattcacttcaagatgtgatatttaaaagtgcttttaaaagtacatcaacagctcttccaccaagagaagatgattcatcacagtctccaaatgcatgcagaattcatggccatctatatgtcaataaagtagcagggaattttcacataacagtgggcaaggcaattccacatcctcgtggtcatgcacatttggcagcacttgtcaaccatgaatcttacaatttttctcatagaatagatcatttgtcttttggagagcttgttccagcaattattaatcctttagatggaactgaaaaaattgctatagatcacaaccagatgttccaatattttattacagttgtgccaacaaaactacatacatataaaatatcagcagacacccatcagttttctgtgacagaaagggaacgtatcattaaccatgctgcaggcagccatggagtctctgggatatttatgaaatatgatctcagttctcttatggtgacagttactgaggagcacatgccattctggcagttttttgtaagactctgtggtattgttggaggaatcttttcaacaacaggcatgttacatggaattggaaaatttatagttgaaataatttgctgtcgtttcagacttggatcctataaacctgtcaattctgttccttttgaggatggccacacagacaaccacttacctcttttagaaaataatacacattaacacctcccgattgaaggagaaaaactttttgcctgagacataaaacctttttttaataataaaatattgtgcaatatattcaaagaaaagaaaacacaaataagcagaaaacatacttattttaaaaaagaaaaaaaaggataaaaaaacccaaactgaaattctatatacgttgtgtctgttacaaatgtcgtagaagaaatcatgcagctaaacgatgaagaagcccaactggagtgttgctttgaagatgacgccttcttatattttcatagcaaatgggtggtatcaaaatcagacattgcttcttgctgataaaaagcctgaaggaaataagtgaaactacatctatgggaaaaaaaaaaacattgagaagtgcaaatgttcgcatccttttgtttttaaaagatatgatgtcagaataaaatgtggaaaacatacggaaaactagtctagactttaaagaattgtgatcaggtcacattgttaataaaaaaaaaaaacgggctagtccctatgttatagccatattaatgttaagccatattgacaagaccagttatccaataatttggtcttaaaaagtaactacttttctttgaactctggttattgacttatctaactgttgaagatagagtcttagaagactaaggtaaattctcacaggggcagatatgtaggtgttatgtaactagggtgtcattcacaaatggtatagtagaatcttatacacggaaaagaaagcacatttttttaaaaaagatgccaagttttttaatctaatcattatattattggtgtattttgggcaacatagggtgagttataaaaagatccgctactgatagtgaaaattaccggtttgtaaaacattaagagaaaaaataggatattttatacatgtggtgagtggagaacagggtaactttaaatgaaagtgtaaggcaaattgtaagcaccacaagatatatcagatttgagaggtgccatgttaaacattgtccattaaactataaaactgtattatgaagtatttgcattcagggtgtcctgaatatgattgattctgtattagattgtgttctaactttcttactatttaaggattggttctaaatcttcacattataaaagattaaaaacagtgagagggagctatcacacaggtactattaaaagctgtatttggaatatgtgtaccaatatcagttttccttttgtagtactgaatggcagtagaagaatcagcagccaatcctcaaagtttaaatcatttaaggaaatggggaaacaaaattccaggtaaataacaagactgaaaaactagatttaaaatagtggttttagaaaacaggatatcacaagtaacagtttttcaaatggatttttttaaagataaatttatgaaaacaggataaacaatataatggagagaaggagaaatagtgatgggtctgttttgcagtaaagtttatgcagaatgacgttttgcagaaaataacagaagcatcactttaaaaaatatatcattaagagccatgacgttaactgatgaaaataagtgatataacatactttgaaagatttttaaacagaaaattctgaatcgtgaatgagccttctctaggttttaattttttttcttcaaattatttccaacaaagtttggctataaactaacaccatctatccacaggaattttaataggaaaggattagaattgtagactgattgttggtcctttaagtatgcttggaagaaaattcaatcgagtttcaaggctttttctaaatgggagggagaacaatattgatttaggattattttctttcatttaggattagaacagttaagtgcctttaaaaaggactttaaaaattattttgatacttatatatgatttttaattgttttcgtattttccaaataccatattaaaattttaatgaaatttatctcctatgaaaggaatttctttaaagcaaaattctgctttgcctttgatttccattttaaaagttaaaggcttccatctgaaactcctcaaatagagtcagatttttggcaatggaagtattaaaattccgatcagccctttggacgatgaagtttacctgcatattaggatttgttaggagtttttggcctcaccaagtgattcttttctattgcagagagcactttactcacctacctgttatgcaactttccctatgcctggaggtgcctccagccaggataccctactttgttacccaattctcctttttgttttacaagagtattcataatatctatatgtttatattccagactacatatttaaaaatgagatctcaaattatatgaaatggatttttaaatactgtgtttgcatacattgacctataaagaagattaaatatttaggtgaataattccctgctgcagtatttgtacacttcagactacctcttaggaaaagcttaacttagtattgcaaaattccctttctctttttttttttaagagatggggtctcgcactgttgcccaggctgaagtgcagtggcatgattgtaactcactgcatcctcgaactcctgggttcaagcaatcctcctgcttccatctgctgagtaggtaggactacagccatgcaccaacaaacctggctaattctttttcatttatatagttagtatcttgctgtgttgttcaagctggactccaactcccggactcaagtaatcctcccaccttagtctcctgcattgctggaattataggcacgagccactgcacctggcacccaaattacttctagttctcaagttagatgattaatatcacacttttctcatgtatgttttatgatagcattgaatttttataattaaaaatttactaatgcaaacaagatttacagtctttaatacaatcttaattttggaattcatgaaggaatgactaagttctaatttttttttttttttttttgaaactgagtctcgctctgtcgcctaggctggagtgcagtggtgcaatctcagctcactgcaacctccgtctcccgggttcaagtgattctcctgcctcagcctgttgagtagctgggactacaggtgcgtaccaccaagcccagctaatttttttatatttttagtagagacggggtttcactgtgttagccaggatggtctcaatctcctgacctcatgatccgcccaccttggcctcccaaagtgttgggattacaggcatgagccactgcccctggacagatctaattttttaatagtgtaagagagatacactgtgcattccatctatgtcctgagttagtaattcaagtaccaaaaagtaatttaatatgaaactccttgaaaattcagagcttacacttgaattcaaaatgcctatttttgattgtttaaaagttacttaaacctgagctttaggacctttaaaatctcagcatgccttttaagctagtacttttcctgttttgagctctagcaaaccttcagcaagccaaggtggtagccctttttcaacacaatcaaaatagagaggtcaccagttgtttactaccttatggtaaaatgcccggatcaagatccatgtatcccccccatattgtgatgatgcaatcaaagcatagtttttttctactttctgaaatattactgatgaaatcactttacatttaagaggagaaaacagactgccttggattttttttttgtcttgagagaaaaaacaaaatatttagtattgcaagcataaacatttggactcaataaatgacaaattatgaaa

SEQ ID NO: 130497 - DNA, 616 bp, Homo sapiens
  Payload ID: 5525
  Gene Symbol: ERGIC2
  Gene Name: ERGIC and golgi 2
  ENST ID: ENST00000550353
  CDS Start-End: 99-616
gggagccccggcgacccgggcttctgtgaaacatggcggtaggctgggaccataacacaagcatgactatatgaaggaagaggaaggttttcctgaagatgaggcgactgaatcggaaaaaaactttaagtttggtaaaagagttggatgcctttccgaaggttcctgagagctatgtagagacttcagccagtggaggtacagtatatcaagatacatggatgaagtatgaatacgaagtagacaaggatttttctagcaaattaagaattaatatagatattactgttgccatgaagtgtcaatatgttggagcggatgtattggatttagcagaaacaatggttgcatctgcagatggtttagtttatgaaccaacagtatttgatctttcaccacagcagaaagagtggcagaggatgctgcagctgattcagagtaggctacaagaagagcattcacttcaagatgtgatatttaaaagtgcttttaaaagtacatcaacagctcttccaccaagagaagatgattcatcacagtctccaaatgcatgcagaattcatggccatctatatgtcaataaagtagcagggaattttcacataacagtgggcaa

SEQ ID NO: 130498 - DNA, 308 bp, Homo sapiens
  Payload ID: 5525
  Gene Symbol: ERGIC2
  Gene Name: ERGIC and golgi 2
  ENST ID: ENST00000546509
  CDS Start-End: 1-172
ggcaattccacatcctcgtggtcatgcacatttggcagcacttgtcaaccatgaatcttacaatttttctcatagaatagatcatttgtcttttggagagcttgttccagcaattattaatcctttagatggaactgaaaaaattgctatagatcttttttttgtattctagacaaccagatgttccaatattttattacagttgtgccaacaaaactacatacatataaaatatcagcagacacccatcagttttctgtgacagaaagggaacgtatcattaaccatgctgcaggcagccatggagt

SEQ ID NO: 130499 - DNA, 565 bp, Homo sapiens
  Payload ID: 5525
  Gene Symbol: ERGIC2
  Gene Name: ERGIC and golgi 2
  ENST ID: ENST00000549182
  CDS Start-End: 1-150
gaacgtatcattaaccatgctgcaggcagccatggagtctctgggatatttatgaaatatgatctcagttctcttatggtgacagttactgaggagcacatgccattctggcagttttttgcatgttacatggaattggaaaatttatagttgaaataatttgctgtcgtttcagacttggatcctataaacctgtcaattctgttccttttgaggatggccacacagacaaccacttacctcttttagaaaataatacacattaacacctcccgattgaaggagaaaaactttttgcctgagacataaaacctttttttaataataaaatattgtgcaatatattcaaagaaaagaaaacacaaataagcagaaaacatacttattttaaaaaagaaaaaaaaggataaaaaaacccaaactgaaattctatatacgttgtgtctgttacaaatgtcgtagaagaaatcatgcagctaaacgatgaagaagcccaactggagtgttgctttgaagatgacgccttcttatattttcatagcaaatgggtggtatcaaaatcaga

SEQ ID NO: 130500 - DNA, 695 bp, Homo sapiens
  Payload ID: 5525
  Gene Symbol: ERGIC2
  Gene Name: ERGIC and golgi 2
  ENST ID: ENST00000552132
  CDS Start-End: 170-695
atttccgggtacgcgggagccccggcgacccgggcttctgtgaaacatggcggtaggctgggaccataacacaaggttattgtcataggataaattcctcaatgggcatttacttagaagaggagtggtgtgcatgactatatgaaggaagaggaaggttttcctgaagatgaggcgactgaatcggaaaaaaactttaagtttggtaaaagagttggatgcctttccgaaggttcctgagagctatgtagagacttcagccagtggaggtacagtttctctaatagcatttacaactatggctttattaaccataatggaattctcagtatatcaagatacatggatgaagtatgaatacgaagtagacaaggatttttctagcaaattaagaattaatatagatattactgttgccatgaagtgtcaatatgttggagcggatgtattggatttagcagaaacaatggttgcatctgcagatggtttagtttatgaaccaacagtatttgatctttcaccacagcagaaagagtggcagaggatgctgcagctgattcagagtaggctacaagaagagcattcacttcaagatgtgatatttaaaagtgcttttaaaagtacatcaacagctcttccaccaagagaagatgattcatcacagtctccaaatgcatgcagaattcatggccatc

SEQ ID NO: 130501 - DNA, 432 bp, Homo sapiens
  Payload ID: 5525
  Gene Symbol: ERGIC2
  Gene Name: ERGIC and golgi 2
  ENST ID: ENST00000548441
  CDS Start-End: 218-432
gtacgcgggagccccggcgacccgggcttctgtgaaacatggcggtaggctgggaccataacacaagagtttcaggccaggtgtggtggttcacatctataatcccagcactttttttgagaggccgaggtgggtggaaggcttcagcccaggagtttgagacccagcctgggcaacaagcatgactatatgaaggaagaggaaggttttcctgaagatgaggcgactgaatcggaaaaaaactttaagtttggtaaaagagttggatgcctttccgaaggttcctgagagctatgtagagacttcagccagtggaggtacagtttctctaatagcatttacaactatggctttattaaccataatggaattctcagtatatcaagatacatggatgaagtatgaatacgaagtagacaaggatttttctag

SEQ ID NO: 130502 - DNA, 765 bp, Homo sapiens
  Payload ID: 5525
  Gene Symbol: ERGIC2
  Gene Name: ERGIC and golgi 2
  ENST ID: ENST00000551467
  CDS Start-End: 1-629
tatttaaaagtgcttttaaaagtacatcaacagctcttccaccaagagaagatgattcatcacagtctccaaatgcatgcagaattcatggccatctatatgtcaataaagtagcagggaattttcacataacagtgggcaaaatagatcatttgtcttttggagagcttgttccagcaattattaatcctttagatggaactgaaaaaattgctatagatcacaaccagatgttccaatattttattacagttgtgccaacaaaactacatacatataaaatatcagcagacacccatcagttttctgtgacagaaagggaacgtatcattaaccatgctgcaggcagccatggagtctctgggatatttatgaaatatgatctcagttctcttatggtgacagttactgaggagcacatgccattctggcagttttttgtaagactctgtggtattgttggaggaatcttttcaacaacaggcatgttacatggaattggaaaatttatagttgaaataatttgctgtcgtttcagacttggatcctataaacctgtcaattctgttccttttgaggatggccacacagacaaccacttacctcttttagaaaataatacacattaacacctcccgattgaaggagaaaaactttttgcctgagacataaaacctttttttaataataaaatattgtgcaatatattcaaagaaaagaaaacacaaataagcagaaaacatacttattttaaaaaagaaaaaa

SEQ ID NO: 130503 - DNA, 645 bp, Homo sapiens
  Payload ID: 5525
  Gene Symbol: ERGIC2
  Gene Name: ERGIC and golgi 2
  ENST ID: ENST00000548909
  CDS Start-End: 1-490
ggcaattccacatcctcgtggtcatgcacatttggcagcacttgtcaaccatgaatcttacaatttttctcatagaatagatcatttgtcttttggagagcttgttccagcaattattaatcctttagatggaactgaaaaaattgctatagatcacaaccagatgttccaatattttattacagttgtgccaacaaaactacatacatataaaatatcagcagacacccatcagttttctgtgacagaaagggaacgtatcattaaccatgctgcaggcagccatggagtctctgggatatttatgaaatatgatctcagttctcttatggtgacagttactgaggagcacatgccattctggcagttttttgtaagactctgtggtattgttggaggaatcttttcaacaacagacttggatcctataaacctgtcaattctgttccttttgaggatggccacacagacaaccacttacctcttttagaaaataatacacattaacacctcccgattgaaggagaaaaactttttgcctgagacataaaacctttttttaataataaaatattgtgcaatatattcaaagaaaagaaaacacaaataagcagaaaacatacttattttaaaaaagaaaaaaaa

SEQ ID NO: 130504 - DNA, 693 bp, Homo sapiens
  Payload ID: 5525
  Gene Symbol: ERGIC2
  Gene Name: ERGIC and golgi 2
  ENST ID: ENST00000552155
  CDS Start-End: 85-693
cccgggcttctgtgaaacatggcggtaggctgggaccataacacaagcatgactatatgaaggaagaggaaggttttcctgaagatgaggcgactgaatcggaaaaaaactttaagtttggtaaaagagttggatgcctttccgaaggttcctgagagctatgtagagacttcagccagtggaggtacagtttctctaatagcatttacaactatggctttattaaccataatggaattctcagtatatcaagatacatggatgaagtatgaatacgaagtagacaaggatttttctagcaaattaagaattaatatagatattactgttgccatgaagtgtcaatatgttggagcggatgtattggatttagcagaaacaatggttgcatctgcagatggtttagtttatgaaccaacagtatttgatctttcaccacagcagaaagagtggcagaggatgctgcagctgattcagagtaggctacaagaagagcattcacttcaagatgtgatatttaaaagtgcttttaaaagtacatcaacagctcttccaccaagggcaattccacatcctcgtggtcatgcacatttggcagcacttgtcaaccatgaatcttacaatttttctcatagaatagatcatttgtcttttggagagcttgttccagcaattattaatcctttagatgga

SEQ ID NO: 130505 - DNA, 1274 bp, Homo sapiens
  Payload ID: 5525
  Gene Symbol: ERGIC2
  Gene Name: ERGIC and golgi 2
  ENST ID: ENST00000546839
  CDS Start-End: 614-1274
gtgaaacatggcggtaggctgggaccataacacaaggtaaaatactgaaacaccgctgggtgctgttccctcggttgttccagggctgtttagggcgtaaatgcaattgagggaactgggagcctgtcatgggcttggcttcctgtcttcattgatctctagagagccggtcggacggagaagccgctccacctcccacgggggcgttactggcaggaccctaggcaacgatgctactgggagcttccctttgccaggtccgggtgcttgtgtgctatcctgcaactcgaaggagttcaggtgcttcctcgatcgcacctgattctgaccctttgcttgtcacagtgcccggttcccaggtggtttctccagtccgcaggcgagtaggatcccaatcggtcgagtcccagtcctcccggatgtcagactccctacccccattcagacaaatgccacattcgtggcagcacgttgccctctgtctctttaagagtcttggccttgcccggaaggagtttcgcacagtgcttcggaaaatgagaagggggcgggggagggcgagatgctgagagacagcatgactatatgaaggaagaggaaggttttcctgaagatgaggcgactgaatcggaaaaaaactttaagtttggtaaaagagttggatgcctttccgaaggttcctgagagctatgtagagacttcagccagtggaggtacagtttctctaatagcatttacaactatggctttattaaccataatggaattctcagtatatcaagatacatggatgaagtatgaatacgaagtagacaaggatttttctagcaaattaagaattaatatagatattactgttgccatgaagtgtcaatatgttggagcggatgtattggatttagcagaaacaatggttgcatctgcagatggtttagtttatgaaccaacagtatttgatctttcaccacagcagaaagagtggcagaggatgctgcagctgattcagagtaggctacaagaagagcattcacttcaagatgtgatatttaaaagtgcttttaaaagtacatcaacagctcttccaccaagagaagatgattcatcacagtctccaaatgcatgcagaattcatggccatctatatgtcaataaagtagcagggaattttcacataacagtgggcaaggcaattccacatcctcgtggtcatgcacatttggcagcacttgtcaaccatgaatcttacaatttttctcatagaatagatcatttgt

SEQ ID NO: 130506 - DNA, 4961 bp, Homo sapiens
  Payload ID: 5525
  Gene Symbol: ERGIC2
  Gene Name: ERGIC and golgi 2
  ENST ID: ENST00000611644
  CDS Start-End: 1-1161
atgaaggaagaggaaggttttcctgaagatgaggcgactgaatcggaaaaaactttaagtttggtaaaagagttggatgcctttccgaaggttcctgagagctatgtagagacttcagccagtggaggtacagtttctctaatagcatttacaactatggctttattaaccataatggaattctcagtatatcaagatacatggatgaagtatgaatacgaagtagacaaggatttttctagcaaattaagaattaatatagatattactgttgccatgaagtgtcaatatgttggagcggatgtattggatttagcagaaacaatggttgcatctgcagatggtttagtttatgaaccaacagtatttgatctttcaccacagcagaaagagtggcagaggatgctgcagctgattcagagtaggctacaagaagagcattcacttcaagatgtgatatttaaaagtgcttttaaaagtacatcaacagctcttccaccaagagaagatgattcatcacagtctccaaatgcatgcagaattcatggccatctatatgtcaataaagtagcagggaattttcacataacagtgggcaaggcaattccacatcctcgtggtcatgcacatttggcagcacttgtcaaccatgaatcttacaatttttctcatagaatagatcatttgtcttttggagagcttgttccagcaattattaatcctttagatggaactgaaaaaattgctatagatcacaaccagatgttccaatattttattacagttgtgccaacaaaactacatacatataaaatatcagcagacacccatcagttttctgtgacagaaagggaacgtatcattaaccatgctgcaggcagccatggagtctctgggatatttatgaaatatgatctcagttctcttatggtgacagttactgaggagcacatgccattctggcagttttttgtaagactctgtggtattgttggaggaatcttttcaacaacaggcatgttacatggaattggaaaatttatagttgaaataatttgctgtcgtttcagacttggatcctataaacctgtcaattctgttccttttgaggatggccacacagacaaccacttacctcttttagaaaataatacacattaacacctcccgattgaaggagaaaaactttttgcctgagacataaaacctttttttaataataaaatattgtgcaatatattcaaagaaaagaaaacacaaataagcagaaaacatacttattttaaaaaagaaaaaaaaggataaaaaaacccaaactgaaattctatatacgttgtgtctgttacaaatgtcgtagaagaaatcatgcagctaaacgatgaagaagcccaactggagtgttgctttgaagatgacgccttcttatattttcatagcaaatgggtggtatcaaaatcagacattgcttcttgctgataaaaagcctgaaggaaataagtgaaactacatctatgggaaaaaaaaaaacattgagaagtgcaaatgttcgcatccttttgtttttaaaagatatgatgtcagaataaaatgtggaaaacatacggaaaactagtctagactttaaagaattgtgatcaggtcacattgttaataaaaaaaaaaaacgggctagtccctatgttatagccatattaatgttaagccatattgacaagaccagttatccaataatttggtcttaaaaagtaactacttttctttgaactctggttattgacttatctaactgttgaagatagagtcttagaagactaaggtaaattctcacaggggcagatatgtaggtgttatgtaactagggtgtcattcacaaatggtatagtagaatcttatacacggaaaagaaagcacatttttttaaaaaagatgccaagttttttaatctaatcattatattattggtgtattttgggcaacatagggtgagttataaaaagatccgctactgatagtgaaaattaccggtttgtaaaacattaagagaaaaaataggatattttatacatgtggtgagtggagaacagggtaactttaaatgaaagtgtaaggcaaattgtaagcaccacaagatatatcagatttgagaggtgccatgttaaacattgtccattaaactataaaactgtattatgaagtatttgcattcagggtgtcctgaatatgattgattctgtattagattgtgttctaactttcttactatttaaggattggttctaaatcttcacattataaaagattaaaaacagtgagagggagctatcacacaggtactattaaaagctgtatttggaatatgtgtaccaatatcagttttccttttgtagtactgaatggcagtagaagaatcagcagccaatcctcaaagtttaaatcatttaaggaaatggggaaacaaaattccaggtaaataacaagactgaaaaactagatttaaaatagtggttttagaaaacaggatatcacaagtaacagtttttcaaatggatttttttaaagataaatttatgaaaacaggataaacaatataatggagagaaggagaaatagtgatgggtctgttttgcagtaaagtttatgcagaatgacgttttgcagaaaataacagaagcatcactttaaaaaatatatcattaagagccatgacgttaactgatgaaaataagtgatataacatactttgaaagatttttaaacagaaaattctgaatcgtgaatgagccttctctaggttttaattttttttcttcaaattatttccaacaaagtttggctataaactaacaccatctatccacaggaattttaataggaaaggattagaattgtagactgattgttggtcctttaagtatgcttggaagaaaattcaatcgagtttcaaggctttttctaaatgggagggagaacaatattgatttaggattattttctttcatttaggattagaacagttaagtgcctttaaaaaggactttaaaaattattttgatacttatatatgatttttaattgttttcgtattttccaaataccatattaaaattttaatgaaatttatctcctatgaaaggaatttctttaaagcaaaattctgctttgcctttgatttccattttaaaagttaaaggcttccatctgaaactcctcaaatagagtcagatttttggcaatggaagtattaaaattccgatcagccctttggacgatgaagtttacctgcatattaggatttgttaggagtttttggcctcaccaagtgattcttttctattgcagagagcactttactcacctacctgttatgcaactttccctatgcctggaggtgcctccagccaggataccctactttgttacccaattctcctttttgttttacaagagtattcataatatctatatgtttatattccagactacatatttaaaaatgagatctcaaattatatgaaatggatttttaaatactgtgtttgcatacattgacctataaagaagattaaatatttaggtgaataattccctgctgcagtatttgtacacttcagactacctcttaggaaaagcttaacttagtattgcaaaattccctttctctttttttttttaagagatggggtctcgcactgttgcccaggctgaagtgcagtggcatgattgtaactcactgcatcctcgaactcctgggttcaagcaatcctcctgcttccatctgctgagtaggtaggactacagccatgcaccaacaaacctggctaattctttttcatttatatagttagtatcttgctgtgttgttcaagctggactccaactcccggactcaagtaatcctcccaccttagtctcctgcattgctggaattataggcacgagccactgcacctggcacccaaattacttctagttctcaagttagatgattaatatcacacttttctcatgtatgttttatgatagcattgaatttttataattaaaaatttactaatgcaaacaagatttacagtctttaatacaatcttaattttggaattcatgaaggaatgactaagttctaatttttttttttttttttttgaaactgagtctcgctctgtcgcctaggctggagtgcagtggtgcaatctcagctcactgcaacctccgtctcccgggttcaagtgattctcctgcctcagcctgttgagtagctgggactacaggtgcgtaccaccaagcccagctaatttttttatatttttagtagagacggggtttcactgtgttagccaggatggtctcaatctcctgacctcatgatccgcccaccttggcctcccaaagtgttgggattacaggcatgagccactgcccctggacagatctaattttttaatagtgtaagagagatacactgtgcattccatctatgtcctgagttagtaattcaagtaccaaaaagtaatttaatatgaaactccttgaaaattcagagcttacacttgaattcaaaatgcctatttttgattgtttaaaagttacttaaacctgagctttaggacctttaaaatctcagcatgccttttaagctagtacttttcctgttttgagctctagcaaaccttcagcaagccaaggtggtagccctttttcaacacaatcaaaatagagaggtcaccagttgtttactaccttatggtaaaatgcccggatcaagatccatgtatcccccccatattgtgatgatgcaatcaaagcatagtttttttctactttctgaaatattactgatgaaatcactttacatttaagaggagaaaacagactgccttggattttttttttgtcttgagagaaaaaacaaaatatttagtattgcaagcataaacatttggactcaataaatgacaaattat

SEQ ID NO: 130507 - DNA, 1359 bp, Homo sapiens
  Payload ID: 5526
  Gene Symbol: ERGIC3
  Gene Name: ERGIC and golgi 3
  Uniprot ID: Q9Y282
  ENST ID: ENST00000348547
  CDS Start-End: 78-1229
aggggggcgtggctccaggccggaagagggagtctgtaggggcgggccggctggcgtcccctttccggccggtccccatggaggcgctggggaagctgaagcagttcgatgcctaccccaagactttggaggacttccgggtcaagacctgcgggggcgccaccgtgaccattgtcagtggccttctcatgctgctactgttcctgtccgagctgcagtattacctcaccacggaggtgcatcctgagctctacgtggacaagtcgcggggagataaactgaagatcaacatcgatgtactttttccgcacatgccttgtgcctatctgagtattgatgccatggatgtggccggagaacagcagctggatgtggaacacaacctgttcaagcaacgactagataaagatggcatccccgtgagctcagaggctgagcggcatgagcttgggaaagtcgaggtgacggtgtttgaccctgactccctggaccctgatcgctgtgagagctgctatggtgctgaggcagaagatatcaagtgctgtaacacctgtgaagatgtgcgggaggcatatcgccgtagaggctgggccttcaagaacccagatactattgagcagtgccggcgagagggcttcagccagaagatgcaggagcagaagaatgaaggctgccaggtgtatggcttcttggaagtcaataaggtggccggaaacttccactttgcccctgggaagagcttccagcagtcccatgtgcacgtccatgacttgcagagctttggccttgacaacatcaacatgacccactacatccagcacctgtcatttggggaggactatccaggcattgtgaaccccctggaccacaccaatgtcactgcgccccaagcctccatgatgttccagtactttgtgaaggtggtgcccactgtgtacatgaaggtggacggagaggtactgaggacaaatcagttctctgtgaccagacatgagaaggttgccaatgggctgttgggcgaccaaggccttcccggagtcttcgtcctctatgagctctcgcccatgatggtgaagctgacggagaagcacaggtccttcacccacttcctgacaggtgtgtgcgccatcattgggggcatgttcacagtggctggactcatcgattcgctcatctaccactcagcacgagccatccagaagaaaattgatctagggaagacaacgtagtcaccctcggtgcttcctctgtctcctctttctccctggcctgtggttgtcccccagcctctgccaccctccacctcctcggtcagccccagccccaggttgataaatctattgattgattgtgatagta

SEQ ID NO: 130508 - DNA, 1357 bp, Homo sapiens
  Payload ID: 5526
  Gene Symbol: ERGIC3
  Gene Name: ERGIC and golgi 3
  Uniprot ID: Q9Y282
  ENST ID: ENST00000357394
  CDS Start-End: 61-1227
ggccggaagagggagtctgtaggggcgggccggctggcgtcccctttccggccggtccccatggaggcgctggggaagctgaagcagttcgatgcctaccccaagactttggaggacttccgggtcaagacctgcgggggcgccaccgtgaccattgtcagtggccttctcatgctgctactgttcctgtccgagctgcagtattacctcaccacggaggtgcatcctgagctctacgtggacaagtcgcggggagataaactgaagatcaacatcgatgtactttttccgcacatgccttgtgcctatctgagtattgatgccatggatgtggccggagaacagcagctggatgtggaacacaacctgttcaagcaacgactagataaagatggcatccccgtgagctcagaggctgagcggcatgagcttgggaaagtcgaggtgacggtgtttgaccctgactccctggaccctgatcgctgtgagagctgctatggtgctgaggcagaagatatcaagtgctgtaacacctgtgaagatgtgcgggaggcatatcgccgtagaggctgggccttcaagaacccagatactattgagcagtgccggcgagagggcttcagccagaagatgcaggagcagaagaatgaaggctgccaggtgtatggcttcttggaagtcaataaggtggccggaaacttccactttgcccctgggaagagcttccagcagtcccatgtgcacgtacatgctgtggagatccatgacttgcagagctttggccttgacaacatcaacatgacccactacatccagcacctgtcatttggggaggactatccaggcattgtgaaccccctggaccacaccaatgtcactgcgccccaagcctccatgatgttccagtactttgtgaaggtggtgcccactgtgtacatgaaggtggacggagaggtactgaggacaaatcagttctctgtgaccagacatgagaaggttgccaatgggctgttgggcgaccaaggccttcccggagtcttcgtcctctatgagctctcgcccatgatggtgaagctgacggagaagcacaggtccttcacccacttcctgacaggtgtgtgcgccatcattgggggcatgttcacagtggctggactcatcgattcgctcatctaccactcagcacgagccatccagaagaaaattgatctagggaagacaacgtagtcaccctcggtgcttcctctgtctcctctttctccctggcctgtggttgtcccccagcctctgccaccctccacctcctcggtcagccccagccccaggttgataaatctattgattgattgtgatagta

SEQ ID NO: 130509 - DNA, 590 bp, Homo sapiens
  Payload ID: 5526
  Gene Symbol: ERGIC3
  Gene Name: ERGIC and golgi 3
  ENST ID: ENST00000438317
  CDS Start-End: 20-391
ccctttccggccggtccccatggaggcgctggggaagctgaagcagttcgatgcctaccccaagactttggaggacttccgggtcaagacctgcgggggcgccaccgtgaccattgtcagtggccttctcatgctgctactgttcctgtccgagctgcagtattacctcaccacggaggtgcatcctgagctctacgtggacaagtcgcggggagataaactgaagatcaacatcgatgtactttttccgcacatgccttgtgcctatctgagtattgatgccatggatgtggccggagaacagcagctggatgtggaacacaacctgttcaagcaacgactagataaagatggcatccccgtgagctcagaggctgagcggcatgattaatgcaggacaccagtggaaccaacataatttgctataggactggatgtggagtggaggagagcaaagtcatggttgttgattccaacgctttcagcctgagcaaatgaatgacttgagatggagatgactggaggagaagagcttgggaaagtcgaggtgacggtgtttgaccctgactccctggaccctgatcgctgtg

SEQ ID NO: 130510 - DNA, 1235 bp, Homo sapiens
  Payload ID: 5526
  Gene Symbol: ERGIC3
  Gene Name: ERGIC and golgi 3
  ENST ID: ENST00000416206
  CDS Start-End: 1-1193
aggcgctggggaagctgaagcagttcgatgcctaccccaagactttggaggacttccgggtcaagacctgcgggggcgccaccgtgaccattgtcagtggccttctcatgctgctactgttcctgtccgagctgcagtattacctcaccacggaggtgcatcctgagctctacgtggacaagtcgcggggagataaactgaagatcaacatcgatgtactttttccgcacatgccttgtgcctatctgagtattgatgccatggatgtggccggagaacagcagctggatgtggaacacaacctgttcaagcaacgactagataaagatggcatccccgtgagctcagaggctgagcggcatgagcttgggaaagtcgaggtgacggtgtttgaccctgactccctggaccctgatcgctgtgagagctgctatggtgctgaggcagaagatatcaagtgctgtaacacctgtgaagatgtgcgggaggcatatcgccgtagaggctgggccttcaagaacccagatactattgagcagtgccggcgagagggcttcagccagaagatgcaggagcagaagaatgaaggctgccaggtgtatggcttcttggaagtcaataaggtggccggaaacttccactttgcccctgggaagagcttccagcagtcccatgtgcacgggtgtgtgtgcaggttaaagatgatagcacggagcctggcttgtgtccatgacttgcagagctttggccttgacaacatcaacatgacccactacatccagcacctgtcatttggggaggactatccaggcattgtgaaccccctggaccacaccaatgtcactgcgccccaagcctccatgatgttccagtactttgtgaaggtggtgcccactgtgtacatgaaggtggacggagaggtactgaggacaaatcagttctctgtgaccagacatgagaaggttgccaatgggctgttgggcgaccaaggccttcccggagtcttcgtcctctatgagctctcgcccatgatggtgaagctgacggagaagcacaggtccttcacccacttcctgacaggtgtgtgcgccatcattgggggcatgttcacagtggctggactcatcgattcgctcatctaccactcagcacgagccatccagaagaaaattgatctagggaagacaacgtagtcaccctcggtgcttcctctgtctcctctttctccctggcct

SEQ ID NO: 130511 - DNA, 977 bp, Homo sapiens
  Payload ID: 5526
  Gene Symbol: ERGIC3
  Gene Name: ERGIC and golgi 3
  ENST ID: ENST00000413587
  CDS Start-End: 1-977
tgcctaccccaagactttggaggacttccgggtcaagacctgcgggggcgccaccgtgaccattgtcagtggccttctcatgctgctactgttcctgtccgagctgcagtattacctcaccacggaggtgcatcctgagctctacgtggacaagtcgcggggagataaactgaagatcaacatcgatgtactttttccgcacatgccttgtgcctggtcccagtaccttagcctgattttcctgcttccagatctgagtattgatgccatggatgtggccggagaacagcagctggatgtggaacacaacctgttcaagcaacgactagataaagatggcatccccgtgagctcagaggctgagcggcatgagcttgggaaagtcgaggtgacggtgtttgaccctgactccctggaccctgatcgctgtgagagctgctatggtgctgaggcagaagatatcaagtgctgtaacacctgtgaagatgtgcgggaggcatatcgccgtagaggctgggccttcaagaacccagatactattgagcagtgccggcgagagggcttcagccagaagatgcaggagcagaagaatgaaggctgccaggtgtatggcttcttggaagtcaataaggtggccggaaacttccactttgcccctgggaagagcttccagcagtcccatgtgcacgtccatgacttgcagagctttggccttgacaacatcaacatgacccactacatccagcacctgtcatttggggaggactatccaggcattgtgaaccccctggaccacaccaatgtcactgcgccccaagcctccatgatgttccagtactttgtgaaggtggtgcccactgtgtacatgaaggtggacggagaggtactgaggacaaatcagttctctgtgaccagacatgagaaggttgccaatgggctgttgggcgaccaaggccttcccggagtcttcgtcctct

SEQ ID NO: 130512 - DNA, 472 bp, Homo sapiens
  Payload ID: 5526
  Gene Symbol: ERGIC3
  Gene Name: ERGIC and golgi 3
  ENST ID: ENST00000442139
  CDS Start-End: 1-472
cccactacatccagcacctgtcatttggggaggactatccaggcattgtgaaccccctggaccacaccaatgtcactgcgccccaagcctccatgatgttccagtactttgtgaaggtggtgcccactgtgtacatgaaggtggacggagaggctcaacaggaaaggggaaggagcaggggtggggctgatggtggctggagccaggtcctagccctagccctggcccaggctcccctcccaccccaggtactgaggacaaatcagttctctgtgaccagacatgagaaggttgccaatgggctgttgggcgaccaaggccttcccggagtcttcgtcctctatgagctctcgcccatgatggtgaagctgacggagaagcacaggtccttcacccacttcctgacaggtgtgtgcgccatcattgggggcatgttcacagtggctggactcatcgattcgctcatctacca

SEQ ID NO: 130513 - DNA, 601 bp, Homo sapiens
  Payload ID: 5526
  Gene Symbol: ERGIC3
  Gene Name: ERGIC and golgi 3
  ENST ID: ENST00000411577
  CDS Start-End: 1-357
ctgaagcagttcgatgcctaccccaagactttggaggacttccgggtcaagacctgcgggggcgccaccgtgaccattgtcagtggccttctcatgctgctactgttcctgtccgagctgcagtattacctcaccacggaggtgcatcctgagctctacgtggacaagtcgcggggagataaactgaagatcaacatcgatgtactttttccgcacatgccttgtgcctatctgagtattgatgccatggatgtggccggagaacagcagctggatgtggaacacaacctgttcaagcaacgactagataaagatggcatccccgtgagctcagaggctgagcggcatgcagattaatgcaggacaccagtggaaccaacataatttgctataggactggatgtggagtggaggagagcaaagtcatggttgttgattccaacgctttcagcctgagcaaatgaatgacttgagatggagatgactggaggagaaggtttttttggtgggagggaggagtggctattggatatccactgctgtgtaacaaagtactccaaaagttagtagtttgatacaataaaaatgtgttttttcagtt

SEQ ID NO: 130514 - DNA, 520 bp, Homo sapiens
  Payload ID: 5526
  Gene Symbol: ERGIC3
  Gene Name: ERGIC and golgi 3
  ENST ID: ENST00000451605
  CDS Start-End: 1-391
ccccctggaccacaccaatgtcactgcgccccaagcctccatgatgttccagtactttgtgaaggtggtgcccactgtgtacatgaaggtggacggagaggctcccctcccaccccaggtactgaggacaaatcagttctctgtgaccagacatgagaaggttgccaatgggctgttgggcgaccaaggccttcccggagtcttcgtcctctatgagctctcgcccatgatggtgaagctgacggagaagcacaggtccttcacccacttcctgacaggtgtgtgcgccatcattgggggcatgttcacagtggctggactcatcgattcgctcatctaccactcagcacgagccatccagaagaaaattgatctagggaagacaacgtagtcaccctcggtgcttcctctgtctcctctttctccctggcctgtggttgtcccccagcctctgccaccctccacctcctcggtcagccccagccccaggttgataaatctattgattgattgtgatagt

SEQ ID NO: 130515 - DNA, 1479 bp, Homo sapiens
  Payload ID: 5527
  Gene Symbol: ERI2
  Gene Name: ERI1 exoribonuclease family member 2
  Uniprot ID: A8K979
  ENST ID: ENST00000300005
  CDS Start-End: 44-1030
cgacttccggcagctggacttggaaaagcaaggagtgtcgggaatggcgaccaagcggctcgcgcggcagcttggattaattaggagaaagtcaattgcgccagcaaatggaaatctcggaagaagcaaatccaagcagttgtttgactacttaattgtcattgattttgaatcgacatgctggaatgatgggaagcaccaccatagccaggaaataattgagtttccagcagtgttgctgaacacatcaactggacagattgactctgagttccaggcttatgttcaacctcaggaacatccaattctttcagaattttgcatggaattgacaggcataaagcaggctcaagttgatgaaggagtccctctgaagatttgcttatctcagttctgtaaatggattcataagattcagcaacagaagaacattatttttgctactgggatttcagagccttctgcttctgaagtaaaattatgtgcatttgttacttggtcagactgggacttgggggtttgcctggagtatgagtgtaaaagaaagcagctgttaaaacctgtgtttttaaattcttggattgatctcagagcaacttacaagcttttctataggagaaaaccaaaaggactaagtggtgccttgcaggaagtaggaatagaattctcaggacgagaacattctgggttggacgattctcggaatactgcccttcttgcttggaaaatgatcagagatggttgtgtaatgaaaattacaaggtcgttgaacaagggtcccttcctcttgccttcgtggacctggaacagtgatctggcctcaggggaccagcatgcttttcttcagcaagaatttggctgtggaacctacagaaccttacttcagaagcccaatatgagtaaacaggaaaaggggaatattctctggttgacaatggtgtggctgtcactggcatgtctgcaaaggaaaaactacaatgactgcatgttaaacacagcatcacagactgttaccactgaaaaattttgagaagctctccacttgaacctcttcatgtcatgaatcaggtgccagtggcttagcttgaattacagggtaaaagccatcactttctctatccttttaggtgctttctagaatcaaaactaaactttgtcatcaaaggcccatttataatagctgctttcctagctttttattctatgataaagaaggattgaagcatttttaaaacttgagatttttatcatacctccagcagagtaaggagtctgtgtgatcttgcaatcatggataaggaagaattttccccttccctcccctatggatgctttaaaatgtgattttttaaaaatgagtatgttaatacaatacatgttagtaaaagccatgggtactgatgggccaacacactacagcctactggcaaaatctgacttgcctcttgtttctgtaaataaaatgttattgcccattca

SEQ ID NO: 130516 - DNA, 3499 bp, Homo sapiens
  Payload ID: 5527
  Gene Symbol: ERI2
  Gene Name: ERI1 exoribonuclease family member 2
  Uniprot ID: A8K979
  ENST ID: ENST00000357967
  CDS Start-End: 44-2119
cgacttccggcagctggacttggaaaagcaaggagtgtcgggaatggcgaccaagcggctcgcgcggcagcttggattaattaggagaaagtcaattgcgccagcaaatggaaatctcggaagaagcaaatccaagcagttgtttgactacttaattgtcattgattttgaatcgacatgctggaatgatgggaagcaccaccatagccaggaaataattgagtttccagcagtgttgctgaacacatcaactggacagattgactctgagttccaggcttatgttcaacctcaggaacatccaattctttcagaattttgcatggaattgacaggcataaagcaggctcaagttgatgaaggagtccctctgaagatttgcttatctcagttctgtaaatggattcataagattcagcaacagaagaacattatttttgctactgggatttcagagccttctgcttctgaagtaaaattatgtgcatttgttacttggtcagactgggacttgggggtttgcctggagtatgagtgtaaaagaaagcagctgttaaaacctgtgtttttaaattcttggattgatctcagagcaacttacaagcttttctataggagaaaaccaaaaggactaagtggtgccttgcaggaagtaggaatagaattctcaggacgagaacattctgggttggacgattctcggaatactgcccttcttgcttggaaaatgatcagagatggttgtgtaatgaaaattacaaggtcgttgaacaaggttcccactaagaagaatttcagcattctggccagaaatttgaatacaattcaagttgaagaaatgtctgcctgtaacattagcatccagggtcccagcatatataataaggagcctaaaaatataataaatcctcatgaaaaagttcaaatgaagtcaatttgtgcaaattctcctataaaggcacaacaggatcaattacaagtaaaaaacaatataaaagcaagtcttcacaatgtcaaaagttccttacctctttttaatactaagtcctctacttctgtggggcagttgcagtctcctaccttgaattcacctatctatatgcaaaagcaaggaaaaaatgaacatcttgcatttaataccaaatctaaggcttcaacagttggttcagaattggtacttgtttctaccaccgttccaactgttcatcatgtttctgatttggaaatgagctctactctggactgtttacctgtgttggctgattgggaggatgtggttttactgccagcatctcagcctgaggaaaacgtagactgtacagttcccattagtgactcagacttagagatttcatttaattctggagaaagattaatggttttgaaagaattggaaatgtcaagtcatgaaaactttggagacatagaggaaactcctcaaaaatctgagacttctaagtctattgtgtacaagagtcctcacactactatttataatgtaaaagaagccaaagatccaggttcagatatttctgcctttaagttacctgaacacaaatcaagtaccttcaacagagttaatgccaatatgtctcatcctttagttttggggaaacatcctcttctttcaggtggtaccaaaaggaatccatgcagtccccaagctttcccaccagcaaaaaaacaacccttcactattcatgaagaaaagcctacatcatctgattgctccccagtaagaagttcttcctggaggcgtctcccatctatattaacttctacagttaacctacaagagccatggaagagtgggaaaatgacacctccattatgcaagtgtggtcggagatctaagagacttgttgtttctaataatggaccgaaccatggaaaagtcttctattgttgccctatcgggaaataccaagaaaacagaaaatgttgtggttatttcaaatgggaacaaacacttcaaaaggaaagagccaacagcatggttccatctcattccacagggggactcacttttagttctccagaaacaagccatatttgtgacagaaatttaagtatttccaccaaaaattctttgagactcaggccttcaatgaggaattgataacctttcatgtatgaatcctaattgttccttgaatttccaaacatgagtattctgataacatcttacactattttatttttattttatatattaatgtttactgcatttaccatactttcttcaggaaccacaagtgtaatcttttgtaaacagtatttattagattacatataataagcaacaatagtatatgatccttcttttatagttagaccttgaaacaagtctaaactatttttaaattatttgcaaaaaatgtgactaataaaaatccctagtctattttcaggtagattcttgtactttgagattatcataatcttctaactgatattttatatttttctaaaaacttttataagttctttagttttatttcaggcttgaacattggttctgatttgtatatcaacatatcagaagaattagtcaactaaagtttgaaaacctatgtagcagagatctggttcagaaactgcttctatactatacatttaaaaattaatcagcaattgatggtattatttttatattaagaaatgataggaacattgacactaatgtggaggaatttgccaaatattttatttcaaaatttagcctctgatatcataaccacaagatattttaaatcaacagtttctaagcatactaccacagtttttatgacctctccatcatcttgtggtttctagagattgacagatactatgtttgttttatagatatggtaattaatgaaacaactttaaattgtcttccattctttcttcctcagttcatttctttttgtcttcccactgatagtctttggcagctcttgaataaattctacctgttggcatcaaggggaagaaaattagcctggaaatttttatctttacataaagccaattatatagcagtttgattatgaattctaggtggaagaattagaatagtctttggaatgggttttgggtaacagccaaaatagggaaaagggtattgttaggaaagttgtcttgatattaagtatttactgtgagtccagtaagccaaaggaccaaacaaaataggttcagggtttcattttaatctcaaagattctgattcttacccatatgtcatcagttcagtttgggacatgtggtgcagcatgtgtgaagaaaatattcattaaaatgtaaaaataaacacttgaaattgtccacaacactgagcaaatattcgttataattaggatgcctacctttctgggatatttgtaaggtgctgtagtttttttaacatgctcctgaatctcctttattagttgttcttgatcatgtgacttgtaatcaggatttagaacgacaaaagcctttactacctaaaataaatatttgaaacaccagg

SEQ ID NO: 130517 - DNA, 2903 bp, Homo sapiens
  Payload ID: 5527
  Gene Symbol: ERI2
  Gene Name: ERI1 exoribonuclease family member 2
  Uniprot ID: A8K979
  ENST ID: ENST00000563117
  CDS Start-End: 757-2553
aacgggcgtctgcctggcaaagaaggaaggtgctgccgagcggcttcgccgcctaaaaccactccccacgccccctagcccgggaaacgcagaagagaagacgggcggggagcagaggttctcccctccttagccacagctgccaacaacaaccgcccctcagcctcgcgggctttttgaacggaccggaagtagaagtcgagcgacttccggcagctggacttggaaaagcaaggagtgtcgggaatggcgaccaagcggctcgcgcgaaagggtacactcgccagcagttttgccaggagagtacactgaacaaaggagacagggtcatttataacgtggcgcgtccaccctactgctgtgtccggtttcctttggctggaacgggacctcacattctgtatttgtcccgactgactagcaacatagaactttttaaaagaggcaaaggcagaggagaacaaaggaagaaggaagtaacttgtggaatgctgagaaaggcagcttggattaattaggagaaagtcaattgcgccagcaaatggaaatctcggaagaagcaaatccaagcagttgtttgactacttaattgtcattgattttgaatcgacatgctggaatgatgggaagcaccaccatagccaggaaataattgagtttccagcagtgttgctgaacacatcaactggacagattgactctgagttccaggcttatgttcaacctcaggaacatccaattctttcagaattttgcatggaattgacaggcataaagcaggctcaagttgatgaaggagtccctctgaagatttgcttatctcagttctgtaaatggattcataagattcagcaacagaagaacattatttttgctactgggatttcagagccttctgcttctgaagtaaaattatgtgcatttgttacttggtcagactgggacttgggggtttgcctggagtatgagtgtaaaagaaagcagctgttaaaacctgtgtttttaaattcttggattgatctcagagcaacttacaagcttttctataggagaaaaccaaaaggactaagtggtgccttgcaggaagtaggaatagaattctcaggacgagaacattctgggttggacgattctcggaatactgcccttcttgcttggaaaatgatcagagatggttgtgtaatgaaaattacaaggtcgttgaacaaggttcccactaagaagaatttcagcattctggccagaaatttgaatacaattcaagttgaagaaatgtctgcctgtaacattagcatccagggtcccagcatatataataaggagcctaaaaatataataaatcctcatgaaaaagttcaaatgaagtcaatttgtgcaaattctcctataaaggcacaacaggatcaattacaagtaaaaaacaatataaaagcaagtcttcacaatgtcaaaagttccttacctctttttaatactaagtcctctacttctgtggggcagttgcagtctcctaccttgaattcacctatctatatgcaaaagcaaggaaaaaatgaacatcttgcatttaataccaaatctaaggcttcaacagttggttcagaattggtacttgtttctaccaccgttccaactgttcatcatgtttctgatttggaaatgagctctactctggactgtttacctgtgttggctgattgggaggatgtggttttactgccagcatctcagcctgaggaaaacgtagactgtacagttcccattagtgactcagacttagagatttcatttaattctggagaaagattaatggttttgaaagaattggaaatgtcaagtcatgaaaactttggagacatagaggaaactcctcaaaaatctgagacttctaagtctattgtgtacaagagtcctcacactactatttataatgtaaaagaagccaaagatccaggttcagatatttctgcctttaagttacctgaacacaaatcaagtaccttcaacagagttaatgccaatatgtctcatcctttagttttggggaaacatcctcttctttcaggtggtaccaaaaggaatccatgcagtccccaagctttcccaccagcaaaaaaacaacccttcactattcatgaagaaaagcctacatcatctgattgctccccagtaagaagttcttcctggaggcgtctcccatctatattaacttctacagttaacctacaagagccatggaagagtgggaaaatgacacctccattatgcaagtgtggtcggagatctaagagacttgttgtttctaataatggaccgaaccatggaaaagtcttctattgttgccctatcgggaaataccaagaaaacagaaaatgttgtggttatttcaaatgggaacaaacacttcaaaaggaaagagccaacagcatggttccatctcattccacagggggactcacttttagttctccagaaacaagccatatttgtgacagaaatttaagtatttccaccaaaaattctttgagactcaggccttcaatgaggaattgataacctttcatgtatgaatcctaattgttccttgaatttccaaacatgagtattctgataacatcttacactattttatttttattttatatattaatgtttactgcatttaccatactttcttcaggaaccacaagtgtaatcttttgtaaacagtatttattagattacatataataagcaacaatagtatatgatccttcttttatagttagaccttgaaacaagtctaaactatttttaaattatttgcaaaaaatgtgactaataaaaatccctagtctattttcaggtagattcttgtactttgagattatcataatcttctaactgatattttatatttttct

SEQ ID NO: 130518 - DNA, 2579 bp, Homo sapiens
  Payload ID: 5527
  Gene Symbol: ERI2
  Gene Name: ERI1 exoribonuclease family member 2
  ENST ID: ENST00000568805
  CDS Start-End: 43-513
gacttccggcagctggacttggaaaagcaaggagtgtcgggaatggcgaccaagcggctcgcgcggcagcttggattaattaggagaaagtcaattgcgccagcaaatggaaatctcggaagaagcaaatccaagcagttgtttgactacttaattgtcattgattttgaatcgacatgctggaatgatgggaagcaccaccatagccaggaaataattgagtttccagcagtgttgctgaacacatcaactggacagattgactctgagttccaggcttatgttcaacctcaggaacatccaattctttcagaattttgcatggaattgacaggcataaagcaggctcaagttgatgaaggagtccctctgaagatttgcttatctcagttctgtaaatggattcataagattcagcaacagaagaacattatttttgctactgggatttcagagccttctgcttctgaagtaaaattatgtgcatttgttacttggtcagcttttctataggagaaaaccaaaaggactaagtggtgccttgcaggaagtaggaatagaattctcaggacgagaacattctgtgtttgatatctgtatcctcagggttggacgattctcggaatactgcccttcttgcttggaaaatgatcagagatggttgtgtaatgaaaattacaaggtcgttgaacaaggttcccactaagaagaatttcagcattctggccagaaatttgaatacaattcaagttgaagaaatgtctgcctgtaacattagcatccagggtcccagcatatataataaggagcctaaaaatataataaatcctcatgaaaaagttcaaatgaagtcaatttgtgcaaattctcctataaaggcacaacaggatcaattacaagtaaaaaacaatataaaagcaagtcttcacaatgtcaaaagttccttacctctttttaatactaagtcctctacttctgtggggcagttgcagtctcctaccttgaattcacctatctatatgcaaaagcaaggaaaaaatgaacatcttgcatttaataccaaatctaaggcttcaacagttggttcagaattggtacttgtttctaccaccgttccaactgttcatcatgtttctgatttggaaatgagctctactctggactgtttacctgtgttggctgattgggaggatgtggttttactgccagcatctcagcctgaggaaaacgtagactgtacagttcccattagtgactcagacttagagatttcatttaattctggagaaagattaatggttttgaaagaattggaaatgtcaagtcatgaaaactttggagacatagaggaaactcctcaaaaatctgagacttctaagtctattgtgtacaagagtcctcacactactatttataatgtaaaagaagccaaagatccaggttcagatatttctgcctttaagttacctgaacacaaatcaagtaccttcaacagagttaatgccaatatgtctcatcctttagttttggggaaacatcctcttctttcaggtggtaccaaaaggaatccatgcagtccccaagctttcccaccagcaaaaaaacaacccttcactattcatgaagaaaagcctacatcatctgattgctccccagtaagaagttcttcctggaggcgtctcccatctatattaacttctacagttaacctacaagagccatggaagagtgggaaaatgacacctccattatgcaagtgtggtcggagatctaagagacttgttgtttctaataatggaccgaaccatggaaaagtcttctattgttgccctatcgggaaataccaagaaaacagaaaatgttgtggttatttcaaatgggaacaaacacttcaaaaggaaagagccaacagcatggttccatctcattccacagggggactcacttttagttctccagaaacaagccatatttgtgacagaaatttaagtatttccaccaaaaattctttgagactcaggccttcaatgaggaattgataacctttcatgtatgaatcctaattgttccttgaatttccaaacatgagtattctgataacatcttacactattttatttttattttatatattaatgtttactgcatttaccatactttcttcaggaaccacaagtgtaatcttttgtaaacagtatttattagattacatataataagcaacaatagtatatgatccttcttttatagttagaccttgaaacaagtctaaactatttttaaattatttgcaaaaaatgtgactaataaaaatccctagtctattttcaggtagattcttgtactttgagattatcataatcttctaactgatattttatatttttctaaaaacttttataagttctttagttttatttcaggcttgaacattggttctgatttgtatatcaacatatcagaagaattagtcaactaaagtttgaaaacctatgtagcagagatctggttcagaaactgcttctatactatacatttaaaaattaatcagcaattgatggtattatttttatattaag

SEQ ID NO: 130519 - DNA, 3657 bp, Homo sapiens
  Payload ID: 5527
  Gene Symbol: ERI2
  Gene Name: ERI1 exoribonuclease family member 2
  Uniprot ID: A8K979
  ENST ID: ENST00000564349
  CDS Start-End: 477-2273
ggaggcggtggcagtggtggaagaagaggcggcggcggcgggggtagggagcctggaaacgcgagcggggatggtaggtggtttggacccgccgggccgccgtcgtttccagaaagggtttgactggaggaacctctggagcagctgcttttggacaaactcttctgaaaggtgggcaacctagaaagccagttgatgccacttgctattggagttgtgggcagcttggattaattaggagaaagtcaattgcgccagcaaatggaaatctcggaagaagcaaatccaagcagttgtttgactacttaattgtcattgattttgaatcgacatgctggaatgatgggaagcaccaccatagccaggaaataattgagtttccagcagtgttgctgaacacatcaactggacagattgactctgagttccaggcttatgttcaacctcaggaacatccaattctttcagaattttgcatggaattgacaggcataaagcaggctcaagttgatgaaggagtccctctgaagatttgcttatctcagttctgtaaatggattcataagattcagcaacagaagaacattatttttgctactgggatttcagagccttctgcttctgaagtaaaattatgtgcatttgttacttggtcagactgggacttgggggtttgcctggagtatgagtgtaaaagaaagcagctgttaaaacctgtgtttttaaattcttggattgatctcagagcaacttacaagcttttctataggagaaaaccaaaaggactaagtggtgccttgcaggaagtaggaatagaattctcaggacgagaacattctgggttggacgattctcggaatactgcccttcttgcttggaaaatgatcagagatggttgtgtaatgaaaattacaaggtcgttgaacaaggttcccactaagaagaatttcagcattctggccagaaatttgaatacaattcaagttgaagaaatgtctgcctgtaacattagcatccagggtcccagcatatataataaggagcctaaaaatataataaatcctcatgaaaaagttcaaatgaagtcaatttgtgcaaattctcctataaaggcacaacaggatcaattacaagtaaaaaacaatataaaagcaagtcttcacaatgtcaaaagttccttacctctttttaatactaagtcctctacttctgtggggcagttgcagtctcctaccttgaattcacctatctatatgcaaaagcaaggaaaaaatgaacatcttgcatttaataccaaatctaaggcttcaacagttggttcagaattggtacttgtttctaccaccgttccaactgttcatcatgtttctgatttggaaatgagctctactctggactgtttacctgtgttggctgattgggaggatgtggttttactgccagcatctcagcctgaggaaaacgtagactgtacagttcccattagtgactcagacttagagatttcatttaattctggagaaagattaatggttttgaaagaattggaaatgtcaagtcatgaaaactttggagacatagaggaaactcctcaaaaatctgagacttctaagtctattgtgtacaagagtcctcacactactatttataatgtaaaagaagccaaagatccaggttcagatatttctgcctttaagttacctgaacacaaatcaagtaccttcaacagagttaatgccaatatgtctcatcctttagttttggggaaacatcctcttctttcaggtggtaccaaaaggaatccatgcagtccccaagctttcccaccagcaaaaaaacaacccttcactattcatgaagaaaagcctacatcatctgattgctccccagtaagaagttcttcctggaggcgtctcccatctatattaacttctacagttaacctacaagagccatggaagagtgggaaaatgacacctccattatgcaagtgtggtcggagatctaagagacttgttgtttctaataatggaccgaaccatggaaaagtcttctattgttgccctatcgggaaataccaagaaaacagaaaatgttgtggttatttcaaatgggaacaaacacttcaaaaggaaagagccaacagcatggttccatctcattccacagggggactcacttttagttctccagaaacaagccatatttgtgacagaaatttaagtatttccaccaaaaattctttgagactcaggccttcaatgaggaattgataacctttcatgtatgaatcctaattgttccttgaatttccaaacatgagtattctgataacatcttacactattttatttttattttatatattaatgtttactgcatttaccatactttcttcaggaaccacaagtgtaatcttttgtaaacagtatttattagattacatataataagcaacaatagtatatgatccttcttttatagttagaccttgaaacaagtctaaactatttttaaattatttgcaaaaaatgtgactaataaaaatccctagtctattttcaggtagattcttgtactttgagattatcataatcttctaactgatattttatatttttctaaaaacttttataagttctttagttttatttcaggcttgaacattggttctgatttgtatatcaacatatcagaagaattagtcaactaaagtttgaaaacctatgtagcagagatctggttcagaaactgcttctatactatacatttaaaaattaatcagcaattgatggtattatttttatattaagaaatgataggaacattgacactaatgtggaggaatttgccaaatattttatttcaaaatttagcctctgatatcataaccacaagatattttaaatcaacagtttctaagcatactaccacagtttttatgacctctccatcatcttgtggtttctagagattgacagatactatgtttgttttatagatatggtaattaatgaaacaactttaaattgtcttccattctttcttcctcagttcatttctttttgtcttcccactgatagtctttggcagctcttgaataaattctacctgttggcatcaaggggaagaaaattagcctggaaatttttatctttacataaagccaattatatagcagtttgattatgaattctaggtggaagaattagaatagtctttggaatgggttttgggtaacagccaaaatagggaaaagggtattgttaggaaagttgtcttgatattaagtatttactgtgagtccagtaagccaaaggaccaaacaaaataggttcagggtttcattttaatctcaaagattctgattcttacccatatgtcatcagttcagtttgggacatgtggtgcagcatgtgtgaagaaaatattcattaaaatgtaaaaataaacacttgaaattgtccacaacactgagcaaatattcgttataattaggatgcctacctttctgggatatttgtaaggtgctgtagtttttttaacatgctcctgaatctcctttattagttgttcttgatcatgtgacttgtaatcaggatttagaacgacaaaagcctttactacctaaaataaatatttgaaacaccaggaaaa

SEQ ID NO: 130520 - DNA, 2646 bp, Homo sapiens
  Payload ID: 5527
  Gene Symbol: ERI2
  Gene Name: ERI1 exoribonuclease family member 2
  Uniprot ID: A8K979
  ENST ID: ENST00000569729
  CDS Start-End: 47-886
gagcgacttccggcagctggacttggaaaagcaaggagtgtcgggaatggcgaccaagcggctcgcgcggcagcttggattaattaggagaaagtcaattgcgccagcaaatggaaatctcggaagaagcaaatccaagcagttgtttgactacttaattgtcattgattttgaatcgacatgctggaatgatgggaagcaccaccatagccaggaaataattgagtttccagcagtgttgctgaacacatcaactggacagattgactctgagttccaggcttatgttcaacctcaggaacatccaattctttcagaattttgcatggaattgacaggcataaagcaggctcaagttgatgaaggagtccctctgaagatttgcttatctcagttctgtaaatggattcataagattcagcaacagaagaacattatttttgctactgggatttcagagccttctgcttctgaagtaaaattatgtgcatttgttacttggtcagactgggacttgggggtttgcctggagtatgagtgtaaaagaaagcagctgttaaaacctgtgtttttaaattcttggattgatctcagagcaacttacaagcttttctataggagaaaaccaaaaggactaagtggtgccttgcaggaagtaggaatagaattctcaggacgagaacattctgggttggacgattctcggaatactgcccttcttgcttggaaaatgatcagagatggttgtgtaatgaaaattacaaggtcgttgaacaaggtggtaccaaaaggaatccatgcagtccccaagctttcccaccagcaaaaaaacaacccttcactattcatgaagaaaagcctacatcatctgattgctccccagtaagaagttcttcctggaggcgtctcccatctatattaacttctacagttaacctacaagagccatggaagagtgggaaaatgacacctccattatgcaagtgtggtcggagatctaagagacttgttgtttctaataatggaccgaaccatggaaaagtcttctattgttgccctatcgggaaataccaagaaaacagaaaatgttgtggttatttcaaatgggaacaaacacttcaaaaggaaagagccaacagcatggttccatctcattccacagggggactcacttttagttctccagaaacaagccatatttgtgacagaaatttaagtatttccaccaaaaattctttgagactcaggccttcaatgaggaattgataacctttcatgtatgaatcctaattgttccttgaatttccaaacatgagtattctgataacatcttacactattttatttttattttatatattaatgtttactgcatttaccatactttcttcaggaaccacaagtgtaatcttttgtaaacagtatttattagattacatataataagcaacaatagtatatgatccttcttttatagttagaccttgaaacaagtctaaactatttttaaattatttgcaaaaaatgtgactaataaaaatccctagtctattttcaggtagattcttgtactttgagattatcataatcttctaactgatattttatatttttctaaaaacttttataagttctttagttttatttcaggcttgaacattggttctgatttgtatatcaacatatcagaagaattagtcaactaaagtttgaaaacctatgtagcagagatctggttcagaaactgcttctatactatacatttaaaaattaatcagcaattgatggtattatttttatattaagaaatgataggaacattgacactaatgtggaggaatttgccaaatattttatttcaaaatttagcctctgatatcataaccacaagatattttaaatcaacagtttctaagcatactaccacagtttttatgacctctccatcatcttgtggtttctagagattgacagatactatgtttgttttatagatatggtaattaatgaaacaactttaaattgtcttccattctttcttcctcagttcatttctttttgtcttcccactgatagtctttggcagctcttgaataaattctacctgttggcatcaaggggaagaaaattagcctggaaatttttatctttacataaagccaattatatagcagtttgattatgaattctaggtggaagaattagaatagtctttggaatgggttttgggtaacagccaaaatagggaaaagggtattgttaggaaagttgtcttgatattaagtatttactgtgagtccagtaagccaaaggaccaaacaaaataggttcagggtttcattttaatctcaaagattctgattcttacccatatgtcatcagttcagtttgggacatgtggtgcagcatgtgtgaagaaaatattcattaaaatgtaaaaataaacacttgaaattgtccacaacactgagcaaatattcgttataattaggatgcctacctttctgggatatttgtaaggtgctgtagtttttttaacatgctcctgaatctcctttattagttgttcttgatcatgtgacttgtaatcaggatttagaacgacaaaagcctttactacctaaaataaatatttgaaacaccagg

SEQ ID NO: 130521 - DNA, 1684 bp, Homo sapiens
  Payload ID: 5528
  Gene Symbol: ERI3
  Gene Name: ERI1 exoribonuclease family member 3
  Uniprot ID: O43414
  ENST ID: ENST00000372257
  CDS Start-End: 183-1196
ccgggaacgggcggtggggagcgggcggagctggccctgcctctgcctggccggcgccgcagtcggcgcgggccgcgcccgccgccgccaactgccctgagcgcttgctgaggccgagggagacgtcggggcctgcacctggagggagcctgccgcgctggccccgaggagggggcgttgccatggcgacagcctctcccgctgctgacggggggcgggggcggccctgggaaggagggctggtctcctggccccccgcccctccccttactctcccctggacttggatgggcccgagttgggggcaacaccccgggcattggggctttccagctctcacagaaccttcagcatccccagctgccggtcttggcatcttcgaagtaaggagagttttagatgcttctggatgttcaatgctagcacctttacagactggagcagctcgattttcttcgtatttactttcaagagcaagaaaagtgctgggctcccacttattttctccctgtggtgttccggagttctgctccatatccaccagaaagctggcggcccacggctttggcgcatccatggcggcaatggtgtccttccctccccagaggtatcactactttttagtgctggactttgaggccacgtgcgacaagccacagattcatcctcaggaaatcatcgagttccccatcctaaagctaaatggccggaccatggagattgagtctacctttcacatgtatgtccagcctgtagtccatccacagcttaccccattctgtacagagctcaccgggattattcaagccatggtggatggtcagccaagcctgcagcaagtgctggagagggtcgatgaatggatggcgaaggaaggcctcttagatccaaacgtcaagtcaatttttgtcacctgtggagactgggacttaaaagtcatgctcccaggccagtgccagtacttgggcttgccagtggcggattacttcaagcagtggattaatctgaaaaaggcttacagcttcgccatgggctgctggcccaagaatggacttctagacatgaacaagggcctcagcctgcaacacataggccggccccacagcggcattgacgactgcaagaacattgccaacatcatgaagacactcgcctatcgaggcttcatcttcaagcagacatcgaagccgttctgattggccgaggacaggatggggcaggacagggtagctgtttggcccagcccagaatcctcctctccctcaccagaggggaagagggagagtggcatagctctgtgtccagagtgtccccagctgccctgtgggctcatgcccttggcgtgggcttgtgcccttgcaagggcttggccacttggcccttctggagcagacactttgtgccccccatccccacccctcaatctcagcccagtatcagcccctcccattgcgggcctgggctagggggacccaggcactcaccgcctcctccctggtacacaggcttctgtggggccaccaagcccctcctgtgccccctcccatccatagtgcatggtgtgtggtgcccccagggctccaggacagatcaggccccaccttgtgtctacccccatccccgctgtgaacgtgccactgaataaagtcggggaaacgaggcactgggtgtgtgtgcaaagcca

SEQ ID NO: 130522 - DNA, 1332 bp, Homo sapiens
  Payload ID: 5528
  Gene Symbol: ERI3
  Gene Name: ERI1 exoribonuclease family member 3
  Uniprot ID: O43414
  ENST ID: ENST00000372259
  CDS Start-End: 176-844
gaaattggctgagagaaaaggtcagggtcaggaataacagtttcattatctgagcaactggacatagaggctggcacttgggcacattgtcacaaatctttgtgttgggattaatgccactaacctgtagtgttggggttccatctctgatcattatcagctaaaaatcttcaaaatgtttgtcatgcttcaggtgccctggctgcagagttgtgccaacttggtgcagattggggcacctctcccactactgggctgtttgggccagtattttgaggttctgggaagtatggaagtactggctgggcaatatgggatggaaatcatcgagttccccatcctaaagctaaatggccggaccatggagattgagtctacctttcacatgtatgtccagcctgtagtccatccacagcttaccccattctgtacagagctcaccgggattattcaagccatggtggatggtcagccaagcctgcagcaagtgctggagagggtcgatgaatggatggcgaaggaaggcctcttagatccaaacgtcaagtcaatttttgtcacctgtggagactgggacttaaaagtcatgctcccaggccagtgccagtacttgggcttgccagtggcggattacttcaagcagtggattaatctgaaaaaggcttacagcttcgccatgggctgctggcccaagaatggacttctagacatgaacaagggcctcagcctgcaacacataggccggccccacagcggcattgacgactgcaagaacattgccaacatcatgaagacactcgcctatcgaggcttcatcttcaagcagacatcgaagccgttctgattggccgaggacaggatggggcaggacagggtagctgtttggcccagcccagaatcctcctctccctcaccagaggggaagagggagagtggcatagctctgtgtccagagtgtccccagctgccctgtgggctcatgcccttggcgtgggcttgtgcccttgcaagggcttggccacttggcccttctggagcagacactttgtgccccccatccccacccctcaatctcagcccagtatcagcccctcccattgcgggcctgggctagggggacccaggcactcaccgcctcctccctggtacacaggcttctgtggggccaccaagcccctcctgtgccccctcccatccatagtgcatggtgtgtggtgcccccagggctccaggacagatcaggccccaccttgtgtctacccccatccccgctgtgaacgtgccactgaataaagtcggggaaacgaggcactgggtgtgtgtgcaaagcca

SEQ ID NO: 130523 - DNA, 1103 bp, Homo sapiens
  Payload ID: 5528
  Gene Symbol: ERI3
  Gene Name: ERI1 exoribonuclease family member 3
  ENST ID: ENST00000456170
  CDS Start-End: 1-615
ctccaggaaatcatcgagttccccatcctaaagctaaatggccggaccatggagattgagtctacctttcacatgtatgtccagcctgtagtccatccacagcttaccccattctgtacagagctcaccgggattattcaagccatggtggatggtcagccaagcctgcagcaagtgctggagagggtcgatgaatggatggcgaaggaaggcctcttagatccaaacgtcaagtcaatttttgtcacctgtggagactgggacttaaaagtcatgctcccaggccagtgccagtacttgggcttgccagtggcggattacttcaagcagtggattaatctgaaaaagggcagcagtcctggaacagcctcaggaacctcatgctaccagtcagaggaagctcagagaaaggagaacacaccgggggtcaaggcttacagcttcgccatgggctgctggcccaagaatggacttctagacatgaacaagggcctcagcctgcaacacataggccggccccacagcggcattgacgactgcaagaacattgccaacatcatgaagacactcgcctatcgaggcttcatcttcaagcagacatcgaagccgttctgattggccgaggacaggatggggcaggacagggtagctgtttggcccagcccagaatcctcctctccctcaccagaggggaagagggagagtggcatagctctgtgtccagagtgtccccagctgccctgtgggctcatgcccttggcgtgggcttgtgcccttgcaagggcttggccacttggcccttctggagcagacactttgtgccccccatccccacccctcaatctcagcccagtatcagcccctcccattgcgggcctgggctagggggacccaggcactcaccgcctcctccctggtacacaggcttctgtggggccaccaagcccctcctgtgccccctcccatccatagtgcatggtgtgtggtgcccccagggctccaggacagatcaggccccaccttgtgtctacccccatccccgctgtgaacgtgccactgaataaagtcggggaaacgaggcactgggtgtgtgtgcaaagcca

SEQ ID NO: 130524 - DNA, 764 bp, Homo sapiens
  Payload ID: 5528
  Gene Symbol: ERI3
  Gene Name: ERI1 exoribonuclease family member 3
  ENST ID: ENST00000452396
  CDS Start-End: 235-764
ggtgagtcggtgtgttgtggactcgtggtgctggctgccgctgttcaggcggccgggaacgggcggtggggagcgggcggagctggccctgcctctgcctggccggcgccgcagtcggcgcgggccgcgcccgccgccgccaactgccctgagcgcttgctgaggccgagggagacgtcggggcctgcacctggagggagcctgccgcgctggccccgaggagggggcgttgccatggcgacagcctctcccgctgctgacggggggcgggggcggccctgggaaggagggctggtctcctggccccccgcccctccccttactctcccctggacttggatgggcccgagttgggggcaacaccccggggaaatcatcgagttccccatcctaaagctaaatggccggaccatggagattgagtctacctttcacatgtatgtccagcctgtagtccatccacagcttaccccattctgtacagagctcaccgggattattcaagccatggtggatggtcagccaagcctgcagcaagtgctggagagggtcgatgaatggatggcgaaggaaggcctcttagatccaaacgtcaagtcaatttttgtcacctgtggagactgggacttaaaagtcatgctcccaggccagtgccagtacttgggcttgccagtggcggattacttcaagcagtggattaatctgaaaaaggcttacagcttcgccatgggctgctggcccaagaatggacttctagacatgaa

SEQ ID NO: 130525 - DNA, 975 bp, Homo sapiens
  Payload ID: 5528
  Gene Symbol: ERI3
  Gene Name: ERI1 exoribonuclease family member 3
  ENST ID: ENST00000457571
  CDS Start-End: 224-975
gtgttgtggactcgtggtgctggctgccgctgttcaggcggccgggaacgggcggtggggagcgggcggagctggccctgcctctgcctggccggcgccgcagtcggcgcgggccgcgcccgccgccgccaactgccctgagcgcttgctgaggccgagggagacgtcggggcctgcacctggagggagcctgccgcgctggccccgaggagggggcgttgccatggcgacagcctctcccgctgctgacggggggcgggggcggccctgggaaggagggctggtctcctggccccccgcccctccccttactctcccctggacttggatgggcccgagttgggggcaacaccccgggcattggggctttccagctctcacagaaccttcagcatccccagctgccggtcttggcatcttcgaagtaaggagagatgcttctggatgttcaatgctagcacctttacagactggagcagctcgattttcttcgtatttactttcaagagcaagaaaagtgctgggctcccacttattttctccctgtggtgttccggagttctgctccatatccaccagaaagctggcggcccacggctttggcgcatccatggcggcaatggtgtccttccctccccagaggtatcactactttttagtgctggactttgaggccacgtgcgacaagccacagattcatcctcaggaaatcatcgagttccccatcctaaagctaaatggccggaccatggagattgagtctacctttcacatgtatgtccagcctgtagtccatccacagcttaccccattctgtacagagctcaccgggattattcaagccatggtggatggtcagccaagcctgcagcaagtgctggagagggtcgatgaatggatggcgaaggaaggcctcttagatccaaacgtcaagtcaatttttgtcacctgtggagactgggacttaaaagtcat

SEQ ID NO: 130526 - DNA, 3760 bp, Homo sapiens
  Payload ID: 5529
  Gene Symbol: ERMN
  Gene Name: ermin, ERM-like protein
  Uniprot ID: Q8TAM6
  ENST ID: ENST00000397283
  CDS Start-End: 235-1128
cacaactgtctctactgccaaggtgctaatgccgaacccctgtgggatctctggtccaaggaaacatctgcacacaggccagggatggcgcttagcttcatctgtgctgcaaactctcatcagtaggcttgctggctctgtgaccttactagctgaactccttaatctctctgcacttcatttttctagtctataaaatggagataacaacagcacctacctcagaagactgttatgaagactctctctccagatcggattcaaccgcacatcatgacagatgttccggctacatttacccaggctgagtgtaatggggataaaccacctgaaaacggtcaacaaacaatcactaaaatcagtgaggaattgactgatgtggacagccccctgccacactacagggtagaacccagtctggaaggtgcactcaccaaaggaagtcaggaggaaagaagaaaattacaagggaacatgctgctcaactcatccatggaggacaaaatgctaaaagaaaacccagaagagaaactctttattgttcataaggctatcacagatctttctctccaagaaactagtgctgatgaaatgacattcagagaagggcatcagtgggagaagattcctctgagtggcagtaaccaggaaataagaagacagaaggagaggattactgagcagcctctcaaagaggaagaagatgaggacaggaagaacaaaggtcaccaggcagctgaaattgaatggctgggatttcgaaaacctagccaagctgacatgttacattctaaacatgatgaggagcagaaggtttgggatgaagaaattgatgatgatgatgatgataattgcaataatgatgaagatgaagttcgagtgatagaatttaagaaaaaacatgaagaggtttctcaatttaaagaggaaggtgatgcaagtgaggactccccactgagcagtgccagttcccaagctgtgacacctgatgagcagccaaccttagggaagaagagtgatatctccagaaatgcttattccagatacaatacaatatcctatcggaaaatcagaaagggaaataccaagcaaagaattgatgaattcgagtctatgatgcatttataaactaactggaactgagaaattctcatgcccactaaaggaaaagctaattctattgccccagggtgcatatttctatgccttatttgagttatcacttggagggaggtggaagttgactctctttttcactgtagaataatgtggaaataaccctagataaaaattcagtctgataacctcaaatcaaaaagctttaaataaattcttgggcatttatcttttaaaacttcactaatatagcattgtgtgataagcactaagcagtcagtcccctgggggaatctggcataattcggctataaatgtagcaatgcttggaaaggtagtcatcaaatgagactatttgaggggactatttgaaatgattctggtatttcttttggtatctttcttcctgtacattggagtgatggaaagtctggtattaaaacctctcttacttttaaacttgattttgcagactctggcaataagccttccaaaattctgtgccttttctattatcaccaaacaatatgttaagtggctttccttggcatctacagagaaaacattctatagccctccttcctaggtgttaccattcactgaatcttctctcagagggagatgagcaattgtcagtcaggataattctgtttgctaaatgttgcctttatgctttcaaactgaattaaacccattgtgaggttgacactgggaggggctagaagattggtgggcagcagactaaagagttatgttggatagttttatttctgtggctgaaaataaaatcttgtctagcacagttaaagtcattaaaaataaaaatgacagctttagcacaattttaagaaaatgcccctctctattaccacattttctcttattaacagtatctcagaataattttctttccttagaaacctgagagaatgctagtcataactgtactagttactatgaaaatggaaataattatcttagaatattttcaaagtagagcgtgagcatgtatttttagtgggagagctctgatagttgttgggaatatataatttactggacctcagcccaaatcaagatgcttaaaattgtacttgtggagcttcactcaaaccaatgtgtcaaataacgtattgaatatttatgaaaagagagactatatttatattcttagatagtttgttccacaatttttcatttcatgcttccatatatattaccctgaactttctatcaccacagataaagattttgttttgccctgcaaataaaaagacaattccttattgtctgaatgtaatacagtcttcattgtactattcaaccctttgtttctttctttttcattttgtgaaaaactccatgttagtcctcttagatgactgcttatttatgtgtaacataaatcccacatattctaatgacaacttctttaatccttccgggtcatatattatatttccatagtatcacatactattatttagttgtttacaagactccaatttgaattcaggattacagtgctcctttcattctttcaaacagataacataaaagttctgttaccctcattctatacaacctatggatttcatgtgttacaatatcagtttccagaataaagtgagggaaatcaggtctttattgataaagttagggagaagattgatgcaataggacaatttccaatttaatttagatcctctaatctttctacatggacaagctgttttcttttctaggttactgataacccctacaattttcgacttaacttcaaaacacagtattgtgttatctatcacataacaggaccatgtttttaacctaccatcaagagcctgtattttgagttattccaacagagatgatggattcctgtagaactagaggtgggtgacctatggttatgtggcacggcaaagcaagtacctcttaagggactctaatatatgctaacgctggtcctcttagctctgtgctctcaccagacaatgaatgaactatgaaagatttagtcaacagaaactattttagggtatgtttagttggtaaatgcttcatgttcatggatgacacaatgtttttgcaaaaaaaccctgaaactattctttggcattggtgtccatggccctataccgccatcttacacgaaagccacagagttgaaagccacagagttgaaagccacagagttaagtgacctcaggtaacataatggtgatggttggccatttgagtctttgtaacctaggaaagacaaaggtctgattcagattgcatgggggatttttaacatatttgaaactcagggggaacatgattaagaacacaaactggtagctacacatgaaggtttacttgagcttttgtgattcaaagttcaggggtggtaaggactctggtaccagggaagagggagaattaatttattgtgcaaatgctggtatttcttacatgattttttgttttcctctgttgctagataaatagaaactaataatagctctatttctctgccaatataaaatctacctttcatataatgctacattgaaggcacagaatttgctaccatctctctctccccctacctaccaaactatccacaatttaaataaagaactgctgtgtctgactt

SEQ ID NO: 130527 - DNA, 3793 bp, Homo sapiens
  Payload ID: 5529
  Gene Symbol: ERMN
  Gene Name: ermin, ERM-like protein
  Uniprot ID: Q8TAM6
  ENST ID: ENST00000410096
  CDS Start-End: 293-1147
gatgcctttaactctgccagggaactggcaagcaacaaagaaggtggtgattggctggattcttgctcatggctcctggcagatctgacaaatcctcttgcttttgctctaatctctgtctggatacttttaggaaaagaaccttgttattatgtactaaagtgaataatttgtgctcttagagtaggagttggaactataggacttgaaggcaagagcaggtatcttatcaaggatctactcactcagtttccctaaagctctctctccagatcggattcaaccgcacatcatgacagatgttccggctacatttacccaggctgagtgtaatggggataaaccacctgaaaacggtcaacaaacaatcactaaaatcagtgaggaattgactgatgtggacagccccctgccacactacagggtagaacccagtctggaaggtgcactcaccaaaggaagtcaggaggaaagaagaaaattacaagggaacatgctgctcaactcatccatggaggacaaaatgctaaaagaaaacccagaagagaaactctttattgttcataaggctatcacagatctttctctccaagaaactagtgctgatgaaatgacattcagagaagggcatcagtgggagaagattcctctgagtggcagtaaccaggaaataagaagacagaaggagaggattactgagcagcctctcaaagaggaagaagatgaggacaggaagaacaaaggtcaccaggcagctgaaattgaatggctgggatttcgaaaacctagccaagctgacatgttacattctaaacatgatgaggagcagaaggtttgggatgaagaaattgatgatgatgatgatgataattgcaataatgatgaagatgaagttcgagtgatagaatttaagaaaaaacatgaagaggtttctcaatttaaagaggaaggtgatgcaagtgaggactccccactgagcagtgccagttcccaagctgtgacacctgatgagcagccaaccttagggaagaagagtgatatctccagaaatgcttattccagatacaatacaatatcctatcggaaaatcagaaagggaaataccaagcaaagaattgatgaattcgagtctatgatgcatttataaactaactggaactgagaaattctcatgcccactaaaggaaaagctaattctattgccccagggtgcatatttctatgccttatttgagttatcacttggagggaggtggaagttgactctctttttcactgtagaataatgtggaaataaccctagataaaaattcagtctgataacctcaaatcaaaaagctttaaataaattcttgggcatttatcttttaaaacttcactaatatagcattgtgtgataagcactaagcagtcagtcccctgggggaatctggcataattcggctataaatgtagcaatgcttggaaaggtagtcatcaaatgagactatttgaggggactatttgaaatgattctggtatttcttttggtatctttcttcctgtacattggagtgatggaaagtctggtattaaaacctctcttacttttaaacttgattttgcagactctggcaataagccttccaaaattctgtgccttttctattatcaccaaacaatatgttaagtggctttccttggcatctacagagaaaacattctatagccctccttcctaggtgttaccattcactgaatcttctctcagagggagatgagcaattgtcagtcaggataattctgtttgctaaatgttgcctttatgctttcaaactgaattaaacccattgtgaggttgacactgggaggggctagaagattggtgggcagcagactaaagagttatgttggatagttttatttctgtggctgaaaataaaatcttgtctagcacagttaaagtcattaaaaataaaaatgacagctttagcacaattttaagaaaatgcccctctctattaccacattttctcttattaacagtatctcagaataattttctttccttagaaacctgagagaatgctagtcataactgtactagttactatgaaaatggaaataattatcttagaatattttcaaagtagagcgtgagcatgtatttttagtgggagagctctgatagttgttgggaatatataatttactggacctcagcccaaatcaagatgcttaaaattgtacttgtggagcttcactcaaaccaatgtgtcaaataacgtattgaatatttatgaaaagagagactatatttatattcttagatagtttgttccacaatttttcatttcatgcttccatatatattaccctgaactttctatcaccacagataaagattttgttttgccctgcaaataaaaagacaattccttattgtctgaatgtaatacagtcttcattgtactattcaaccctttgtttctttctttttcattttgtgaaaaactccatgttagtcctcttagatgactgcttatttatgtgtaacataaatcccacatattctaatgacaacttctttaatccttccgggtcatatattatatttccatagtatcacatactattatttagttgtttacaagactccaatttgaattcaggattacagtgctcctttcattctttcaaacagataacataaaagttctgttaccctcattctatacaacctatggatttcatgtgttacaatatcagtttccagaataaagtgagggaaatcaggtctttattgataaagttagggagaagattgatgcaataggacaatttccaatttaatttagatcctctaatctttctacatggacaagctgttttcttttctaggttactgataacccctacaattttcgacttaacttcaaaacacagtattgtgttatctatcacataacaggaccatgtttttaacctaccatcaagagcctgtattttgagttattccaacagagatgatggattcctgtagaactagaggtgggtgacctatggttatgtggcacggcaaagcaagtacctcttaagggactctaatatatgctaacgctggtcctcttagctctgtgctctcaccagacaatgaatgaactatgaaagatttagtcaacagaaactattttagggtatgtttagttggtaaatgcttcatgttcatggatgacacaatgtttttgcaaaaaaaccctgaaactattctttggcattggtgtccatggccctataccgccatcttacacgaaagccacagagttgaaagccacagagttgaaagccacagagttaagtgacctcaggtaacataatggtgatggttggccatttgagtctttgtaacctaggaaagacaaaggtctgattcagattgcatgggggatttttaacatatttgaaactcagggggaacatgattaagaacacaaactggtagctacacatgaaggtttacttgagcttttgtgattcaaagttcaggggtggtaaggactctggtaccagggaagagggagaattaatttattgtgcaaatgctggtatttcttacatgattttttgttttcctctgttgctagataaatagaaactaataatagctctatttctctgccaatataaaatctacctttcatataatgctacattgaaggcacagaatttgctaccatctctctctccccctacctaccaaactatccacaatttaaataaagaactgctgtgtctgacttactctcaataaaag

SEQ ID NO: 130528 - DNA, 746 bp, Homo sapiens
  Payload ID: 5529
  Gene Symbol: ERMN
  Gene Name: ermin, ERM-like protein
  ENST ID: ENST00000409216
  CDS Start-End: 183-623
aatctctgtctggatacttttaggaaaagaaccttgttattatgtactaaagtgaataatttgtgctcttagagtaggagttggaactataggacttgaaggcaagagcaggtatcttatcaaggatctactcactcagtttccctaaagctctctctccagatcggattcaaccgcacatcatgacagatgttccggctacatttacccaggctgagtgtaatggggataaaccacctgaaaacggtcaacaaacaatcactaaaatcagtgaggaattgactgatgtggacagccccctgccacactacagggtagaacccagtctggaaggtgcactcaccaaaggaagtcaggaggaaagaagaaaattacaagggaacatgctgctcaactcatccatggaggacaaaatgctaaaagaaaacccagaagagaaactctttattgttcataaggctatcacagatctttctctccaagaaactagtgctgatgaaatgacattcagagaagacggagtgtcactcttgttgcccaggctggagtgcaatggtgcaatctcggcagactgcaacctctgtctccagggttcaagcgattctcctgcctcagcttcctgagtaactgggattacagggcatcagtgggagaagattcctctgagtggcagtaaccaggaaataagaagacagaaggagaggattactgagcagcctctcaaagaggaagaagatgaggacagg

SEQ ID NO: 130529 - DNA, 556 bp, Homo sapiens
  Payload ID: 5529
  Gene Symbol: ERMN
  Gene Name: ermin, ERM-like protein
  ENST ID: ENST00000409925
  CDS Start-End: 18-458
ggattcaaccgcacatcatgacagatgttccggctacatttacccaggctgagtgtaatggggataaaccacctgaaaacggtcaacaaacaatcactaaaatcagtgaggaattgactgatgtggacagccccctgccacactacagggtagaacccagtctggaaggtgcactcaccaaaggaagtcaggaggaaagaagaaaattacaagggaacatgctgctcaactcatccatggaggacaaaatgctaaaagaaaacccagaagagaaactctttattgttcataaggctatcacagatctttctctccaagaaactagtgctgatgaaatgacattcagagaagacggagtgtcactcttgttgcccaggctggagtgcaatggtgcaatctcggcagactgcaacctctgtctccagggttcaagcgattctcctgcctcagcttcctgagtaactgggattacaggcacctgacaccacgcccagctattttgtggcatcagtgggagaagattcctctgagtggcagtaaccaggaaataagaaga

SEQ ID NO: 130530 - DNA, 1466 bp, Homo sapiens
  Payload ID: 5529
  Gene Symbol: ERMN
  Gene Name: ermin, ERM-like protein
  ENST ID: ENST00000409395
  CDS Start-End: 232-486
cttgctcatggctcctggcagatctgacaaatcctcttgcttttgctctaatctctgtctggatacttttaggaaaagaaccttgttattatgtactaaagtgaataatttgtgctcttagagtaggagttggaactataggacttgaaggcaagagcaggtatcttatcaaggatctactcactcagtttccctaaagctctctctccagatcggattcaaccgcacatcatgacagatgttccggctacatttacccaggctgagtgtaatggggataaaccacctgaaaacggtcaacaaacaatcactaaaatcagtgaggaattgactgatgtggacagccccctgccacactacagggtagaacccagtctggaaggtgcactcaccaaaggaagtcaggaggaaagaagaaaattacaagggaacatgctgctcaactcatccatggaggacaaaatgctaaaaggctggtctatttgacagctgtgaccccagacaactttctgtctcccgaagcctgagtttttttcactagaagaaggcggaataataataataactacaagtctaggaaaacccagaagagaaactctttattgttcataaggctatcacagatctttctctccaagaaactagtgctgatgaaatgacattcagagaagggcatcagtgggagaagattcctctgagtggcagtaaccaggaaataagaagacagaaggagaggattactgagcagcctctcaaagaggaagaagatgaggacaggaagaacaaaggtcaccaggcagctgaaattgaatggctgggatttcgaaaacctagccaagctgacatgttacattctaaacatgatgaggagcagaaggtttgggatgaagaaattgatgatgatgatgatgataattgcaataatgatgaagatgaagttcgagtgatagaatttaagaaaaaacatgaagaggtttctcaatttaaagaggaaggtgatgcaagtgaggactccccactgagcagtgccagttcccaagctgtgacacctgatgagcagccaaccttagggaagaagagtgatatctccagaaatgcttattccagatacaatacaatatcctatcggaaaatcagaaagggaaataccaagcaaagaattgatgaattcgagtctatgatgcatttataaactaactggaactgagaaattctcatgcccactaaaggaaaagctaattctattgccccagggtgcatatttctatgccttatttgagttatcacttggagggaggtggaagttgactctctttttcactgtagaataatgtggaaataaccctagataaaaattcagtctgataacctcaaatcaaaaagctttaaataaattcttgggcatttatcttttaaaacttcactaatatagcattgtgtgataagcactaagcagtcagtcccct

SEQ ID NO: 130531 - DNA, 590 bp, Homo sapiens
  Payload ID: 5529
  Gene Symbol: ERMN
  Gene Name: ermin, ERM-like protein
  ENST ID: ENST00000411762
  CDS Start-End: 134-590
agagatgtcttccaaggacaagggagaggggattatacaagagtgaggtgttgtccctgatatagacctgaatgggctcagccctagacacacttttaaagctctctctccagatcggattcaaccgcacatcatgacagatgttccggctacatttacccaggctgagtgtaatggggataaaccacctgaaaacggtcaacaaacaatcactaaaatcagtgaggaattgactgatgtggacagccccctgccacactacagggtagaacccagtctggaaggtgcactcaccaaaggaagtcaggaggaaagaagaaaattacaagggaacatgctgctcaactcatccatggaggacaaaatgctaaaagaaaacccagaagagaaactctttattgttcataaggctatcacagatctttctctccaagaaactagtgctgatgaaatgacattcagagaagggcatcagtgggagaagattcctctgagtggcagtaaccaggaaataagaagacagaaggagaggattactgagcagcctctcaaagaggaagaagatgaggacaggaagaacaaaggtcacc

SEQ ID NO: 130532 - DNA, 541 bp, Homo sapiens
  Payload ID: 5529
  Gene Symbol: ERMN
  Gene Name: ermin, ERM-like protein
  ENST ID: ENST00000420317
  CDS Start-End: 61-541
atagacctgaatgggctcagccctagacacacttttaaagatcggattcaaccgcacatcatgacagatgttccggctacatttacccaggctgagtgtaatggggataaaccacctgaaaacggtcaacaaacaatcactaaaatcagtgaggaattgactgatgtggacagccccctgccacactacagggtagaacccagtctggaaggtgcactcaccaaaggaagtcaggaggaaagaagaaaattacaagggaacatgctgctcaactcatccatggaggacaaaatgctaaaagaaaacccagaagagaaactctttattgttcataaggctatcacagatctttctctccaagaaactagtgctgatgaaatgacattcagagaagggcatcagtgggagaagattcctctgagtggcagtaaccaggaaataagaagacagaaggagaggattactgagcagcctctcaaagaggaagaagatgaggacaggaagaacaaaggtcaccaggcagctgaaattgaatggctgg

SEQ ID NO: 130533 - DNA, 1246 bp, Homo sapiens
  Payload ID: 5529
  Gene Symbol: ERMN
  Gene Name: ermin, ERM-like protein
  ENST ID: ENST00000420719
  CDS Start-End: 183-977
aatctctgtctggatacttttaggaaaagaaccttgttattatgtactaaagtgaataatttgtgctcttagagtaggagttggaactataggacttgaaggcaagagcaggtatcttatcaaggatctactcactcagtttccctaaagctctctctccagatcggattcaaccgcacatcatgacagatgttccggctacatttacccaggctgagtgtaatggggataaaccacctgaaaacggtcaacaaacaatcactaaaatcagtgaggaattgactgatgtggacagccccctgccacactacagggtagaacccagtctggaaggtgcactcaccaaaggaagtcaggaggaaagaagaaaattacaagggaacatgctgctcaactcatccatggaggacaaaatgctaaaagaaactagtgctgatgaaatgacattcagagaagggcatcagtgggagaagattcctctgagtggcagtaaccaggaaataagaagacagaaggagaggattactgagcagcctctcaaagaggaagaagatgaggacaggaagaacaaaggtcaccaggcagctgaaattgaatggctgggatttcgaaaacctagccaagctgacatgttacattctaaacatgatgaggagcagaaggtttgggatgaagaaattgatgatgatgatgatgataattgcaataatgatgaagatgaagttcgagtgatagaatttaagaaaaaacatgaagaggtttctcaatttaaagaggaaggtgatgcaagtgaggactccccactgagcagtgccagttcccaagctgtgacacctgatgagcagccaaccttagggaagaagagtgatatctccagaaatgcttattccagatacaatacaatatcctatcggaaaatcagaaagggaaataccaagcaaagaattgatgaattcgagtctatgatgcatttataaactaactggaactgagaaattctcatgcccactaaaggaaaagctaattctattgccccagggtgcatatttctatgccttatttgagttatcacttggagggaggtggaagttgactctctttttcactgtagaataatgtggaaataaccctagataaaaattcagtctgataacctcaaatcaaaaagctttaaataaattcttgggcatttatcttttaaaacttcactaatatagcattgtgtgataagcactaagcagtcagt

SEQ ID NO: 130534 - DNA, 594 bp, Homo sapiens
  Payload ID: 5529
  Gene Symbol: ERMN
  Gene Name: ermin, ERM-like protein
  ENST ID: ENST00000419116
  CDS Start-End: 260-594
aacaaagaaggtggtgattggctggattcttgctcatggctcctggcagatctgacaaatcctcttgcttttgctctaatctctgtctggatacttttaggaaaagaaccttgttattatgtactaaagtgaataatttgtgctcttagagtaggagttggaactataggacttgaaggcaagagcaggtatcttatcaaggatctactcactcagtttccctaaagctctctctccagatcggattcaaccgcacatcatgacagatgttccggctacatttacccaggctgagtgtaatggggataaaccacctgaaaacggtcaacaaacaatcactaaaatcagtgaggaattgactgatgtggacagccccctgccacactacagggtagaacccagtctggaaggtgcactcaccaaaggaagtcaggaggaaagaagaaaattacaagggaacatgctgctcaactcatccatggaggacaaaatgctaaaagaagagaaactctttattgttcataaggctatcacagatctttctctccaagaaactagtgctgatgaaatgacattcagagaagggcatcagtg

SEQ ID NO: 130535 - DNA, 3949 bp, Homo sapiens
  Payload ID: 5530
  Gene Symbol: ERMAP
  Gene Name: erythroblast membrane-associated protein (Scianna blood group)
  ENST ID: ENST00000328249
  CDS Start-End: 1039-2196
ggagggacctcactgccttgatctgttatttatcaagagtcaaactggaaaaggctgtcagggaaacctccaggctgcatcttgggcaaagattggcttgaaacaggcatttcccaagcctggccttggacaccaactgtaaaaaaaaggccattactggtgtttccttggttagttctgggtataagttctggatcctcactcatctcatctgcactgacatcctcactcacggcatttagagacttaacacgccagcctctgtgtgagcatttacctctttcaaccctcaccataatcccacaaggaggcacagttcttttacccattttgaagatgaagaaacacagtctcagagaagttcggtcacagtatcacaaggaggtaagtagcagagctgggattggagccccggcctttgtgatcccagagcaccagcaataccgtctcggcctcggctcctgggttataccctctgtcacgccaagcccatcagcccgcttgtgctgtctccctctgtctgtcctagttcggatggagatggcgagttctgctggctcctggctctctggctgcctcatccctctcgtcttcctccggctgtctgtgcatgtgtcaggtaggagtttctgatcctctttccctgcctggtacatgtgatattggcgtccccagaataaggaagcttggctggaaacattatgtcttttggggttctgttcccccggccctggcaatcctttccagagtccttcctgggctctgtccgtccccgggatatcctcttcctcatcccttcccaagctttctcctgccgtccctcccagttggccttgtctctttttttgtccaggccacgcaggggatgccggcaagttccacgtggccctactagggggcacagccgagctgctctgccctctctccctctggcccgggacggtacccaaggaggtgaggtggctgcggtccccattcccgcagcgctcccaggctgttcacatattccgggatgggaaggaccaggatgaagatctgatgccggaatataaggggaggacggtgctagtgagagatgcccaagagggaagtgtcactctgcagatccttgacgtgcgccttgaggaccaagggtcttaccgatgtctgatccaagttggaaatctgagtaaagaggacaccgtgatcctgcaggttgcagccccatctgtggggagtctctccccctcagcagtggctctggctgtgatcctgcctgtcctggtacttctcatcatggtgtgcctttgccttatctggaagcaaagaagagcaaaagaaaagcttctctatgaacatgtgacggaggtggacaatcttctttcagaccatgctaaagaaaaaggaaaactccataaagctgtcaagaaactccggagtgaactgaagttgaaaagagctgcagcaaactcaggctggagaagagcccggttgcattttgtggcagtgaccctggacccagacacagcacatcccaaactcatcctttctgaggaccaaagatgtgtaaggcttggagacagacggcagcctgtacctgacaacccccagagatttgatttcgttgtcagcatcctaggctctgagtacttcacgactggctgccactactgggaggtgtatgtgggagacaagaccaaatggattcttggagtatgtagtgagtcagtgagcaggaaggggaaggttactgcctcacctgccaatggacactggcttctgcgacagagtcgtgggaatgagtatgaagctctcacatccccgcagacctccttccgccttaaagagcctccacggtgtgtggggattttcctggactatgaagcaggagtcatctctttctacaatgtgaccaacaagtcccacatctttactttcacccacaatttctctggcccccttcgccctttctttgaaccttgccttcatgatggaggaaaaaacacagcacctctagtcatttgttcagaactacacaaatcagaggaatcaattgtccccaggccagaagggaaaggccatgctaatggagatgtgtccctcaaggtgaactcttctttactacccccgaaggccccagagctgaaggatataatcctgtccttgccccctgaccttggcccagcccttcaggagctcaaggctccttctttttagggatatgccacattacctgctcccatcaccatccagcccagcaccctggacttcagtcgcctggcccaaccccatgattatggaacgtctcttcaccttaacccaaatccagacccttttgtggtttctatttgtaccacttttctcccaggcctcagttctgaagcttacctttcttctaaggaattgaagctcccagtgacctggagggaggattcctggaaaccaaacaatcagtttaggtgcaggtggagatgttgaatatgtgttaccaagatacagcacaggttcagggaaaagagttcgctactccaggggttatttagaagacactttctctgcctcatcctgccctcaagctttagtcaagaagttatggcccccagtccctgacttcttacttatcccattgaggactgcctttctctctctcagttctggcctctgccccccaaagtcagctctctaaaagcaagcatgttttagaccactcactctttccctctttcttcaggaatgaattgggaaaggctgatgagtaaaacataccatccttttctattttcttgatgctgtttacaacatagtttggtgatatccagagctaatgtacatgctttcaaaagctaatctgcctgttgatggtaactaggtacagcgactttaaatacagttgctataatcctgaaaagccccaggagcacatcagggagctgggaaacacagttgcagagaactcagctgtatgttgccctctgaccttggcccagaccttcagaggctcagtctgttgagtctgttgtgactgtcttatgaatcaatctgttgtgccaaccctttctgagattcagagaggtccagctagaaaaagtggcagttttaaccaccaacgtagaagcttttttttccccacaagaccattgtactgcaatacttgagtatttgtgtagcaaacagcctcttaggttggagagtattgatttcaaataggaagttggtagactaggtgtgaggatgaaataatgaccttgatttttgggtgtgtattgcagaagcctcgtcgctttcaagtcacatcatatatgcgatctggcctaaccatggagatattggttatcagtttgcagatgaatacacagttctatccaacagaaactgtatctttctgtttgtcagaagttctccgttagttcctgtattagtcaaggttttccagagaaacagaatcaatatatattggggcaggggggcggtggttattataaggaattggctcacgtgattatggaggcggttaaatcccaagatctgcaggataagtcagcaagatggagtcccatgagagctgatggtttagttccagtctgatggcagcaggcttgacgccaaggaagagatgatgtttaattcaagtccgaaggcaaggaaaaagctgatggtcctgtccaaaggctattaggcaggaagaattctcttagggcagagttagctcttttgttctattcaggccttcaactgattcagcaaggcccgcccacatttgggaggacagtctgcattactcagtctactgatttgaatgttaatgtcattgagaaacaccctcacaggaacactcagaataatgtttgaccaaatagctgggcatcttgtgacccagttaagtggatacataagattaactatcacagtgactcagtggaattttttgtttgcttttgtacagttttaaaataaaagtttggtatttgtg

SEQ ID NO: 130536 - DNA, 3369 bp, Homo sapiens
  Payload ID: 5530
  Gene Symbol: ERMAP
  Gene Name: erythroblast membrane-associated protein (Scianna blood group)
  Uniprot ID: Q96PL5
  ENST ID: ENST00000372514
  CDS Start-End: 185-1612
cagagagagccctggcctctcatatttcataaaatatgaacttttcccggcccacatccctaggccttcctgatgcgcttgcctgctccctggtctctctgcatggggaaggagtgttcccagcttgcaaactccagctttgcctgtgagaggaacaagcgtccctgatccagaaggtgttcggatggagatggcgagttctgctggctcctggctctctggctgcctcatccctctcgtcttcctccggctgtctgtgcatgtgtcaggccacgcaggggatgccggcaagttccacgtggccctactagggggcacagccgagctgctctgccctctctccctctggcccgggacggtacccaaggaggtgaggtggctgcggtccccattcccgcagcgctcccaggctgttcacatattccgggatgggaaggaccaggatgaagatctgatgccggaatataaggggaggacggtgctagtgagagatgcccaagagggaagtgtcactctgcagatccttgacgtgcgccttgaggaccaagggtcttaccgatgtctgatccaagttggaaatctgagtaaagaggacaccgtgatcctgcaggttgcagccccatctgtggggagtctctccccctcagcagtggctctggctgtgatcctgcctgtcctggtacttctcatcatggtgtgcctttgccttatctggaagcaaagaagagcaaaagaaaagcttctctatgaacatgtgacggaggtggacaatcttctttcagaccatgctaaagaaaaaggaaaactccataaagctgtcaagaaactccggagtgaactgaagttgaaaagagctgcagcaaactcaggctggagaagagcccggttgcattttgtggcagtgaccctggacccagacacagcacatcccaaactcatcctttctgaggaccaaagatgtgtaaggcttggagacagacggcagcctgtacctgacaacccccagagatttgatttcgttgtcagcatcctaggctctgagtacttcacgactggctgccactactgggaggtgtatgtgggagacaagaccaaatggattcttggagtatgtagtgagtcagtgagcaggaaggggaaggttactgcctcacctgccaatggacactggcttctgcgacagagtcgtgggaatgagtatgaagctctcacatccccgcagacctccttccgccttaaagagcctccacggtgtgtggggattttcctggactatgaagcaggagtcatctctttctacaatgtgaccaacaagtcccacatctttactttcacccacaatttctctggcccccttcgccctttctttgaaccttgccttcatgatggaggaaaaaacacagcacctctagtcatttgttcagaactacacaaatcagaggaatcaattgtccccaggccagaagggaaaggccatgctaatggagatgtgtccctcaaggtgaactcttctttactacccccgaaggccccagagctgaaggatataatcctgtccttgccccctgaccttggcccagcccttcaggagctcaaggctccttctttttagggatatgccacattacctgctcccatcaccatccagcccagcaccctggacttcagtcgcctggcccaaccccatgattatggaacgtctcttcaccttaacccaaatccagacccttttgtggtttctatttgtaccacttttctcccaggcctcagttctgaagcttacctttcttctaaggaattgaagctcccagtgacctggagggaggattcctggaaaccaaacaatcagtttaggtgcaggtggagatgttgaatatgtgttaccaagatacagcacaggttcagggaaaagagttcgctactccaggggttatttagaagacactttctctgcctcatcctgccctcaagctttagtcaagaagttatggcccccagtccctgacttcttacttatcccattgaggactgcctttctctctctcagttctggcctctgccccccaaagtcagctctctaaaagcaagcatgttttagaccactcactctttccctctttcttcaggaatgaattgggaaaggctgatgagtaaaacataccatccttttctattttcttgatgctgtttacaacatagtttggtgatatccagagctaatgtacatgctttcaaaagctaatctgcctgttgatggtaactaggtacagcgactttaaatacagttgctataatcctgaaaagccccaggagcacatcagggagctgggaaacacagttgcagagaactcagctgtatgttgccctctgaccttggcccagaccttcagaggctcagtctgttgagtctgttgtgactgtcttatgaatcaatctgttgtgccaaccctttctgagattcagagaggtccagctagaaaaagtggcagttttaaccaccaacgtagaagcttttttttccccacaagaccattgtactgcaatacttgagtatttgtgtagcaaacagcctcttaggttggagagtattgatttcaaataggaagttggtagactaggtgtgaggatgaaataatgaccttgatttttgggtgtgtattgcagaagcctcgtcgctttcaagtcacatcatatatgcgatctggcctaaccatggagatattggttatcagtttgcagatgaatacacagttctatccaacagaaactgtatctttctgtttgtcagaagttctccgttagttcctgtattagtcaaggttttccagagaaacagaatcaatatatattggggcaggggggcggtggttattataaggaattggctcacgtgattatggaggcggttaaatcccaagatctgcaggataagtcagcaagatggagtcccatgagagctgatggtttagttccagtctgatggcagcaggcttgacgccaaggaagagatgatgtttaattcaagtccgaaggcaaggaaaaagctgatggtcctgtccaaaggctattaggcaggaagaattctcttagggcagagttagctcttttgttctattcaggccttcaactgattcagcaaggcccgcccacatttgggaggacagtctgcattactcagtctactgatttgaatgttaatgtcattgagaaacaccctcacaggaacactcagaataatgtttgaccaaatagctgggcatcttgtgacccagttaagtggatacataagattaactatcacagtgactcagtggaattttttgtttgcttttgtacagttttaaaataaaagtttggtatttgtgtttt

SEQ ID NO: 130537 - DNA, 3423 bp, Homo sapiens
  Payload ID: 5530
  Gene Symbol: ERMAP
  Gene Name: erythroblast membrane-associated protein (Scianna blood group)
  Uniprot ID: Q96PL5
  ENST ID: ENST00000372517
  CDS Start-End: 245-1672
ctcctggaggaaaatggcggtcgctggagccgccgaccaagaggcttgggagtctgtacctttcccgaccgggccactggaagttggagcctccgccgagtcgcagacaacgcctccgggagggccttcctgatgcgcttgcctgctccctggtctctctgcatggggaaggagtgttcccagcttgcaaactccagctttgcctgtgagaggaacaagcgtccctgatccagaaggtgttcggatggagatggcgagttctgctggctcctggctctctggctgcctcatccctctcgtcttcctccggctgtctgtgcatgtgtcaggccacgcaggggatgccggcaagttccacgtggccctactagggggcacagccgagctgctctgccctctctccctctggcccgggacggtacccaaggaggtgaggtggctgcggtccccattcccgcagcgctcccaggctgttcacatattccgggatgggaaggaccaggatgaagatctgatgccggaatataaggggaggacggtgctagtgagagatgcccaagagggaagtgtcactctgcagatccttgacgtgcgccttgaggaccaagggtcttaccgatgtctgatccaagttggaaatctgagtaaagaggacaccgtgatcctgcaggttgcagccccatctgtggggagtctctccccctcagcagtggctctggctgtgatcctgcctgtcctggtacttctcatcatggtgtgcctttgccttatctggaagcaaagaagagcaaaagaaaagcttctctatgaacatgtgacggaggtggacaatcttctttcagaccatgctaaagaaaaaggaaaactccataaagctgtcaagaaactccggagtgaactgaagttgaaaagagctgcagcaaactcaggctggagaagagcccggttgcattttgtggcagtgaccctggacccagacacagcacatcccaaactcatcctttctgaggaccaaagatgtgtaaggcttggagacagacggcagcctgtacctgacaacccccagagatttgatttcgttgtcagcatcctaggctctgagtacttcacgactggctgccactactgggaggtgtatgtgggagacaagaccaaatggattcttggagtatgtagtgagtcagtgagcaggaaggggaaggttactgcctcacctgccaatggacactggcttctgcgacagagtcgtgggaatgagtatgaagctctcacatccccgcagacctccttccgccttaaagagcctccacggtgtgtggggattttcctggactatgaagcaggagtcatctctttctacaatgtgaccaacaagtcccacatctttactttcacccacaatttctctggcccccttcgccctttctttgaaccttgccttcatgatggaggaaaaaacacagcacctctagtcatttgttcagaactacacaaatcagaggaatcaattgtccccaggccagaagggaaaggccatgctaatggagatgtgtccctcaaggtgaactcttctttactacccccgaaggccccagagctgaaggatataatcctgtccttgccccctgaccttggcccagcccttcaggagctcaaggctccttctttttagggatatgccacattacctgctcccatcaccatccagcccagcaccctggacttcagtcgcctggcccaaccccatgattatggaacgtctcttcaccttaacccaaatccagacccttttgtggtttctatttgtaccacttttctcccaggcctcagttctgaagcttacctttcttctaaggaattgaagctcccagtgacctggagggaggattcctggaaaccaaacaatcagtttaggtgcaggtggagatgttgaatatgtgttaccaagatacagcacaggttcagggaaaagagttcgctactccaggggttatttagaagacactttctctgcctcatcctgccctcaagctttagtcaagaagttatggcccccagtccctgacttcttacttatcccattgaggactgcctttctctctctcagttctggcctctgccccccaaagtcagctctctaaaagcaagcatgttttagaccactcactctttccctctttcttcaggaatgaattgggaaaggctgatgagtaaaacataccatccttttctattttcttgatgctgtttacaacatagtttggtgatatccagagctaatgtacatgctttcaaaagctaatctgcctgttgatggtaactaggtacagcgactttaaatacagttgctataatcctgaaaagccccaggagcacatcagggagctgggaaacacagttgcagagaactcagctgtatgttgccctctgaccttggcccagaccttcagaggctcagtctgttgagtctgttgtgactgtcttatgaatcaatctgttgtgccaaccctttctgagattcagagaggtccagctagaaaaagtggcagttttaaccaccaacgtagaagcttttttttccccacaagaccattgtactgcaatacttgagtatttgtgtagcaaacagcctcttaggttggagagtattgatttcaaataggaagttggtagactaggtgtgaggatgaaataatgaccttgatttttgggtgtgtattgcagaagcctcgtcgctttcaagtcacatcatatatgcgatctggcctaaccatggagatattggttatcagtttgcagatgaatacacagttctatccaacagaaactgtatctttctgtttgtcagaagttctccgttagttcctgtattagtcaaggttttccagagaaacagaatcaatatatattggggcaggggggcggtggttattataaggaattggctcacgtgattatggaggcggttaaatcccaagatctgcaggataagtcagcaagatggagtcccatgagagctgatggtttagttccagtctgatggcagcaggcttgacgccaaggaagagatgatgtttaattcaagtccgaaggcaaggaaaaagctgatggtcctgtccaaaggctattaggcaggaagaattctcttagggcagagttagctcttttgttctattcaggccttcaactgattcagcaaggcccgcccacatttgggaggacagtctgcattactcagtctactgatttgaatgttaatgtcattgagaaacaccctcacaggaacactcagaataatgtttgaccaaatagctgggcatcttgtgacccagttaagtggatacataagattaactatcacagtgactcagtggaattttttgtttgcttttgtacagttttaaaataaaagtttggtatttg

SEQ ID NO: 130538 - DNA, 2676 bp, Homo sapiens
  Payload ID: 5531
  Gene Symbol: EPB41
  Gene Name: erythrocyte membrane protein band 4.1
  Uniprot ID: P11171
  ENST ID: ENST00000347529
  CDS Start-End: 47-2374
agaacgcggtcggcccggtccccgccgcacccagcccagcaacatcatgacaacagagaagagtttagtgactgaggccgaaaattcacagcaccaacagaaggaagagggtgaggaagccataaactcaggccaacaagaacctcagcaggaggaatcttgtcaaacagcagctgaaggagataattggtgtgaacagaagctgaaagcttctaatggagacactcctacacatgaagacttgaccaagaacaaggagcggacatcagaaagcagaggactttcacgactattctcctcgtttctcaaaaggcccaaatctcaggtgtccgaggaagaaggcaaagaagtagagtcagataaagaaaaaggtgaaggaggtcagaaagagatagaatttggaaccagtcttgatgaagagatcattttaaaggccccaattgcagctcctgaaccggaactcaaaacagacccatctttggatcttcattcattaagcagtgcagaaacacagcctgctcaggaagaactcagagaagatccagattttgaaattaaggaaggagaaggacttgaagagtgctccaaaatagaagtaaaagaagaaagccctcaatcaaaagcagaaacagaattaaaagcttcccaaaaaccaatcagaaaacacaggaacatgcactgcaaggtttctttgttggatgacacagtttatgaatgtgttgtggagacatggctggattccgccaaagaaataaaaaagcaggttcgtggtgtcccttggaattttacatttaatgtaaagttttatccacctgacccagcacagttaacagaagacataacaagatattatttatgtcttcagcttcggcaggacatagttgcaggacgtctgccctgttcctttgcaaccttagcattattaggttcttacaccatccagtctgaactgggagactacgacccagaactccatggcgtggattatgttagtgattttaaactggccccgaatcagaccaaggaacttgaagagaaggtcatggaactgcataagtcatacaggtccatgactccagctcaggctgacttggagtttcttgagaatgccaaaaagttgtctatgtatggagttgatcttcataaagcaaaggacttggaaggagtagatatcatcctaggtgtctgctctagtggccttctggtttacaaagataagctgagaattaaccgcttcccttggcccaaagtgctgaagatttcttataaacgtagtagctttttcatcaagattcggcctggagagcaagagcagtatgaaagtaccatcggattcaaacttcccagttaccgagcagctaagaaattatggaaagtctgtgtagaacatcacacgtttttcagattgacatctacagacaccattcccaaaagcaaatttcttgcgctaggatccaaatttcgatacagtggccggactcaagctcagaccaggcaagctagtgctctaattgacaggcctgccccacacttcgagcgtacagcaagtaaacgggcgtcccggagcctcgatggagcagcagctgtcgattcggcagaccgaagtcctcggcccacttctgcacctgccattactcagggtcaggttgcagaaggtggcgtcctagatgcctctgctaaaaaaacagtggtccctaaagcacagaaggaaacagtgaaggctgaagtgaaaaaggaagacgagccacctgagcaagctgagccagagcccacagaagcatggaaggatttagacaagagtcaagaggagatcaaaaaacatcatgccagcatcagtgagctgaaaaagaacttcatggagtctgtaccagaaccacggcctagtgaatgggataaacgcttatccactcactcacccttccgaactcttaacatcaatgggcaaatccccacaggagaaggacctcccctggtgaagacacaaactgtcaccatctcagataatgccaatgctgtgaaaagtgaaatcccaaccaaagacgtccctattgtccacactgagaccaagaccatcacttatgaggctgcccagactgacgacaacagtggagacttggacccaggagtcttgctgacagctcaaactatcacatctgagaccccaagcagcaccaccacaactcaaattaccaagactgtaaaaggtgggatttcagagacacgtattgaaaagagaattgtgatcacaggagatgctgatattgaccatgatcaggtccttgtacaagccatcaaggaggcaaaggagcagcacccagacatgtcagtgaccaaggtggtcgtccaccaggagaccgagattgctgatgagtgagctcaggaactaacctaccccaactctgcccttctcccatccaagagaaaccagcaaaatgataaagaagctaacctgccatagtcagacttcagactttcaagattattctaaatcaccagaaaattaatttcagtttctattgggagtttataccaagagattcttctagatctcattgatccttttgaagagctttttctatattaggatatcagaattgttcaacttttcactctatagactgttttaagagttttggggtttttttaattgggtggtttgtaaccccttcagcctag

SEQ ID NO: 130539 - DNA, 3029 bp, Homo sapiens
  Payload ID: 5531
  Gene Symbol: EPB41
  Gene Name: erythrocyte membrane protein band 4.1
  Uniprot ID: P11171
  ENST ID: ENST00000349460
  CDS Start-End: 802-2727
ggggcaaagtggcaggaacctcttaaagggcgagagcggcgcggagccagaacgcggtcggcccggtccccgccgcacccagcccagcaacatcatgacaacagagaagagtttagtgactgaggccgaaaattcacagcaccaacagaaggaagagggtgaggaagccataaactcaggccaacaagaacctcagcaggaggaatcttgtcaaacagcagctgaaggagataattggtgtgaacagaagctgaaagcttctaatggagacactcctacacatgaagacttgaccaagaacaaggagcggacatcagaaagcagaggactttcacgactattctcctcgtttctcaaaaggcccaaatctcaggtgtccgaggaagaaggcaaagaagtagagtcagataaagaaaaaggtgaaggaggtcagaaagagatagaatttggaaccagtcttgatgaagagatcattttaaaggccccaattgcagctcctgaaccggaactcaaaacagacccatctttggatcttcattcattaagcagtgcagaaacacagcctcaccattacaattaagaattattttcagagtcttcttatttctgaagcatgtgaatattatctgcatcgttaaaagtcctgctcaggaagaactcagagaagatccagattttgaaattaaggaaggagaaggacttgaagagtgctccaaaatagaagtaaaagaagaaagccctcaatcaaaagcagaaacagaattaaaagcttcccaaaaaccaatcagaaaacacaggaacatgcactgcaaggtttctttgttggatgacacagtttatgaatgtgttgtggagaaacatgctaagggacaagatttgcttaaacgagtatgtgagcatctcaatcttttggaagaagactattttggtctagccatttgggataacgcaacctctaagacatggctggattccgccaaagaaataaaaaagcaggttcgtggtgtcccttggaattttacatttaatgtaaagttttatccacctgacccagcacagttaacagaagacataacaagatattatttatgtcttcagcttcggcaggacatagttgcaggacgtctgccctgttcctttgcaaccttagcattattaggttcttacaccatccagtctgaactgggagactacgacccagaactccatggcgtggattatgttagtgattttaaactggccccgaatcagaccaaggaacttgaagagaaggtcatggaactgcataagtcatacaggtccatgactccagctcaggctgacttggagtttcttgagaatgccaaaaagttgtctatgtatggagttgatcttcataaagcaaaggacttggaaggagtagatatcatcctaggtgtctgctctagtggccttctggtttacaaagataagctgagaattaaccgcttcccttggcccaaagtgctgaagatttcttataaacgtagtagctttttcatcaagattcggcctggagagcaagagcagtatgaaagtaccatcggattcaaacttcccagttaccgagcagctaagaaattatggaaagtctgtgtagaacatcacacgtttttcagattgacatctacagacaccattcccaaaagcaaatttcttgcgctaggatccaaatttcgatacagtggccggactcaagctcagaccaggcaagctagtgctctaattgacaggcctgccccacacttcgagcgtacagcaagtaaacgggcgtcccggagcctcgatggagcagcagctgtcgattcggcagaccgaagtcctcggcccacttctgcacctgccattactcagggtcaggttgcagaaggtggcgtcctagatgcctctgctaaaaaaacagtggtccctaaagcacagaaggaaacagtgaaggctgaagtgaaaaaggaagacgagccacctgagcaagctgagccagagcccacagaagcatggaaggtggaaaaaacccacatcgaggtgacagtacccacctcaaatggtgaccaaacacagaaaaagagagaaagactagatggtgaaaacatttatatcagacatagcaatttaatgttggaggatttagacaagagtcaagaggagatcaaaaaacatcatgccagcatcagtgagctgaaaaagaacttcatggagtctgtaccagaaccacggcctagtgaatgggataaacgcttatccactcactcacccttccgaactcttaacatcaatgggcaaatccccacaggagaaggacctcccctggtgaagacacaaactgtcaccatctcagataatgccaatgctgtgaaaagtgaaatcccaaccaaagacgtccctattgtccacactgagaccaagaccatcacttatgaggctgcccagactgacgacaacagtggagacttggacccaggagtcttgctgacagctcaaactatcacatctgagaccccaagcagcaccaccacaactcaaattaccaagactgtaaaaggtgggatttcagagacacgtattgaaaagagaattgtgatcacaggagatgctgatattgaccatgatcaggtccttgtacaagccatcaaggaggcaaaggagcagcacccagacatgtcagtgaccaaggtggtcgtccaccaggagaccgagattgctgatgagtgagctcaggaactaacctaccccaactctgcccttctcccatccaagagaaaccagcaaaatgataaagaagctaacctgccatagtcagacttcagactttcaagattattctaaatcaccagaaaattaatttcagtttctattgggagtttataccaagagattcttctagatctcattgatccttttgaagagctttttctatattaggatatcagaattgttcaacttttcactctatagactgttttaagagttttggggtttttttaattgggtggtttgtaaccccttcagcctag

SEQ ID NO: 130540 - DNA, 5956 bp, Homo sapiens
  Payload ID: 5531
  Gene Symbol: EPB41
  Gene Name: erythrocyte membrane protein band 4.1
  Uniprot ID: P11171
  ENST ID: ENST00000343067
  CDS Start-End: 128-2722
agttgccctgtcagtgcaggtggaggccccggcggggcaaagtggcaggaacctcttaaagggcgagagcggcgcggagccagaacgcggtcggcccggtccccgccgcacccagcccagcaacatcatgacaacagagaagagtttagtgactgaggccgaaaattcacagcaccaacagaaggaagagggtgaggaagccataaactcaggccaacaagaacctcagcaggaggaatcttgtcaaacagcagctgaaggagataattggtgtgaacagaagctgaaagcttctaatggagacactcctacacatgaagacttgaccaagaacaaggagcggacatcagaaagcagaggactttcacgactattctcctcgtttctcaaaaggcccaaatctcaggtgtccgaggaagaaggcaaagaagtagagtcagataaagaaaaaggtgaaggaggtcagaaagagatagaatttggaaccagtcttgatgaagagatcattttaaaggccccaattgcagctcctgaaccggaactcaaaacagacccatctttggatcttcattcattaagcagtgcagaaacacagcctgctcaggaagaactcagagaagatccagattttgaaattaaggaaggagaaggacttgaagagtgctccaaaatagaagtaaaagaagaaagccctcaatcaaaagcagaaacagaattaaaagcttcccaaaaaccaatcagaaaacacaggaacatgcactgcaaggtttctttgttggatgacacagtttatgaatgtgttgtggagaaacatgctaagggacaagatttgcttaaacgagtatgtgagcatctcaatcttttggaagaagactattttggtctagccatttgggataacgcaacctctaagacatggctggattccgccaaagaaataaaaaagcaggttcgtggtgtcccttggaattttacatttaatgtaaagttttatccacctgacccagcacagttaacagaagacataacaagatattatttatgtcttcagcttcggcaggacatagttgcaggacgtctgccctgttcctttgcaaccttagcattattaggttcttacaccatccagtctgaactgggagactacgacccagaactccatggcgtggattatgttagtgattttaaactggccccgaatcagaccaaggaacttgaagagaaggtcatggaactgcataagtcatacaggtccatgactccagctcaggctgacttggagtttcttgagaatgccaaaaagttgtctatgtatggagttgatcttcataaagcaaaggacttggaaggagtagatatcatcctaggtgtctgctctagtggccttctggtttacaaagataagctgagaattaaccgcttcccttggcccaaagtgctgaagatttcttataaacgtagtagctttttcatcaagattcggcctggagagcaagagcagtatgaaagtaccatcggattcaaacttcccagttaccgagcagctaagaaattatggaaagtctgtgtagaacatcacacgtttttcagattgacatctacagacaccattcccaaaagcaaatttcttgcgctaggatccaaatttcgatacagtggccggactcaagctcagaccaggcaagctagtgctctaattgacaggcctgccccacacttcgagcgtacagcaagtaaacgggcgtcccggagcctcgatggagcagcagctgtcgattcggcagaccgaagtcctcggcccacttctgcacctgccattactcagggtcaggttgcagaaggtggcgtcctagatgcctctgctaaaaaaacagtggtccctaaagcacagaaggaaacagtgaaggctgaagtgaaaaaggaagacgagccacctgagcaagctgagccagagcccacagaagcatggaaggtggaaaaaacccacatcgaggtgacagtacccacctcaaatggtgaccaaacacagaagcttgcagaaaaaactgaagatctgataagaatgaggaagaaaaagagagaaagactagatggtgaaaacatttatatcagacatagcaatttaatgttggaggatttagacaagagtcaagaggagatcaaaaaacatcatgccagcatcagtgagctgaaaaagaacttcatggagtctgtaccagaaccacggcctagtgaatgggataaacgcttatccactcactcacccttccgaactcttaacatcaatgggcaaatccccacaggagaaggacctcccctggtgaagacacaaactgtcaccatctcagataatgccaatgctgtgaaaagtgaaatcccaaccaaagacgtccctattgtccacactgagaccaagaccatcacttatgaggctgcccagactgacgacaacagtggagacttggacccaggagtcttgctgacagctcaaactatcacatctgagaccccaagcagcaccaccacaactcaaattaccaagactgtaaaaggtgggatttcagagacacgtattgaaaagagaattgtgatcacaggagatgctgatattgaccatgatcaggtccttgtacaagccatcaaggaggcaaaggagcagcacccagacatgtcagtgaccaaggtggtcgtccaccaggagaccgagattgctgatgagtgagctcaggaactaacctaccccaactctgcccttctcccatccaagagaaaccagcaaaatgataaagaagctaacctgccatagtcagacttcagactttcaagattattctaaatcaccagaaaattaatttcagtttctattgggagtttataccaagagattcttctagatctcattgatccttttgaagagctttttctatattaggatatcagaattgttcaacttttcactctatagactgttttaagagttttggggtttttttaattgggtggtttgtaaccccttcagcctagcctctctgcccatttatttccaaccccaacagacactgacagggtccatggaattcttcgggaaatcctccaaggactcttgtcagctgtgttggaagccaaagccagcttagtgggacttccgcgtctctccctagtcttatcccctttggatgatggcagaaacttcatgaaccagccctttctcagagccagtgatgtgagtgtatcagaatgccagggagggcaccagccctgatccacagacctcggaaagatgcccctgttcctttgttgcgggtggttttggtaaggcagagccctctgctgagaatgtagtattgtttttcccctctccctcctgctttctttttggagcttctttgggtcaaagacatggaagttgcttcagatatctgatactgtgaatgtttgaacatatccgtggccttcacctctccagctacccttttacctcatcagaagcagtggctcagctaagtgctccccctagctcccatctcaggagaccaaatctcacagaaaaataggcactttgggccaaaagctctaatggaacatttttagtggtgatttggggaaggaaagttaatgaggtttttaaaataaggttttctagttttgagagtgtgcacttcacacaggggaatggggttacttctgtctgatcctgggcctttctttcatcccaaatgacaaggaatgtggctcagagaagggtttttcttttttgacctttcttctctcaacaggaacctgcctgaggacacccttctagagcaaggaattgacttttaggagccgttctccccacaagacaccacatgacaaggggtataagccccagccctgctcattcccactcaccagctgaggtctgtcaggttttgaaggcttgattttgtggtgggtttggggcttagttttcctttttttcattttgatttttgaaagtgaagatgatgccctaattcctggtaaggatttggggcatagttttttgtttttttgagacggagtttcgctcttgttgcccaagctggagtgcagtggcgcgatctcggctcactgcaacctccgcctcctgggttcaagcagttctcttgcctcagcctcccaagtagctgggatgacaggcgcacaccaccacgcccagcaaattttttgtatttttagtagaaacgggatttcaccttgttaggctggtctcgaactcctgacctcaggtgatccacccaccttggcctcccaaagtgctgggattacaggtgtgagccaccacgcccggccgatttggggcatttttatttaacagaacttctctaaccttccaactgcttcccacaaacacattggcctcaaggctccttagaatcccagttccagcttcctaaaatagacagtgggtatcgggcagcagtcactggggctcaagggcagtgagcaagagaaatgtctaaagctgcttctcccaacaccgtccaaagtctccactgcctgagttttgtttcggctggtttgaactcatttcgggtgtgtgcatttttcttttggtacccatgtgagacatgaacaacaggagggagggaaagagcccaggtgggacgtgggacaggcttaggggaaagagcttgtcctatctcaggaacaaaattataggctgtgggcagagggtctgaaaggtgggctttggggtagtgcccaagcctggtcgtgttgccaggagtggtgacaagaaatgcagcttacatcaaacgaacatgtagtgcatgcccactgcctgatggccagatggcctgtaggaagagctaccagggcttccagacctgtggaacgaagaggatggggaaaaggcagagggcactgagtgtccctttaaaaactaacccactgaatattccgtgtgatctagaacagtgtggcagctttcacagcacaggaccgttcatcgggggcctaaacgtttccctcagctctgtcaccaactcacttctctcggcttcgttgtctgtaaattggatgaaaagagctctaatgcctttcaggctcttagaagccatagatttggacaagcccagcaagatgggtgtccttccaggcctcttcccctttcctccatctctggcaacagttcttggggtttggcaattgtttggattttttttctttctgcagttgtgtgtatgtgtgtttgtgtgaagaaaaacagactctgtccaggtagaaatggtgaggagggggaagagaattacatttccagggtcagaaacttggcaacagttttcctagagtgactcagacacaccacagtaacaactctcgctgcaattttattttaatttgagaaataaagatttcctccaagccacatgaggactctggcacccacccacaaagcaagacctgtatttataagccgagggctcagggagcctaactgcgggacccgtcagggccccgtgacccatccccgtccccacccccccctccaccgctgggcccatcagtgtgtgttggggggatgcttggcagctgggggtgaggagacaacaaacctcgggaactggagccagagctgcggcctgactgacgccttttgatgctcacgggaaatttctgcccaggatctcagccccaggctggttgtttctacaaatctctctcaaatgtattattttggtgacaaaaatgaaggagctttgtaaattttttttaaaattatgaatcatatcaagtagttgtttacatttcttgaaaaaataggaactcgggcagcagaatcagattggcagaatctttagactacacaggcaataatcaagtctgctgttttggcctttcgtagtagaagtggttgtagtgtttagatatctgtttggtcttgcttcttgtattgcatttttttcaataaacaacaacaaaaagaactctc

SEQ ID NO: 130541 - DNA, 5857 bp, Homo sapiens
  Payload ID: 5531
  Gene Symbol: EPB41
  Gene Name: erythrocyte membrane protein band 4.1
  ENST ID: ENST00000356093
  CDS Start-End: 755-2623
agttgccctgtcagtgcaggtggaggccccggcggggcaaagtggcaggaacctcttaaagggcgagagcggcgcggagccagaacgcggtcggcccggtccccgccgcacccagcccagcaacatcatgacaacagagaagagtttagtgactgaggccgaaaattcacagcaccaacagaaggaagagggtgaggaagccataaactcaggccaacaagaacctcagcaggaggaatcttgtcaaacagcagctgaaggagataattggtgtgaacagaagctgaaagcttctaatggagacactcctacacatgaagacttgaccaagaacaaggagcggacatcagaaagcagaggactttcacgactattctcctcgtttctcaaaaggcccaaatctcaggtgtccgaggaagaaggcaaagaagtagagtcagataaagaaaaaggtgaaggaggtcagaaagagatagaatttggaaccagtcttgatgaagagatcattttaaaggccccaattgcagctcctgaaccggaactcaaaacagacccatctttggatcttcattcattaagcagtgcagaaacacagcctgctcaggaagaactcagagaagatccagattttgaaattaaggaaggagaaggacttgaagagtgctccaaaatagaagtaaaagaagaaagccctcaatcaaaagcagaaacagaattaaaagcttcccaaaaaccaatcagaaaacacaggaacatgcactgcaaggtttctttgttggatgacacagtttatgaatgtgttgtggagaaacatgctaagggacaagatttgcttaaacgagtatgtgagcatctcaatcttttggaagaagactattttggtctagccatttgggataacgcaacctctaagacatggctggattccgccaaagaaataaaaaagcaggttcgtggtgtcccttggaattttacatttaatgtaaagttttatccacctgacccagcacagttaacagaagacataacaagatattatttatgtcttcagcttcggcaggacatagttgcaggacgtctgccctgttcctttgcaaccttagcattattaggttcttacaccatccagtctgaactgggagactacgacccagaactccatggcgtggattatgttagtgattttaaactggccccgaatcagaccaaggaacttgaagagaaggtcatggaactgcataagtcatacaggtccatgactccagctcaggctgacttggagtttcttgagaatgccaaaaagttgtctatgtatggagttgatcttcataaagcaaaggacttggaaggagtagatatcatcctaggtgtctgctctagtggccttctggtttacaaagataagctgagaattaaccgcttcccttggcccaaagtgctgaagatttcttataaacgtagtagctttttcatcaagattcggcctggagagcaagagcagtatgaaagtaccatcggattcaaacttcccagttaccgagcagctaagaaattatggaaagtctgtgtagaacatcacacgtttttcagattgacatctacagacaccattcccaaaagcaaatttcttgcgctaggatccaaatttcgatacagtggccggactcaagctcagaccaggcaagctagtgctctaattgacaggcctgccccacacttcgagcgtacagcaagtaaacgggcgtcccggagcctcgatggagcagcagctgtcgattcggcagaccgaagtcctcggcccacttctgcacctgccattactcagggtcaggttgcagaaggtggcgtcctagatgcctctgctaaaaaaacagtggtccctaaagcacagaaggaaacagtgaaggctgaagtgaaaaaggaagacgagccacctgagcaagctgagccagagcccacagaagcatggaagaaaaagagagaaagactagatggtgaaaacatttatatcagacatagcaatttaatgttggaggatttagacaagagtcaagaggagatcaaaaaacatcatgccagcatcagtgagctgaaaaagaacttcatggagtctgtaccagaaccacggcctagtgaatgggataaacgcttatccactcactcacccttccgaactcttaacatcaatgggcaaatccccacaggagaaggacctcccctggtgaagacacaaactgtcaccatctcagataatgccaatgctgtgaaaagtgaaatcccaaccaaagacgtccctattgtccacactgagaccaagaccatcacttatgaggctgcccagactgacgacaacagtggagacttggacccaggagtcttgctgacagctcaaactatcacatctgagaccccaagcagcaccaccacaactcaaattaccaagactgtaaaaggtgggatttcagagacacgtattgaaaagagaattgtgatcacaggagatgctgatattgaccatgatcaggtccttgtacaagccatcaaggaggcaaaggagcagcacccagacatgtcagtgaccaaggtggtcgtccaccaggagaccgagattgctgatgagtgagctcaggaactaacctaccccaactctgcccttctcccatccaagagaaaccagcaaaatgataaagaagctaacctgccatagtcagacttcagactttcaagattattctaaatcaccagaaaattaatttcagtttctattgggagtttataccaagagattcttctagatctcattgatccttttgaagagctttttctatattaggatatcagaattgttcaacttttcactctatagactgttttaagagttttggggtttttttaattgggtggtttgtaaccccttcagcctagcctctctgcccatttatttccaaccccaacagacactgacagggtccatggaattcttcgggaaatcctccaaggactcttgtcagctgtgttggaagccaaagccagcttagtgggacttccgcgtctctccctagtcttatcccctttggatgatggcagaaacttcatgaaccagccctttctcagagccagtgatgtgagtgtatcagaatgccagggagggcaccagccctgatccacagacctcggaaagatgcccctgttcctttgttgcgggtggttttggtaaggcagagccctctgctgagaatgtagtattgtttttcccctctccctcctgctttctttttggagcttctttgggtcaaagacatggaagttgcttcagatatctgatactgtgaatgtttgaacatatccgtggccttcacctctccagctacccttttacctcatcagaagcagtggctcagctaagtgctccccctagctcccatctcaggagaccaaatctcacagaaaaataggcactttgggccaaaagctctaatggaacatttttagtggtgatttggggaaggaaagttaatgaggtttttaaaataaggttttctagttttgagagtgtgcacttcacacaggggaatggggttacttctgtctgatcctgggcctttctttcatcccaaatgacaaggaatgtggctcagagaagggtttttcttttttgacctttcttctctcaacaggaacctgcctgaggacacccttctagagcaaggaattgacttttaggagccgttctccccacaagacaccacatgacaaggggtataagccccagccctgctcattcccactcaccagctgaggtctgtcaggttttgaaggcttgattttgtggtgggtttggggcttagttttcctttttttcattttgatttttgaaagtgaagatgatgccctaattcctggtaaggatttggggcatagttttttgtttttttgagacggagtttcgctcttgttgcccaagctggagtgcagtggcgcgatctcggctcactgcaacctccgcctcctgggttcaagcagttctcttgcctcagcctcccaagtagctgggatgacaggcgcacaccaccacgcccagcaaattttttgtatttttagtagaaacgggatttcaccttgttaggctggtctcgaactcctgacctcaggtgatccacccaccttggcctcccaaagtgctgggattacaggtgtgagccaccacgcccggccgatttggggcatttttatttaacagaacttctctaaccttccaactgcttcccacaaacacattggcctcaaggctccttagaatcccagttccagcttcctaaaatagacagtgggtatcgggcagcagtcactggggctcaagggcagtgagcaagagaaatgtctaaagctgcttctcccaacaccgtccaaagtctccactgcctgagttttgtttcggctggtttgaactcatttcgggtgtgtgcatttttcttttggtacccatgtgagacatgaacaacaggagggagggaaagagcccaggtgggacgtgggacaggcttaggggaaagagcttgtcctatctcaggaacaaaattataggctgtgggcagagggtctgaaaggtgggctttggggtagtgcccaagcctggtcgtgttgccaggagtggtgacaagaaatgcagcttacatcaaacgaacatgtagtgcatgcccactgcctgatggccagatggcctgtaggaagagctaccagggcttccagacctgtggaacgaagaggatggggaaaaggcagagggcactgagtgtccctttaaaaactaacccactgaatattccgtgtgatctagaacagtgtggcagctttcacagcacaggaccgttcatcgggggcctaaacgtttccctcagctctgtcaccaactcacttctctcggcttcgttgtctgtaaattggatgaaaagagctctaatgcctttcaggctcttagaagccatagatttggacaagcccagcaagatgggtgtccttccaggcctcttcccctttcctccatctctggcaacagttcttggggtttggcaattgtttggattttttttctttctgcagttgtgtgtatgtgtgtttgtgtgaagaaaaacagactctgtccaggtagaaatggtgaggagggggaagagaattacatttccagggtcagaaacttggcaacagttttcctagagtgactcagacacaccacagtaacaactctcgctgcaattttattttaatttgagaaataaagatttcctccaagccacatgaggactctggcacccacccacaaagcaagacctgtatttataagccgagggctcagggagcctaactgcgggacccgtcagggccccgtgacccatccccgtccccacccccccctccaccgctgggcccatcagtgtgtgttggggggatgcttggcagctgggggtgaggagacaacaaacctcgggaactggagccagagctgcggcctgactgacgccttttgatgctcacgggaaatttctgcccaggatctcagccccaggctggttgtttctacaaatctctctcaaatgtattattttggtgacaaaaatgaaggagctttgtaaattttttttaaaattatgaatcatatcaagtagttgtttacatttcttgaaaaaataggaactcgggcagcagaatcagattggcagaatctttagactacacaggcaataatcaagtctgctgttttggcctttcgtagtagaagtggttgtagtgtttagatatctgtttggtcttgcttcttgtattgcatttttttcaataaacaacaacaaaaagaactctc

SEQ ID NO: 130542 - DNA, 2402 bp, Homo sapiens
  Payload ID: 5531
  Gene Symbol: EPB41
  Gene Name: erythrocyte membrane protein band 4.1
  Uniprot ID: P11171
  ENST ID: ENST00000373797
  CDS Start-End: 198-2360
cgggagggcgcgcgccagggtcgctcgctcgctccctccctccgctggtgcgtttagtcagtcagccagcagcagccggcgggcccgcgagccgcagagggcccgagcctcggacgccggcgcctcctcctgccattgttcgtcgggctgcagcagtggcgggcgcaggagcccggccccggagccaccgcaacatcatgacaacagagaagagtttagtgactgaggccgaaaattcacagcaccaacagaaggaagagggtgaggaagccataaactcaggccaacaagaacctcagcaggaggaatcttgtcaaacagcagctgaaggagataattggtgtgaacagaagctgaaagcttctaatggagacactcctacacatgaagacttgaccaagaacaaggagcggacatcagaaagcagaggactttcacgactattctcctcgtttctcaaaaggcccaaatctcaggtgtccgaggaagaaggcaaagaagtagagtcagataaagaaaaaggtgaaggaggtcagaaagagatagaatttggaaccagtcttgatgaagagatcattttaaaggccccaattgcagctcctgaaccggaactcaaaacagacccatctttggatcttcattcattaagcagtgcagaaacacagcctgctcaggaagaactcagagaagatccagattttgaaattaaggaaggagaaggacttgaagagtgctccaaaatagaagtaaaagaagaaagccctcaatcaaaagcagaaacagaattaaaagcttcccaaaaaccaatcagaaaacacaggaacatgcactgcaaggtttctttgttggatgacacagtttatgaatgtgttgtggagaaacatgctaagggacaagatttgcttaaacgagtatgtgagcatctcaatcttttggaagaagactattttggtctagccatttgggataacgcaacctctaagacatggctggattccgccaaagaaataaaaaagcaggttcgtggtgtcccttggaattttacatttaatgtaaagttttatccacctgacccagcacagttaacagaagacataacaagatattatttatgtcttcagcttcggcaggacatagttgcaggacgtctgccctgttcctttgcaaccttagcattattaggttcttacaccatccagtctgaactgggagactacgacccagaactccatggcgtggattatgttagtgattttaaactggccccgaatcagaccaaggaacttgaagagaaggtcatggaactgcataagtcatacaggtccatgactccagctcaggctgacttggagtttcttgagaatgccaaaaagttgtctatgtatggagttgatcttcataaagcaaaggacttggaaggagtagatatcatcctaggtgtctgctctagtggccttctggtttacaaagataagctgagaattaaccgcttcccttggcccaaagtgctgaagatttcttataaacgtagtagctttttcatcaagattcggcctggagagcaagagcagtatgaaagtaccatcggattcaaacttcccagttaccgagcagctaagaaattatggaaagtctgtgtagaacatcacacgtttttcagattgacatctacagacaccattcccaaaagcaaatttcttgcgctaggatccaaatttcgatacagtggccggactcaagctcagaccaggcaagctagtgctctaattgacaggcctgccccacacttcgagcgtacagcaagtaaacgggcgtcccggagcctcgatggagcagcagctgtcgattcggcagaccgaagtcctcggcccacttctgcacctgccattactcagggtcaggttgcagaaggtggcgtcctagatgcctctgctaaaaaaacagtggtccctaaagcacagaaggaaacagtgaaggctgaagtgaaaaaggaagacgagccacctgagcaagctgagccagagcccacagaagcatggaaggtggaaaaaacccacatcgaggtgacagtacccacctcaaatggtgaccaaacacagaaaaagagagaaagactagatggtgaaaacatttatatcagacatagcaatttaatgttggaggatttagacaagagtcaagaggagatcaaaaaacatcatgccagcatcagtgagctgaaaaagaacttcatggagtctgtaccagaaccacggcctagtgaatgggataaacgcttatccactcactcacccttccgaactcttaacatcaatgggcaaatccccacaggagaaggagtgagtactttgtccacatgaccaattgtgaaaatggagggaataaatgtttttatgtattaa

SEQ ID NO: 130543 - DNA, 5933 bp, Homo sapiens
  Payload ID: 5531
  Gene Symbol: EPB41
  Gene Name: erythrocyte membrane protein band 4.1
  Uniprot ID: P11171
  ENST ID: ENST00000373798
  CDS Start-End: 105-2699
tgtgtctcactgctgtcatttgcttccatgtgccactgcggtgatggctccatggcctctcctggactggctgcgtgaccccgacggctgcttctggcaacatcatgacaacagagaagagtttagtgactgaggccgaaaattcacagcaccaacagaaggaagagggtgaggaagccataaactcaggccaacaagaacctcagcaggaggaatcttgtcaaacagcagctgaaggagataattggtgtgaacagaagctgaaagcttctaatggagacactcctacacatgaagacttgaccaagaacaaggagcggacatcagaaagcagaggactttcacgactattctcctcgtttctcaaaaggcccaaatctcaggtgtccgaggaagaaggcaaagaagtagagtcagataaagaaaaaggtgaaggaggtcagaaagagatagaatttggaaccagtcttgatgaagagatcattttaaaggccccaattgcagctcctgaaccggaactcaaaacagacccatctttggatcttcattcattaagcagtgcagaaacacagcctgctcaggaagaactcagagaagatccagattttgaaattaaggaaggagaaggacttgaagagtgctccaaaatagaagtaaaagaagaaagccctcaatcaaaagcagaaacagaattaaaagcttcccaaaaaccaatcagaaaacacaggaacatgcactgcaaggtttctttgttggatgacacagtttatgaatgtgttgtggagaaacatgctaagggacaagatttgcttaaacgagtatgtgagcatctcaatcttttggaagaagactattttggtctagccatttgggataacgcaacctctaagacatggctggattccgccaaagaaataaaaaagcaggttcgtggtgtcccttggaattttacatttaatgtaaagttttatccacctgacccagcacagttaacagaagacataacaagatattatttatgtcttcagcttcggcaggacatagttgcaggacgtctgccctgttcctttgcaaccttagcattattaggttcttacaccatccagtctgaactgggagactacgacccagaactccatggcgtggattatgttagtgattttaaactggccccgaatcagaccaaggaacttgaagagaaggtcatggaactgcataagtcatacaggtccatgactccagctcaggctgacttggagtttcttgagaatgccaaaaagttgtctatgtatggagttgatcttcataaagcaaaggacttggaaggagtagatatcatcctaggtgtctgctctagtggccttctggtttacaaagataagctgagaattaaccgcttcccttggcccaaagtgctgaagatttcttataaacgtagtagctttttcatcaagattcggcctggagagcaagagcagtatgaaagtaccatcggattcaaacttcccagttaccgagcagctaagaaattatggaaagtctgtgtagaacatcacacgtttttcagattgacatctacagacaccattcccaaaagcaaatttcttgcgctaggatccaaatttcgatacagtggccggactcaagctcagaccaggcaagctagtgctctaattgacaggcctgccccacacttcgagcgtacagcaagtaaacgggcgtcccggagcctcgatggagcagcagctgtcgattcggcagaccgaagtcctcggcccacttctgcacctgccattactcagggtcaggttgcagaaggtggcgtcctagatgcctctgctaaaaaaacagtggtccctaaagcacagaaggaaacagtgaaggctgaagtgaaaaaggaagacgagccacctgagcaagctgagccagagcccacagaagcatggaaggtggaaaaaacccacatcgaggtgacagtacccacctcaaatggtgaccaaacacagaagcttgcagaaaaaactgaagatctgataagaatgaggaagaaaaagagagaaagactagatggtgaaaacatttatatcagacatagcaatttaatgttggaggatttagacaagagtcaagaggagatcaaaaaacatcatgccagcatcagtgagctgaaaaagaacttcatggagtctgtaccagaaccacggcctagtgaatgggataaacgcttatccactcactcacccttccgaactcttaacatcaatgggcaaatccccacaggagaaggacctcccctggtgaagacacaaactgtcaccatctcagataatgccaatgctgtgaaaagtgaaatcccaaccaaagacgtccctattgtccacactgagaccaagaccatcacttatgaggctgcccagactgacgacaacagtggagacttggacccaggagtcttgctgacagctcaaactatcacatctgagaccccaagcagcaccaccacaactcaaattaccaagactgtaaaaggtgggatttcagagacacgtattgaaaagagaattgtgatcacaggagatgctgatattgaccatgatcaggtccttgtacaagccatcaaggaggcaaaggagcagcacccagacatgtcagtgaccaaggtggtcgtccaccaggagaccgagattgctgatgagtgagctcaggaactaacctaccccaactctgcccttctcccatccaagagaaaccagcaaaatgataaagaagctaacctgccatagtcagacttcagactttcaagattattctaaatcaccagaaaattaatttcagtttctattgggagtttataccaagagattcttctagatctcattgatccttttgaagagctttttctatattaggatatcagaattgttcaacttttcactctatagactgttttaagagttttggggtttttttaattgggtggtttgtaaccccttcagcctagcctctctgcccatttatttccaaccccaacagacactgacagggtccatggaattcttcgggaaatcctccaaggactcttgtcagctgtgttggaagccaaagccagcttagtgggacttccgcgtctctccctagtcttatcccctttggatgatggcagaaacttcatgaaccagccctttctcagagccagtgatgtgagtgtatcagaatgccagggagggcaccagccctgatccacagacctcggaaagatgcccctgttcctttgttgcgggtggttttggtaaggcagagccctctgctgagaatgtagtattgtttttcccctctccctcctgctttctttttggagcttctttgggtcaaagacatggaagttgcttcagatatctgatactgtgaatgtttgaacatatccgtggccttcacctctccagctacccttttacctcatcagaagcagtggctcagctaagtgctccccctagctcccatctcaggagaccaaatctcacagaaaaataggcactttgggccaaaagctctaatggaacatttttagtggtgatttggggaaggaaagttaatgaggtttttaaaataaggttttctagttttgagagtgtgcacttcacacaggggaatggggttacttctgtctgatcctgggcctttctttcatcccaaatgacaaggaatgtggctcagagaagggtttttcttttttgacctttcttctctcaacaggaacctgcctgaggacacccttctagagcaaggaattgacttttaggagccgttctccccacaagacaccacatgacaaggggtataagccccagccctgctcattcccactcaccagctgaggtctgtcaggttttgaaggcttgattttgtggtgggtttggggcttagttttcctttttttcattttgatttttgaaagtgaagatgatgccctaattcctggtaaggatttggggcatagttttttgtttttttgagacggagtttcgctcttgttgcccaagctggagtgcagtggcgcgatctcggctcactgcaacctccgcctcctgggttcaagcagttctcttgcctcagcctcccaagtagctgggatgacaggcgcacaccaccacgcccagcaaattttttgtatttttagtagaaacgggatttcaccttgttaggctggtctcgaactcctgacctcaggtgatccacccaccttggcctcccaaagtgctgggattacaggtgtgagccaccacgcccggccgatttggggcatttttatttaacagaacttctctaaccttccaactgcttcccacaaacacattggcctcaaggctccttagaatcccagttccagcttcctaaaatagacagtgggtatcgggcagcagtcactggggctcaagggcagtgagcaagagaaatgtctaaagctgcttctcccaacaccgtccaaagtctccactgcctgagttttgtttcggctggtttgaactcatttcgggtgtgtgcatttttcttttggtacccatgtgagacatgaacaacaggagggagggaaagagcccaggtgggacgtgggacaggcttaggggaaagagcttgtcctatctcaggaacaaaattataggctgtgggcagagggtctgaaaggtgggctttggggtagtgcccaagcctggtcgtgttgccaggagtggtgacaagaaatgcagcttacatcaaacgaacatgtagtgcatgcccactgcctgatggccagatggcctgtaggaagagctaccagggcttccagacctgtggaacgaagaggatggggaaaaggcagagggcactgagtgtccctttaaaaactaacccactgaatattccgtgtgatctagaacagtgtggcagctttcacagcacaggaccgttcatcgggggcctaaacgtttccctcagctctgtcaccaactcacttctctcggcttcgttgtctgtaaattggatgaaaagagctctaatgcctttcaggctcttagaagccatagatttggacaagcccagcaagatgggtgtccttccaggcctcttcccctttcctccatctctggcaacagttcttggggtttggcaattgtttggattttttttctttctgcagttgtgtgtatgtgtgtttgtgtgaagaaaaacagactctgtccaggtagaaatggtgaggagggggaagagaattacatttccagggtcagaaacttggcaacagttttcctagagtgactcagacacaccacagtaacaactctcgctgcaattttattttaatttgagaaataaagatttcctccaagccacatgaggactctggcacccacccacaaagcaagacctgtatttataagccgagggctcagggagcctaactgcgggacccgtcagggccccgtgacccatccccgtccccacccccccctccaccgctgggcccatcagtgtgtgttggggggatgcttggcagctgggggtgaggagacaacaaacctcgggaactggagccagagctgcggcctgactgacgccttttgatgctcacgggaaatttctgcccaggatctcagccccaggctggttgtttctacaaatctctctcaaatgtattattttggtgacaaaaatgaaggagctttgtaaattttttttaaaattatgaatcatatcaagtagttgtttacatttcttgaaaaaataggaactcgggcagcagaatcagattggcagaatctttagactacacaggcaataatcaagtctgctgttttggcctttcgtagtagaagtggttgtagtgtttagatatctgtttggtcttgcttcttgtattgcatttttttcaataaacaacaacaaaaagaactctc

SEQ ID NO: 130544 - DNA, 2853 bp, Homo sapiens
  Payload ID: 5531
  Gene Symbol: EPB41
  Gene Name: erythrocyte membrane protein band 4.1
  Uniprot ID: P11171
  ENST ID: ENST00000373800
  CDS Start-End: 785-2551
ggggcaaagtggcaggaacctcttaaagggcgagagcggcgcggagccagaacgcggtcggcccggtccccgccgcacccagcccagagaagagtttagtgactgaggccgaaaattcacagcaccaacagaaggaagagggtgaggaagccataaactcaggccaacaagaacctcagcaggaggaatcttgtcaaacagcagctgaaggagataattggtgtgaacagaagctgaaagcttctaatggagacactcctacacatgaagacttgaccaagaacaaggagcggacatcagaaagcagaggactttcacgactattctcctcgtttctcaaaaggcccaaatctcaggtgtccgaggaagaaggcaaagaagtagagtcagataaagaaaaaggtgaaggaggtcagaaagagatagaatttggaaccagtcttgatgaagagatcattttaaaggccccaattgcagctcctgaaccggaactcaaaacagacccatctttggatcttcattcattaagcagtgcagaaacacagcctcaccattacaattaagaattattttcagagtcttcttatttctgaagcatgtgaatattatctgcatcgttaaaagtcctgctcaggaagaactcagagaagatccagattttgaaattaaggaaggagaaggacttgaagagtgctccaaaatagaagtaaaagaagaaagccctcaatcaaaagcagaaacagaattaaaagcttcccaaaaaccaatcagaaaacacaggaacatgcactgcaaggtttctttgttggatgacacagtttatgaatgtgttgtggagaaacatgctaagggacaagatttgcttaaacgagtatgtgagcatctcaatcttttggaagaagactattttggtctagccatttgggataacgcaacctctaagacatggctggattccgccaaagaaataaaaaagcaggttcgtggtgtcccttggaattttacatttaatgtaaagttttatccacctgacccagcacagttaacagaagacataacaagatattatttatgtcttcagcttcggcaggacatagttgcaggacgtctgccctgttcctttgcaaccttagcattattaggttcttacaccatccagtctgaactgggagactacgacccagaactccatggcgtggattatgttagtgattttaaactggccccgaatcagaccaaggaacttgaagagaaggtcatggaactgcataagtcatacaggtccatgactccagctcaggctgacttggagtttcttgagaatgccaaaaagttgtctatgtatggagttgatcttcataaagcaaaggacttggaaggagtagatatcatcctaggtgtctgctctagtggccttctggtttacaaagataagctgagaattaaccgcttcccttggcccaaagtgctgaagatttcttataaacgtagtagctttttcatcaagattcggcctggagagcaagagcagtatgaaagtaccatcggattcaaacttcccagttaccgagcagctaagaaattatggaaagtctgtgtagaacatcacacgtttttcagattgacatctacagacaccattcccaaaagcaaatttcttgcgctaggatccaaatttcgatacagtggccggactcaagctcagaccaggcaagctagtgctctaattgacaggcctgccccacacttcgagcgtacagcaagtaaacgggcgtcccggagcctcgatggagcagcagctgtcgattcggcagaccgaagtcctcggcccacttctgcacctgccattactcagggtcaggttgcagaaggtggcgtcctagatgcctctgctaaaaaaacagtggtccctaaagcacagaaggaaacagtgaaggctgaagtgaaaaaggaagacgagccacctgagcaagctgagccagagcccacagaagcatggaagaaaaagagagaaagactagatggtgaaaacatttatatcagacatagcaatttaatgttggaggatttagacaagagtcaagaggagatcaaaaaacatcatgccagcatcagtgagctgaaaaagaacttcatggagtctgtaccagaaccacggcctagtgaatgggataaacgcttatccactcactcacccttccgaactcttaacatcaatgggcaaatccccacaggagaaggacctcccctggtgaagacacaaactgtcaccatctcagataatgccaatgctgtgaaaagtgaaatcccaaccaaagacgtccctattgtccacactgagaccaagaccatcacttatgaggctgcccagactgtaaaaggtgggatttcagagacacgtattgaaaagagaattgtgatcacaggagatgctgatattgaccatgatcaggtccttgtacaagccatcaaggaggcaaaggagcagcacccagacatgtcagtgaccaaggtggtcgtccaccaggagaccgagattgctgatgagtgagctcaggaactaacctaccccaactctgcccttctcccatccaagagaaaccagcaaaatgataaagaagctaacctgccatagtcagacttcagactttcaagattattctaaatcaccagaaaattaatttcagtttctattgggagtttataccaagagattcttctagatctcattgatccttttgaagagctttttctatattaggatatcagaattgttcaacttttcactctatagactgttttaagagttttggggtttttttaattgggtggtttgtaaccccttcagcctag

SEQ ID NO: 130545 - DNA, 4707 bp, Homo sapiens
  Payload ID: 5532
  Gene Symbol: EPB41L4A
  Gene Name: erythrocyte membrane protein band 4.1 like 4A
  Uniprot ID: Q9HCS5
  ENST ID: ENST00000261486
  CDS Start-End: 278-2338
cgcaggatgcgcggggacgcgccaccgccctccgcgcccagttccgccggcgcttccccggcggctcccgggcgctgactctcccgggcttttccgcctttctcgctcccgccccgccgggcggttcggcggccggtccccggaccccgccgggagctgctcgtctcaccctcgccacggcgcggacaataaattaatgcatcgcgcttgagtggagggggcggctgggcgcctcggtggtagctttctctcctggctggagacgaccacaaccgacatgggctgtttctgcgctgttccggaagaattttactgcgaagttttgctcctggatgaatccaagttaacccttaccacccagcagcagggcatcaagaagtcaacgaaaggttccgttgtccttgaccacgtattccatcacgtaaaccttgtggagatagattattttgggctacgttactgtgacagaagccatcagacgtattggctggatcctgcaaaaacccttgctgaacacaaagaactgatcaacactggacctccatatactttgtattttggtattaaattctatgctgaagatccatgtaaacttaaagaagaaataaccagatatcagtttttcttgcaggtgaagcaagatgtccttcagggccgtctgccctgtcccgtcaacactgctgctcagctgggagcgtatgccatccagtcggagcttggagattatgacccatataaacatactgcaggatatgtatctgagtaccggtttgttcctgatcagaaggaagaacttgaagaagccatagaaaggattcataaaactctaatgggtcagattccttctgaggctgagctgaattacttgaggactgccaaatccctggagatgtatggcgttgacctccatcccgtctatggagaaaacaagtctgagtatttcttaggattaactccggttggtgttgttgtgtacaagaataaaaagcaagtggggaagtatttctggcctcggattacaaaggttcacttcaaggagactcaatttgaactcagagtactgggaaaagattgtaacgaaacctcattcttttttgaagctcggagtaaaactgcttgcaagcacctctggaagtgcagtgtggaacatcatacattttttagaatgccagaaaatgaatccaattcactgtcaagaaaactcagcaagtttggatccatacgttataagcaccgctacagtggcaggacagctttgcaaatgagccgagatctttctattcagcttccccggcctgatcagaatgtgacaagaagtcgaagcaagacttaccctaagcgaatagcacaaacacagccagctgaatcaaacagcatcagtaggataactgcaaacatggaaaatggagaaaatgaaggaacaattaaaattattgcaccttcaccagtaaaaagctttaagaaagcaaagaatgaaaatagccctgatacccaaagaagcaaatctcatgcaccgtgggaagaaaatggcccccagagtggactctacaattctcccagtgatcgcactaagtcgccaaagttcccttacacgcgtcgccgaaacccctcctgtggaagtgacaatgattctgtacagcctgtgaggaggaggaaagcccataacagtggtgaagattcagatcttaagcaaaggaggaggtcacgttcacgctgtaacaccagcagtggtagtgaatcagaaaattctaatagagaataccggaaaaagagaaacagaatacggcaggagaatgatatggttgattcagcgcctcagtgggaagctgtattaaggagacaaaaggaaaaaaaccaagccgaccccaacaacaggcgatccagacacagatctcgttcgagaagccccgatatccaagcaaaagaagagttatggaagcacattcaaaaagaacttgtggatccatccggattgtccgaagaacaattaaaagagattccatacactaaaatagagacacaaggtgacccaatccgcatcaggcattctcattcgccacgaagttaccgccagtatcgcaggtcccagtgttcagatggggagcgatcagttctctcggaagtgaattcaaaaacagatcttgtaccaccacttccggtgacccgttcttcggatgctcagggttctggggatgctacagttcatcagagaagaaatgggtctaaagatagcctgatggaagaaaaacctcagacatctacaaacaacctggctggaaaacacacagcaaaaacaataaaaactatacaagcttcccgcctcaagacagagacttgatcctgatgaagggtcaagggtaggggtgggaaggttgtgtgcgccactggtacttttgaaactgtgaaataggtatcttaattcaaatctcagacctgcaagtatttcttcagcatgagaaaatacattatcttttgcttctttttttttttttttttgagatgttatcactctgtcgcccaggctggagtgcagcggcaccgtgtcagctcaccgcagcctccacttactgggttaagcgattctcctgtctcaggctcccgagcagctgggattacaggcgtgcaccacaacacccggctaattctttttgtatttttagtagagacagggctttgccatgttggaggctggtctcgaactcctgacctcaagtgatccgcctgcctcagcctcccaaagtgctgggattataggccatggtttaactacagcacagttgtgctgaaggacctttttgttttaactggaagaataagtattttgtaaaaattcacttgataccacattttcatttctggaacaggatagcaatcattcatttctatcttgtgtctgtgtccaccacaaccaagaccagatgcatctgatgaacattctggaattctgaactgcagctagcctgctgtgcaatagtacaagtgggaggacgtcttcccagggctgggctggttctcaactagtgcccagatgcaaaaggactgaggcatcactttcagactgcatatatttttattcatataaagttctttataatactttattttgtggtgttaagttccaccagttatttacaaatgatgtaaaaagctttaagtgttgttaatttctaaagtgttcttgcgttttcagaagtgtaagtggatctcagttgatctgtcaccccaaacctcaaatgatccatccaccctgcttggccatctaattcacctgctctccccagtgactattttgtacctttcctctccatagatgactttgcaatctacagggaaaatacttatgcaggacatcttatatctcccccttaccacgtacagttctctccacagctgccagcagccctaacctttttgtctctccacctgtgctttggatgctcttctcccagccttttcaggatctttgtctgtcctcctatattaatgtattcaattattctctcagctagatccttgctacttggttttaaatttaagactaagattaaacaaaactatctttcacaaccacaaaccccctcccgccaagcaactaagattttcctctcattctcagccagttttcttgcaagcagtatctttagtcattgccctcaattcatctaatccctatcttaagctatctctaacatggatctttccctctactccactaatatcaatcactgtgttacttaatcccagggagaatttttaggacattcttttgcttctttaatataatcctattttgctcctaccactgaccatcctttctggcttatcatgctttaccttgccattaattagtggagtttctcaaacttcagaccctaggccctcttcctctaccaccagcagatctcatttatacccatggccttaaggtttatttctgtagtttagactactgagtaatgtgctactgcaaaaagaccatttgggtttctcaaaggtaatttaaaaattcagctgtttaaatgctgctccccagctgaatctagggtcattatgctcatcagtgtgcaagctggacacctagcagttatggacacctccactattaccacgtctagttggctctgtcatccaactataaacgatcttatttcactaattttactagtccaagctggtctcttgtctagacaacaataagcaacctagttcaactaccttttcttgcaaatctgattttccaccatggatttatcttgctttaataaagccagagggagcctgaagtggtctggcttctttacctacctcttcagcctcattttgtaacactctcacctcccataatagccatcttacaagcctcagtaaggactcagttctaaaacagggcactgaagagggaaagcagccaaaactgtctcaaaagtaagtggactaacggtatcttttttctagcccaagcctctgtatatgtcattcccccagttttgccttgtgaaaaatatgacacatacctttagtctcaactctttctcaggtttccctaagaaaatcctatcacggaactcatctcatagtgaagttttacatttgtgatgacattccctccacttatctatgtttccaaagggaagaactgtgttgtgctcatcatcgtgttctcagctcctagtacagtgctttcaataaattttttgaatacctcta

SEQ ID NO: 130546 - DNA, 4707 bp, Homo sapiens
  Payload ID: 5532
  Gene Symbol: EPB41L4A
  Gene Name: erythrocyte membrane protein band 4.1 like 4A
  Uniprot ID: Q9HCS5
  ENST ID: ENST00000621003
  CDS Start-End: 275-2335
aggatgcgcggggacgcgccaccgccctccgcgcccagttccgccggcgcttccccggcggctcccgggcgctgactctcccgggcttttccgcctttctcgctcccgccccgccgggcggttcggcggccggtccccggaccccgccgggagctgctcgtctcaccctcgccacggcgcggacaataaattaatgcatcgcgcttgagtggagggggcggctgggcgcctcggtggtagctttctctcctggctggagacgaccacaaccgacatgggctgtttctgcgctgttccggaagaattttactgcgaagttttgctcctggatgaatccaagttaacccttaccacccagcagcagggcatcaagaagtcaacgaaaggttccgttgtccttgaccacgtattccatcacgtaaaccttgtggagatagattattttgggctacgttactgtgacagaagccatcagacgtattggctggatcctgcaaaaacccttgctgaacacaaagaactgatcaacactggacctccatatactttgtattttggtattaaattctatgctgaagatccatgtaaacttaaagaagaaataaccagatatcagtttttcttgcaggtgaagcaagatgtccttcagggccgtctgccctgtcccgtcaacactgctgctcagctgggagcgtatgccatccagtcggagcttggagattatgacccatataaacatactgcaggatatgtatctgagtaccggtttgttcctgatcagaaggaagaacttgaagaagccatagaaaggattcataaaactctaatgggtcagattccttctgaggctgagctgaattacttgaggactgccaaatccctggagatgtatggcgttgacctccatcccgtctatggagaaaacaagtctgagtatttcttaggattaactccggttggtgttgttgtgtacaagaataaaaagcaagtggggaagtatttctggcctcggattacaaaggttcacttcaaggagactcaatttgaactcagagtactgggaaaagattgtaacgaaacctcattcttttttgaagctcggagtaaaactgcttgcaagcacctctggaagtgcagtgtggaacatcatacattttttagaatgccagaaaatgaatccaattcactgtcaagaaaactcagcaagtttggatccatacgttataagcaccgctacagtggcaggacagctttgcaaatgagccgagatctttctattcagcttccccggcctgatcagaatgtgacaagaagtcgaagcaagacttaccctaagcgaatagcacaaacacagccagctgaatcaaacagcatcagtaggataactgcaaacatggaaaatggagaaaatgaaggaacaattaaaattattgcaccttcaccagtaaaaagctttaagaaagcaaagaatgaaaatagccctgatacccaaagaagcaaatctcatgcaccgtgggaagaaaatggcccccagagtggactctacaattctcccagtgatcgcactaagtcgccaaagttcccttacacgcgtcgccgaaacccctcctgtggaagtgacaatgattctgtacagcctgtgaggaggaggaaagcccataacagtggtgaagattcagatcttaagcaaaggaggaggtcacgttcacgctgtaacaccagcagtggtagtgaatcagaaaattctaatagagaataccggaaaaagagaaacagaatacggcaggagaatgatatggttgattcagcgcctcagtgggaagctgtattaaggagacaaaaggaaaaaaaccaagccgaccccaacaacaggcgatccagacacagatctcgttcgagaagccccgatatccaagcaaaagaagagttatggaagcacattcaaaaagaacttgtggatccatccggattgtccgaagaacaattaaaagagattccatacactaaaatagagacacaaggtgacccaatccgcatcaggcattctcattcgccacgaagttaccgccagtatcgcaggtcccagtgttcagatggggagcgatcagttctctcggaagtgaattcaaaaacagatcttgtaccaccacttccggtgacccgttcttcggatgctcagggttctggggatgctacagttcatcagagaagaaatgggtctaaagatagcctgatggaagaaaaacctcagacatctacaaacaacctggctggaaaacacacagcaaaaacaataaaaactatacaagcttcccgcctcaagacagagacttgatcctgatgaagggtcaagggtaggggtgggaaggttgtgtgcgccactggtacttttgaaactgtgaaataggtatcttaattcaaatctcagacctgcaagtatttcttcagcatgagaaaatacattatcttttgcttctttttttttttttttttgagatgttatcactctgtcgcccaggctggagtgcagcggcaccgtgtcagctcaccgcagcctccacttactgggttaagcgattctcctgtctcaggctcccgagcagctgggattacaggcgtgcaccacaacacccggctaattctttttgtatttttagtagagacagggctttgccatgttggaggctggtctcgaactcctgacctcaagtgatccgcctgcctcagcctcccaaagtgctgggattataggccatggtttaactacagcacagttgtgctgaaggacctttttgttttaactggaagaataagtattttgtaaaaattcacttgataccacattttcatttctggaacaggatagcaatcattcatttctatcttgtgtctgtgtccaccacaaccaagaccagatgcatctgatgaacattctggaattctgaactgcagctagcctgctgtgcaatagtacaagtgggaggacgtcttcccagggctgggctggttctcaactagtgcccagatgcaaaaggactgaggcatcactttcagactgcatatatttttattcatataaagttctttataatactttattttgtggtgttaagttccaccagttatttacaaatgatgtaaaaagctttaagtgttgttaatttctaaagtgttcttgcgttttcagaagtgtaagtggatctcagttgatctgtcaccccaaacctcaaatgatccatccaccctgcttggccatctaattcacctgctctccccagtgactattttgtacctttcctctccatagatgactttgcaatctacagggaaaatacttatgcaggacatcttatatctcccccttaccacgtacagttctctccacagctgccagcagccctaacctttttgtctctccacctgtgctttggatgctcttctcccagccttttcaggatctttgtctgtcctcctatattaatgtattcaattattctctcagctagatccttgctacttggttttaaatttaagactaagattaaacaaaactatctttcacaaccacaaaccccctcccgccaagcaactaagattttcctctcattctcagccagttttcttgcaagcagtatctttagtcattgccctcaattcatctaatccctatcttaagctatctctaacatggatctttccctctactccactaatatcaatcactgtgttacttaatcccagggagaatttttaggacattcttttgcttctttaatataatcctattttgctcctaccactgaccatcctttctggcttatcatgctttaccttgccattaattagtggagtttctcaaacttcagaccctaggccctcttcctctaccaccagcagatctcatttatacccatggccttaaggtttatttctgtagtttagactactgagtaatgtgctactgcaaaaagaccatttgggtttctcaaaggtaatttaaaaattcagctgtttaaatgctgctccccagctgaatctagggtcattatgctcatcagtgtgcaagctggacacctagcagttatggacacctccactattaccacgtctagttggctctgtcatccaactataaacgatcttatttcactaattttactagtccaagctggtctcttgtctagacaacaataagcaacctagttcaactaccttttcttgcaaatctgattttccaccatggatttatcttgctttaataaagccagagggagcctgaagtggtctggcttctttacctacctcttcagcctcattttgtaacactctcacctcccataatagccatcttacaagcctcagtaaggactcagttctaaaacagggcactgaagagggaaagcagccaaaactgtctcaaaagtaagtggactaacggtatcttttttctagcccaagcctctgtatatgtcattcccccagttttgccttgtgaaaaatatgacacatacctttagtctcaactctttctcaggtttccctaagaaaatcctatcacggaactcatctcatagtgaagttttacatttgtgatgacattccctccacttatctatgtttccaaagggaagaactgtgttgtgctcatcatcgtgttctcagctcctagtacagtgctttcaataaattttttgaatacctctatac

SEQ ID NO: 130547 - DNA, 4006 bp, Homo sapiens
  Payload ID: 5533
  Gene Symbol: EPB41L4B
  Gene Name: erythrocyte membrane protein band 4.1 like 4B
  Uniprot ID: Q9H329
  ENST ID: ENST00000374557
  CDS Start-End: 519-2075
ggaaaaggcgccttgggagcgggcgctcggcggggcctcctcgggccccgggcgcggcgcggcgagtgggagcgagcgcgccaggaccacgcaggcgccctgctccggctggccctcggccggcgcgcggcgcgggagcagcccgcagcccgcctcccgcgcccccggcagccccctggcagcccgcagccgcccgtccggagcagcccctcggcagcccgcgcaggccgccggcccgggagagcgcgcggcggcggcggcggcgggacggccccgagcgcgccctcccgcctgcggccactcgcagccggcgctggccgggccggcgcgccccgcaggcggctagagcgcggcctcggcctcggcgcgggcttgccccgggccgtagcccgcgagaggcggcgcgggcggccgagggcactgacggcgtcgcgggacgctcccgggcggcggcgcagcggcagcggcagcggcagcggcagcgcagggggcggaggcagggggcgcccccagccaggatgctgcggttcctgcgccggacctttggccgccgctccatgcagcgctacgcgcggggcgcggcggggcgcggggccgccgggctgggggacgagcgcgatggggggccacgggggggcccggccgccgccgcctcctcctcggcgctgcccgccgcgcccgggggcagcgtgttcccggcgggcggcgggcccctgctcaccggcggcgcggccgtgcacatctccgccgccggcgccgccaaggccaccctctactgccgcgtcttcctgctcgacgggaccgaagtgagcgtggacctgccgaaacatgccaaaggccaggatttgtttgatcagattgtgtaccacttggaccttgtggaaacagattactttggcctccagttcctcgactctgcccaggttgcgcactggctggatcatgccaaacccataaaaaagcagatgaaaattggacctgcttatgctttacactttcgagttaaatactattcttcagaaccaaacaaccttcgtgaggagtttacaaggtacctgtttgttttacaactcaggcatgacattctttctggaaaattgaaatgcccttatgaaacagctgtggaattagctgctctctgtctacaagcggagcttggggagtgcgagcttccagaacacacaccagagcttgtgtctgagtttcggttcattccaaatcagacagaagcaatggaatttgatatcttccagagatggaaagagtgcaggggaaagagccctgcccaggcggaactctcctatctgaataaagcgaagtggctggaaatgtatggggtagacatgcacgttgtcaggggaagagatggctgtgaatattctcttggactgaccccgacaggcatattaatctttgaaggagctaacaaaataggcttattcttttggcctaaaattaccaaaatggattttaaaaagagcaaattgacactcgtggtggtcgaggatgatgatcagggacgtgagcaagagcacacgtttgtgttccggttagacagtgccaggacctgcaaacacctttggaagtgtgcagttgagcaccacgcattcttccgactgcggacgccaggaaacagcaaatccaatagatccgactttatcaggctgggctctcgcttcagattcagtgggcggacagaatatcaagctacacatggctccaggttacgaagaaccagcacctttgagaggaagcctagtaaacgttatccatcccggagacattcaacgttcaaagcaagcaacccagtgatagcagcccagctctgctctaaaacaaatccagaagtccataattaccagcctcaatatcatcctaatatccatcccagccagccccggtggcatcctcactctccaaatgtcaggccatcctttcaggatgacaggtcgcattggaaagcatcggccagtggagatgacagccattttgattatgtccacgaccagaaccagaagaacttaggagggatgcaaagtatgatgtatcgagataaactcatgactgcactttgagagactgaagcatctctcttccattcaccttcatagtttcattgcattccatgaaaagtgtcttggcctcagatggatggatgtgtttggacgagtgtctttaaggagtagtcctgaaaggtgtttttggtgtccatgtaaatatttgaagataaaaccactatagcttgtcataatttactgttgactgcattctcattaaaatgaaggtaaaggctcaggaatcatattgatgttctgattttaaaattggagtcaaagtctatgtttatcattttactatgttcctgatgttctttgttatttaattaatgggagcaaataaaaccagaagagcttgggaagattgctcagcatatattcctgtcgtagaagttgagattgctagggtccagtttccctagtgtggcctggacgagtcatttccccttcattgacctcattttccccatctgaaaagagagggttggactaagtgatctccaaggtcctttccaactctaaaattctgcaatttgttaacatttcattttgtttaggttgaggacatacattcaaactaattttatcacaaggaaaactgcaatacccacttccttgacagagttactcctttcagaagctaaataaagtatataacttattagatgttatatagatacagggggactttgaatttcacatcttaaagcagttgagctactttgaatttaagcagtcgtactaatcttaaattgcatagcatttgttttgatcgaatttgctgctcaagtatgggaataatttttaatgtcttaatgattggtgctgctaacttgcgtgatttcagaagacataattgtgaatacacactgtcagaattgggggattggtttttaccctagacttcactcttaaaaagcaacgtgcaatcaagatcatttatggctcaaatgaaagcatataaggttttcttgaagttgtgccaaagcattctgtagagtaggatgagatggttgttgccctagtctgttggtagaaccagaaatcaatatgttgtcttttaggttaaagcttgtaccaaaatatttatttcccccatttcaagccctgagtcaaacatttttttctcttaataatagacctgaaatgttttattagtatttctgtgaaatcagttgattcttgtgccatttttgtatatgtaattgtaattttgcccatgttaggccctctaaaaaatgtttgacatcctttgagatattttattactaaaatctgatcttttttggctactgcaaaaatctattcagcaagaaggtatcagctgcataccttgcacagtggagctgactacctataaactctccctaaggcatttgtttacaggtgtattccattttagcagacgttctgatgctcagtgtatgtgctgcatacaaataaatgtgttctgaatcttttcatcttattgatagcatttttacaaatgtgtttccaaggaataaagattattcttgctttttttttgactccatcttcattttttttaaattgattcttgttgctatgcagaagtctcatttgtgaatgaccttggtaacagaacagttggcttttggaagtctgaaggtgagcattcagttaggtgggtggagcaagatcatcctagaatgaggctgctcttggcaagagtggatcttataggcacagcagctgatgcctttcttcatctggggcaactctggtgaaggttgtcctgcctgtcacaggtgctgagtagagagaagtggtggcagtgggatttcctcagtaatagtcctgtaaaggtacgtgtttgtcctggctacttgtgctcttcctggcaggaaggcatccaaacccttatctgtgggctcctggaaattgtgtatgccatataataccctctaataaatacctctctgcttaaa

SEQ ID NO: 130548 - DNA, 5800 bp, Homo sapiens
  Payload ID: 5533
  Gene Symbol: EPB41L4B
  Gene Name: erythrocyte membrane protein band 4.1 like 4B
  Uniprot ID: Q9H329
  ENST ID: ENST00000374566
  CDS Start-End: 519-3221
ggaaaaggcgccttgggagcgggcgctcggcggggcctcctcgggccccgggcgcggcgcggcgagtgggagcgagcgcgccaggaccacgcaggcgccctgctccggctggccctcggccggcgcgcggcgcgggagcagcccgcagcccgcctcccgcgcccccggcagccccctggcagcccgcagccgcccgtccggagcagcccctcggcagcccgcgcaggccgccggcccgggagagcgcgcggcggcggcggcggcgggacggccccgagcgcgccctcccgcctgcggccactcgcagccggcgctggccgggccggcgcgccccgcaggcggctagagcgcggcctcggcctcggcgcgggcttgccccgggccgtagcccgcgagaggcggcgcgggcggccgagggcactgacggcgtcgcgggacgctcccgggcggcggcgcagcggcagcggcagcggcagcggcagcgcagggggcggaggcagggggcgcccccagccaggatgctgcggttcctgcgccggacctttggccgccgctccatgcagcgctacgcgcggggcgcggcggggcgcggggccgccgggctgggggacgagcgcgatggggggccacgggggggcccggccgccgccgcctcctcctcggcgctgcccgccgcgcccgggggcagcgtgttcccggcgggcggcgggcccctgctcaccggcggcgcggccgtgcacatctccgccgccggcgccgccaaggccaccctctactgccgcgtcttcctgctcgacgggaccgaagtgagcgtggacctgccgaaacatgccaaaggccaggatttgtttgatcagattgtgtaccacttggaccttgtggaaacagattactttggcctccagttcctcgactctgcccaggttgcgcactggctggatcatgccaaacccataaaaaagcagatgaaaattggacctgcttatgctttacactttcgagttaaatactattcttcagaaccaaacaaccttcgtgaggagtttacaaggtacctgtttgttttacaactcaggcatgacattctttctggaaaattgaaatgcccttatgaaacagctgtggaattagctgctctctgtctacaagcggagcttggggagtgcgagcttccagaacacacaccagagcttgtgtctgagtttcggttcattccaaatcagacagaagcaatggaatttgatatcttccagagatggaaagagtgcaggggaaagagccctgcccaggcggaactctcctatctgaataaagcgaagtggctggaaatgtatggggtagacatgcacgttgtcaggggaagagatggctgtgaatattctcttggactgaccccgacaggcatattaatctttgaaggagctaacaaaataggcttattcttttggcctaaaattaccaaaatggattttaaaaagagcaaattgacactcgtggtggtcgaggatgatgatcagggacgtgagcaagagcacacgtttgtgttccggttagacagtgccaggacctgcaaacacctttggaagtgtgcagttgagcaccacgcattcttccgactgcggacgccaggaaacagcaaatccaatagatccgactttatcaggctgggctctcgcttcagattcagtgggcggacagaatatcaagctacacatggctccaggttacgaagaaccagcacctttgagaggaagcctagtaaacgttatccatcccggagacattcaacgttcaaagcaagcaacccagtgatagcagcccagctctgctctaaaacaaatccagaagtccataattaccagcctcaatatcatcctaatatccatcccagccagccccggtggcatcctcactctccaaatgtcagctacccgctcccttccccagtgcttagcagctcggaccggttgccttttggcattgaggagaatgggggcacaccgttcctcaccgcagcttcaggaaggcatcaccaccagcaccagcatcagcatcagcaccagcaccactcaaactacagcctctcactgaccctggagaacaaagaggggcctctgaggtccccaaactccagcagcaagtcccttacaaaactgagtccaggaacacctgccttgttcagtgaagccgctgcccatctaaagaagctggaactggaaactgtgaaggctgctggaccctggcctcctctgcacatcaacataaacaaggctgaagaaaagaaagtctcggagaaaactcttcagactccacttttgccttcccctgttgcggatcatgtgaagtgtaacattctgaaagcccagttggaaaatgcttcccgagtgaacatccagggtggaaaggaggaatcaccgtttgtaaatatcaataagaaatccagtcttcaggacgctagtgtaagaagtcctattcctattcgtgtggaaactgcccagccagctgtggaaaagccggaaatcaagcctccccgagtgaggaagttaacaagacagtatagttttgatgaagacgacctccctccagacctggccgaggcagtgggagtgaccacatctacaaccacaaacaccacaacggccgccacacaagtctccgtgccgctgccgtcccccaaggtccagaatgtcagctcgcctcacaagtcagaaggcaaaggcctgctgtcccctggggccaagagcccctctgaccgaggaggtgcctttaccctggagccgggtgatcttctgatggatttcacagaagccactcctctggcagagcccgccagcaacccccactgtgcccactctcgctgttctcctccactctctctccccatgaaggaagagaccactggagtttgcatgtaccctccaatcaaaacgaggctgataaaaacattcccggttgatacaatgaacccgtttcctgatactttcaccacagggccacagtttactgcagacttcagagacagtaaattacagtgctgtcctggcccgacttccccgctgatcccagcagcgaccctgaggcctttgacagagaccgtctccacagtgcagaccatttacaccacccggaaacctgtttctctggcagccagtgcagagacactccggcaggaactggagagagagaagatgatgaaaagactgttgatgaccgaactgtgaaattctccccttgtcacctggaagatggcatggtgccttctgtccgtcttctttcttcgggctttgtgtgctcactctagcacagcatacaagtgtgtgctctgttcgcccaggtctccatggttagttgaagccaatttctggcttgacttttatgggaaaagttattttatgtctcctaagcattagagtttttctattactctatgtagttgagacaggatttgataagtctaggaaaagaaagatgggaaaacgggattccttttcagaagtacctgtgtgtatctgttaataaccacaggggttaatatgatgtaggatcttttactatcaatttcaaccatttgattttgtatgattgaaacttgcaccgagctttgactgtttgttaaagagtcatttttaatgaaagaataattctttattgctggtttttcatttacactgataaatacacagatcttataaagtctttaacattcatttgtattcagatgtgagtagaagaactaaaaaaagaaagttacatatcactatgactgaaggtacttcagcttaatctgaaatataatttaacttgtgaactccttggatatgatattatttggaataaacagaatttatcattgaacccaaagtaggaaatgatagcttacattgtctaaaaatccttacaaggttaagatgattcaatatcaagaagattcagaaaattatttctaaagttgatcgattcatgtcgtattgatagaatcttgaccagaagaaattttgctctttttatatagtttcaagaaatgtgtttttaaatttttattaatgcacttgaacaactttgcaggaataaagcaaccccctaaccacaaaatatccctctaaattagttccctagctttctcaatgaatacacacatatttttacatagctatgatcgttgtgtacattctcctttgttttacttctcggcctaacacttgtctcctcttgtcaacacagattctactctcaccaatttaaatgtctttatatccatgtaacatgggtaacctcacttcaccccattattagatatttgagttatatctaatttttcactcttataaatagtgctgctatgaatgtctgtaaaaaaaaaaaactgctccttcttttggattattcccttaggaatatctccaaagagggattacaaggtcaaagagcatgaagtattttatagctcttgttttatattgccagattgctttctagaaagatccaatctttgggttggaaggaccttaaaggtcatctagtttagcctccccaccccctctgaatgcttgaatcccctcgacaatttatgatgccaccagcaatgtataagcatttctgtttaccaatagctctgccagtattgggttttgccatttttatttatttttgctagtttaataggtatgtatagttgttcttgaagagttgttttatttcattaattgctagcaaggctgagcacttttccatgtgatgatttactagttgtatttccttgtgtgtaaaatgttcattcatttcttatgaccacttgttaagaggaactgatctcatatatttgtatcagaactgtatttttatgttatattgtatagtttgctctcctgcccctctccttaaaactgaatggtgccaataatttgatactaatgactacaaaaaaaggtaatgcctcatttactagtattgttgtaaaatgaggaatgtatgtgaatattcagataaccgaggattaaccctttaagtgctgaatctttaaaattttaatatatttttttttgagggaaatctttctaaaatgtattacgcacttccctgccttagtaaacagagtatactggagagtatttaaccttttcttgatgagtcatggtcatgattataaacatcagccccttttataccttggtacggtgcagtgatatcattaagagctatcaatatgtgtagggcttggcttggccttttataggatattatgctgttctcactgatggttttttactgctctctgctctgtcagtggagctatccggggcaattgtagcgtttgggtccttttacccctatgtcccccggctatacttttaaaacagctttagctgttctttatcttgtgcacatgatacaaaatatgttcccgtacaatatggggctgtcacttcttgccaacccagcaccctcttcctcttctaacctgctttctgaggcttctgctcttcacctcctgctcgctgatggaaacctccagggcaaagctgaaggtttcttggggaagccaggaaagccagtatttcctatgtgtcagatctgcttggcttccaagaagggatgcatgggctttttggccagtgtttccaggaggctctgggcttcctgcttcttccccgcttcccccagagttcacagatgttgaagtttctgaaggttgacgtcactggaagtctgaccacaaacaagttggctgttactgtatttgaaacccagtacctttggcagctcacctctaaccagtaaaataagaggattccatggtttc

SEQ ID NO: 130549 - DNA, 6628 bp, Homo sapiens
  Payload ID: 5534
  Gene Symbol: EPB41L5
  Gene Name: erythrocyte membrane protein band 4.1 like 5
  Uniprot ID: Q9HCM4
  ENST ID: ENST00000263713
  CDS Start-End: 215-2416
aagagcggagcgctccgccctgggggcggagctgggagggagctttaaggggtggacgggcgggaggtcggggtcctccggggattagagccggtgggctcgttgtgggcgccatttctcggcgtctaccgaggagccgcccctttctcagccttgctcggctcttccccgctctggtcgccggggctgcgccgtccccagctcagtgacaaaaatgctgagtttcttccgtagaacactagggcgtcggtctatgcgtaaacatgcagagaaggaacgactccgagaagcacaacgcgccgccacacatattcctgcagctggagattctaagtccatcatcacgtgtcgggtgtcccttctggatggtactgatgttagtgtggacttgccaaaaaaagccaaaggacaagagttgtttgatcagattatgtaccacctggacctgattgaaagcgactattttggtctgagatttatggattcagcacaagtagcacattggttggatggtacaaaaagcatcaaaaagcaagtaaaaattggttcaccctattgtctgcatcttcgagttaagttttattcctcagaaccaaataaccttcgtgaggagctaacccggtatttatttgttcttcagttaaaacaagatattctcagtggaaaattagactgtccctttgatacagcagtgcaattggcagcttataatctgcaagctgaacttggtgactatgatcttgctgagcatagtcctgaacttgtctcagagttcagattcgtgcctattcagactgaagagatggaactggctatttttgagaaatggaaggaatacagaggtcaaacaccagcacaggctgaaaccaattatctgaataaagccaaatggctagaaatgtatggggttgatatgcatgtggtcaaggctagagatgggaatgactatagtttgggactaacaccaacaggagtccttgtttttgaaggagataccaaaattggcttatttttttggccgaagataaccagattggattttaagaagaataaattaaccttggtggttgtagaagatgatgatcagggcaaagaacaggaacatacatttgtctttagactggatcatccaaaagcatgcaaacatttatggaaatgtgctgtggagcatcatgctttcttccgccttcgaggccccgtccaaaagagttctcatcgatcaggatttattcgactaggatcacgatttagatatagtgggaaaacagagtatcagaccacaaaaaccaataaagcaagaagatcaacatcctttgaaagaaggcccagcaaacgatattctagacgaactctacaaatgaaagcatgtgctacaaaacctgaagaacttagtgttcacaataatgtttcgacccaaagtaatggctcccaacaggcttgggggatgagatctgctctgcctgtgagtccttccatttcctctgctcctgtgccagtggagatagagaatcttccacagagtcctggaacagaccagcatgacaggaaatgcattcctctgaatattgatttgctgaatagcccagacttattggaagcaacgattggtgatgtaattggggcatctgacactatggaaacatcccaagcactgaatgacgttaatgtagccaccaggcttccgggattaggggaacctgaagttgaatatgagacattaaaagacacctcagagaagctcaaacagcttgagatggagaacagtcctttgctgtcccctcgatccaacatcgatgttaacataaacagccaggaggaagtggtgaagttgactgagaaatgccttaataatgtcattgagagcccaggattgaatgtcatgagagttcctcctgacttcaagagtaacattttgaaggctcaagtagaagcagtgcataaggttacaaaagaagatagcttattaagtcataaaaatgccaatgttcaggatgctgccacaaacagtgctgtgttaaatgagaataatgtgcccctccccaaagagtctcttgagactctgatgcttatcacacctgccgacagtggttctgttctaaaggaagctacagatgaattggatgccttgcttgcatctctaactgagaatctaattgatcacacagttgcacctcaggtgtcttccacatccatgatcacaccccggtggattgttccgcagagtggtgccatgtctaatggacttgcgggatgtgaaatgcttttgacagggaaggagggacatggtaataaagatggaatctcactgatctctcccccagcgccattcttggtagatgctgtgaccagctctggtcccattttggcagaagaagctgtcctgaagcagaagtgtttactgaccactgagctctgagggcctgtagctggaatacgcatctctccagcattccgtcctgggatccgtttcagctagaatatgttggattcaggagcttgtccattatttgtaggtaaaaaaagctgcacgtagatttgacttcaactccgtaaaaaagacagctgtattttccgtccaactggaattgttgaatcacactgcatagctgcccaaaagagagtgtttggtcttgaactttctatacttttataaatgttacaaattcccgaaagaagggaatttctttttctggggtttccttcaaactcttggctccacctagcggttctatttgttcataacaacttcataacaagcctgcctctggtagtcaacagccttttgaaagctatttccatctagtatcagggtgagagcatccttgatctggctgcctgttagagaaattgcacttttcctgacttacctagaaatcaagaatttaggaaattaatgtggacactataaaggcagacttagggccaacttttttttttttttacaattattacaacactaaagagaagtttagaatatagagagtttttaaatgtctcccattcttttgatttcttactgtactggctatcttaatatttcaagtttacatcaagataaaccctgagaagaactacggagaaatcaaataaaatcctgtcatatttttttcaccctgcctttccacaggaagcactcacaggcaccacacacgtatcatgtaacttatcagtggggtgggttactgttgaagagaccctggggcatttacctcaggcatctgcactcctccgagcccggtggagaatgcaggctgctgtagtctcaggtaatgaaggcacagcacagcagtactccacattgtttcctatttggacatagacttcatttcctttcagtataagctgaataaatttagagctttcaaactggaaaaaaaaatgaaacaaaacaaatacaccaagaccaaaataggcaataggaacaggggtgaagggatgttgtttcttaaatacctaccatgtatgaagctatacacagcatataccgaaagaacctgcattgcactaggaattctgtgttagtttaaaagagatctctaaaacttccccatccctttgggcctgtacaaagaaattctggatgttaaaataatatatactcatcacagaaaaataaagtatagcaatgtccatctgtaattctaatacccagaaataacgctatttagctttataattttcgaatgaacaaggtaaacctcggttgccatggggaagaaggatgatgtggaaaccatattggtaaagttgttaatccctcgttatggagaactgatcttaagctatacctcctggaatttgctttctagttttctgtcctgcaatatgtatataattaagcactaatttgtactgcttagcataaaagaacatccagtcttagatccttaaaacttcatggattggactttcctgggctccttataacataatcgtgtgtccaggcaaacgcacactagtgtctgactggaaagctcaggaattttaatcttgcactgtttcccagggagctgtagtgattggaacccacgtttgcacaaaacatttttgcagaaggaaagtcaacacttcttgctggctgcctccccttagccattatgctaaaaacagcttctgagtttcactggtggggctcttgccagttcttaattataggacatattttctcaaagctgaaggtgacacctagaaccaggggcttgacccaggacatgatggaatgagcatcaaattttcagtgtcttggcaaccgtagatgtcctacagggttaccgttgtgctgctcaccacagagcagctgaggcattatgccttggaagacctaaatctcccatccagttcaggaggtgacaacatccttattttaaacttcctaaaattaggaattaggtagttggacatagtctgtgacctttatgtcgttggatacctgtattcttgacagttagaatattggtagggactttgttaaaattcacttgaatttcaagctcagaggaaactttgtctcatgccctgacatgaagtggcaaacacggaagttcatacttgaatgctgaattggccccgacagattaaatgcgtgttggggattggtttcctgtcatagctgctgctgctgccatgcgcagagctgctgtaacagctcttcctgttctgctcccctgagaacagtgtggtggggagaggcagggctgaggtggtctacgaatgtggcaggtagggaaggggagatgtctgtctcttgagaagagagaggcatgtgtgccggcatccttgatgggttcaaagagaaaggttggagatgatagtgggtgagaagcaggctggtgagactgggctgaggttggagaaggggcagccgggggcactgctgagggtttgccgtgcacgcctcggacggagcacggtggggtggcggggagcagatagtgctgcctccctgcgggcagacaggagaggaacctcaactcagtccatttcatagccctgataggggaagtgggagttgacaggatggtttaaaataagacgtgaaggtttcagttacctgctctagactttgcctgagaacttgtaaattaatcagtgagacctaatttgtgacatgtcagtagcatcatcttttgacacacaggaggtcatggtcatttcattcctactcttcaggagacactgctgaacagaggaatgattctgttccttgtgtgcttacttccttaacatttatacattgttttaagaaaaaacttttaaaaatatttcttatagtctcctaacatttgtctctagcctttgcctttgtacaatcacagatatcctatggagatttaaggatgaaagccctgagttgttcttgggttcttggatctggactacttgttatcttatgcttctcacttctggctaaaacttgcacctcttcttctcttagctaagccccaaaatgaagatttccttcagaagtcttgttagcagaattatttatcagtcacagagagaaaaatctgctatttttctaagtaagagtctcgagaagcagagtttttgtcttgtcattgagaggagtcagcagtcttgttctgtaaaggaccagagatggtaaatactgtcccactcagctctgctggcgcagtacagcagcagcagccccagcacagctgtgttcctgcggagtcccctttacaaagccgctgacccctgatgtgaaactttgtagagcagcagagtggctgcgtgaaacgggaggctggcaggtcctcagataggttctgcagtgttacctgtcacttggaggcagccaacacttctggacattgcatccttattcacacatgtggcagctgaacgaggtgctgttgtgggtgtctcagctctgagggtctttgtgagctcccactgttgtgggtgtctcagctctgagggtctttgtgagctcccactgttgtgggtgtctcagctctgagggtctttgtgagttcccaccaacttttaattattcatgcccttgaccatgtggttgcttggagacctggggtcttctgcagactgaagaagacacatttctagattatttgtcctttttatcctctcaaaaatttaaacactgtacctcttcagtggtcagaagaaagttggaaacttttcctacatattaggcgttagtatgaggacatttgtttgaattatagaaatttgccctgagctgaactgggttgtgttaacacattggtagagctatgattccttcccagttctaagagatacgatctgtaagtccctatgtcaccacattgcttgagatgatcattcagttacttgtcaggatttctcctcttcagagagatttttttttatagcacagattcctttgccccttttatctccttatctggatatgataagtggttatgagggtctcactaactattttgtgtttaccttttatatgtgtaaaactttgcagtagcatttaaagtgtaatttatttttctatcaagtgcactattcatttagtgtgttccagttttatatgacttgtattagaaacactgcactgagttgtttgtacactgaaatgagaactctagatgtaactctattcaaataaaccttcgtgagacattca

SEQ ID NO: 130550 - DNA, 1777 bp, Homo sapiens
  Payload ID: 5534
  Gene Symbol: EPB41L5
  Gene Name:: erythrocyte membrane protein band 4.1 like 5
  Uniprot ID: Q9HCM4
  ENST ID: ENST00000331393
  CDS Start-End: 101-1618
tttctcggcgtctaccgaggagccgcccctttctcagccttgctcggctcttccccgctctggtcgccggggctgcgccgtccccagctcagtgacaaaaatgctgagtttcttccgtagaacactagggcgtcggtctatgcgtaaacatgcagagaaggaacgactccgagaagcacaacgcgccgccacacatattcctgcagctggagattctaagtccatcatcacgtgtcgggtgtcccttctggatggtactgatgttagtgtggacttgccaaaaaaagccaaaggacaagagttgtttgatcagattatgtaccacctggacctgattgaaagcgactattttggtctgagatttatggattcagcacaagtagcacattggttggatggtacaaaaagcatcaaaaagcaagtaaaaattggttcaccctattgtctgcatcttcgagttaagttttattcctcagaaccaaataaccttcgtgaggagctaacccggtatttatttgttcttcagttaaaacaagatattctcagtggaaaattagactgtccctttgatacagcagtgcaattggcagcttataatctgcaagctgaacttggtgactatgatcttgctgagcatagtcctgaacttgtctcagagttcagattcgtgcctattcagactgaagagatggaactggctatttttgagaaatggaaggaatacagaggtcaaacaccagcacaggctgaaaccaattatctgaataaagccaaatggctagaaatgtatggggttgatatgcatgtggtcaaggctagagatgggaatgactatagtttgggactaacaccaacaggagtccttgtttttgaaggagataccaaaattggcttatttttttggccgaagataaccagattggattttaagaagaataaattaaccttggtggttgtagaagatgatgatcagggcaaagaacaggaacatacatttgtctttagactggatcatccaaaagcatgcaaacatttatggaaatgtgctgtggagcatcatgctttcttccgccttcgaggccccgtccaaaagagttctcatcgatcaggatttattcgactaggatcacgatttagatatagtgggaaaacagagtatcagaccacaaaaaccaataaagcaagaagatcaacatcctttgaaagaaggcccagcaaacgatattctagacgaactctacaaatgaaagcatgtgctacaaaacctgaagaacttagtgttcacaataatgtttcgacccaaagtaatggctcccaacaggcttgggggatgagatctgctctgcctgtgagtccttccatttcctctgctcctgtgccagtggagatagagaatcttccacagagtcctggaacagaccagcatgacaggaaatggctctctgctgccagcgactgctgtcaacgtggtggaaaccagtggaacacaagggccttgcccccaccccagaccgcacatagaaactacactgactttgttcatgagcacaatgtgaagaatgcaggaatccgtcatgatgttcattttcctggccatacagccatgactgagatatgagtgttgagcctcttaggctttgggactctttgtcatgcaagttgatggtatacattatctggtgtttataaaggattaatcacattaggagtatttgggagaatttacagtgagtcactagttgttcagtgctgtttgtaattgaattcttccatgaaa

SEQ ID NO: 130551 - DNA, 6410 bp, Homo sapiens
  Payload ID: 5534
  Gene Symbol: EPB41L5
  Gene Name: erythrocyte membrane protein band 4.1 like 5
  Uniprot ID: Q9HCM4
  ENST ID: ENST00000452780
  CDS Start-End: 1-2199
atgctgagtttcttccgtagaacactagggcgtcggtctatgcgtaaacatgcagagaaggaacgactccgagaagcacaacgcgccgccacacatattcctgcagctggagattctaagtccatcatcacgtgtcgggtgtcccttctggatggtactgatgttagtgtggacttgccaaaaaaagccaaaggacaagagttgtttgatcagattatgtaccacctggacctgattgaaagcgactattttggtctgagatttatggattcagcacaagtagcacattggttggatggtacaaaaagcatcaaaaagcaagtaaaaattggttcaccctattgtctgcatcttcgagttaagttttattcctcagaaccaaataaccttcgtgaggagctaacccggtatttatttgttcttcagttaaaacaagatattctcagtggaaaattagactgtccctttgatacagcagtgcaattggcagcttataatctgcaagctgaacttggtgactatgatcttgctgagcatagtcctgaacttgtctcagagttcagattcgtgcctattcagactgaagagatggaactggctatttttgagaaatggaaggaatacagaggtcaaacaccagcacaggctgaaaccaattatctgaataaagccaaatggctagaaatgtatggggttgatatgcatgtggtcaaggctagagatgggaatgactatagtttgggactaacaccaacaggagtccttgtttttgaaggagataccaaaattggcttatttttttggccgaagataaccagattggattttaagaagaataaattaaccttggtggttgtagaagatgatgatcagggcaaagaacaggaacatacatttgtctttagactggatcatccaaaagcatgcaaacatttatggaaatgtgctgtggagcatcatgctttcttccgccttcgaggccccgtccaaaagagttctcatcgatcaggatttattcgactaggatcacgatttagatatagtgggaaaacagagtatcagaccacaaaaaccaataaagcaagaagatcaacatcctttgaaagaaggcccagcaaacgatattctagacgaactctacaaatgaaagcatgtgctacaaaacctgaagaacttagtgttcacaataatgtttcgacccaaagtaatggctcccaacaggcttgggggatgagatctgctctgcctgtgagtccttccatttcctctgctcctgtgccagtggagatagagaatcttccacagagtcctggaacagaccagcatgacaggaaatgcattcctctgaatattgatttgctgaatagcccagacttattggaagcaacgattggtgatgtaattggggcatctgacactatggaaacatcccaagcactgaatgacgttaatgtagccaccaggcttccgggattaggggaacctgaagttgaatatgagacattaaaagacacctcagagaagctcaaacagcttgagatggagaacagtcctttgctgtcccctcgatccaacatcgatgttaacataaacagccaggaggaagtggtgaagttgactgagaaatgccttaataatgtcattgagagcccaggattgaatgtcatgagagttcctcctgacttcaagagtaacattttgaaggctcaagtagaagcagtgcataaggttacaaaagaagatagcttattaagtcataaaaatgccaatgttcaggatgctgccacaaacagtgctgtgttaaatgagaataatgtgcccctccccaaagagtctcttgagactctgatgcttatcacacctgccgacagtggttctgttctaaaggaagctacagatgaattggatgccttgcttgcatctctaactgagaatctaattgatcacacagttgcacctcaggtgtcttccacatccatgatcacaccccggtggattgttccgagtggtgccatgtctaatggacttgcgggatgtgaaatgcttttgacagggaaggagggacatggtaataaagatggaatctcactgatctctcccccagcgccattcttggtagatgctgtgaccagctctggtcccattttggcagaagaagctgtcctgaagcagaagtgtttactgaccactgagctctgagggcctgtagctggaatacgcatctctccagcattccgtcctgggatccgtttcagctagaatatgttggattcaggagcttgtccattatttgtaggtaaaaaaagctgcacgtagatttgacttcaactccgtaaaaaagacagctgtattttccgtccaactggaattgttgaatcacactgcatagctgcccaaaagagagtgtttggtcttgaactttctatacttttataaatgttacaaattcccgaaagaagggaatttctttttctggggtttccttcaaactcttggctccacctagcggttctatttgttcataacaacttcataacaagcctgcctctggtagtcaacagccttttgaaagctatttccatctagtatcagggtgagagcatccttgatctggctgcctgttagagaaattgcacttttcctgacttacctagaaatcaagaatttaggaaattaatgtggacactataaaggcagacttagggccaacttttttttttttttacaattattacaacactaaagagaagtttagaatatagagagtttttaaatgtctcccattcttttgatttcttactgtactggctatcttaatatttcaagtttacatcaagataaaccctgagaagaactacggagaaatcaaataaaatcctgtcatatttttttcaccctgcctttccacaggaagcactcacaggcaccacacacgtatcatgtaacttatcagtggggtgggttactgttgaagagaccctggggcatttacctcaggcatctgcactcctccgagcccggtggagaatgcaggctgctgtagtctcaggtaatgaaggcacagcacagcagtactccacattgtttcctatttggacatagacttcatttcctttcagtataagctgaataaatttagagctttcaaactggaaaaaaaaatgaaacaaaacaaatacaccaagaccaaaataggcaataggaacaggggtgaagggatgttgtttcttaaatacctaccatgtatgaagctatacacagcatataccgaaagaacctgcattgcactaggaattctgtgttagtttaaaagagatctctaaaacttccccatccctttgggcctgtacaaagaaattctggatgttaaaataatatatactcatcacagaaaaataaagtatagcaatgtccatctgtaattctaatacccagaaataacgctatttagctttataattttcgaatgaacaaggtaaacctcggttgccatggggaagaaggatgatgtggaaaccatattggtaaagttgttaatccctcgttatggagaactgatcttaagctatacctcctggaatttgctttctagttttctgtcctgcaatatgtatataattaagcactaatttgtactgcttagcataaaagaacatccagtcttagatccttaaaacttcatggattggactttcctgggctccttataacataatcgtgtgtccaggcaaacgcacactagtgtctgactggaaagctcaggaattttaatcttgcactgtttcccagggagctgtagtgattggaacccacgtttgcacaaaacatttttgcagaaggaaagtcaacacttcttgctggctgcctccccttagccattatgctaaaaacagcttctgagtttcactggtggggctcttgccagttcttaattataggacatattttctcaaagctgaaggtgacacctagaaccaggggcttgacccaggacatgatggaatgagcatcaaattttcagtgtcttggcaaccgtagatgtcctacagggttaccgttgtgctgctcaccacagagcagctgaggcattatgccttggaagacctaaatctcccatccagttcaggaggtgacaacatccttattttaaacttcctaaaattaggaattaggtagttggacatagtctgtgacctttatgtcgttggatacctgtattcttgacagttagaatattggtagggactttgttaaaattcacttgaatttcaagctcagaggaaactttgtctcatgccctgacatgaagtggcaaacacggaagttcatacttgaatgctgaattggccccgacagattaaatgcgtgttggggattggtttcctgtcatagctgctgctgctgccatgcgcagagctgctgtaacagctcttcctgttctgctcccctgagaacagtgtggtggggagaggcagggctgaggtggtctacgaatgtggcaggtagggaaggggagatgtctgtctcttgagaagagagaggcatgtgtgccggcatccttgatgggttcaaagagaaaggttggagatgatagtgggtgagaagcaggctggtgagactgggctgaggttggagaaggggcagccgggggcactgctgagggtttgccgtgcacgcctcggacggagcacggtggggtggcggggagcagatagtgctgcctccctgcgggcagacaggagaggaacctcaactcagtccatttcatagccctgataggggaagtgggagttgacaggatggtttaaaataagacgtgaaggtttcagttacctgctctagactttgcctgagaacttgtaaattaatcagtgagacctaatttgtgacatgtcagtagcatcatcttttgacacacaggaggtcatggtcatttcattcctactcttcaggagacactgctgaacagaggaatgattctgttccttgtgtgcttacttccttaacatttatacattgttttaagaaaaaacttttaaaaatatttcttatagtctcctaacatttgtctctagcctttgcctttgtacaatcacagatatcctatggagatttaaggatgaaagccctgagttgttcttgggttcttggatctggactacttgttatcttatgcttctcacttctggctaaaacttgcacctcttcttctcttagctaagccccaaaatgaagatttccttcagaagtcttgttagcagaattatttatcagtcacagagagaaaaatctgctatttttctaagtaagagtctcgagaagcagagtttttgtcttgtcattgagaggagtcagcagtcttgttctgtaaaggaccagagatggtaaatactgtcccactcagctctgctggcgcagtacagcagcagcagccccagcacagctgtgttcctgcggagtcccctttacaaagccgctgacccctgatgtgaaactttgtagagcagcagagtggctgcgtgaaacgggaggctggcaggtcctcagataggttctgcagtgttacctgtcacttggaggcagccaacacttctggacattgcatccttattcacacatgtggcagctgaacgaggtgctgttgtgggtgtctcagctctgagggtctttgtgagctcccactgttgtgggtgtctcagctctgagggtctttgtgagctcccactgttgtgggtgtctcagctctgagggtctttgtgagttcccaccaacttttaattattcatgcccttgaccatgtggttgcttggagacctggggtcttctgcagactgaagaagacacatttctagattatttgtcctttttatcctctcaaaaatttaaacactgtacctcttcagtggtcagaagaaagttggaaacttttcctacatattaggcgttagtatgaggacatttgtttgaattatagaaatttgccctgagctgaactgggttgtgttaacacattggtagagctatgattccttcccagttctaagagatacgatctgtaagtccctatgtcaccacattgcttgagatgatcattcagttacttgtcaggatttctcctcttcagagagatttttttttatagcacagattcctttgccccttttatctccttatctggatatgataagtggttatgagggtctcactaactattttgtgtttaccttttatatgtgtaaaactttgcagtagcatttaaagtgtaatttatttttctatcaagtgcactattcatttagtgtgttccagttttatatgacttgtattagaaacactgcactgagttgtttgtacactgaaatgagaactctagatgtaactctattcaaataaaccttcgtgagacattc

SEQ ID NO: 130552 - DNA, 2872 bp, Homo sapiens
  Payload ID: 5534
  Gene Symbol: EPB41L5
  Gene Name: erythrocyte membrane protein band 4.1 like 5
  Uniprot ID: Q9HCM4
  ENST ID: ENST00000443124
  CDS Start-End: 480-1997
gtaagcgcgaggcccggcggcggcgccgcagtacagtccgctgcgctcctagccgagtggacccttcctcgcccgcgcctgcggtagcggccttgtccccggggaggcgggcgggggccgcacccagaccctagggcggccggcccctctctcgtcgggccggcagggcattaatcccgccggagggaggggcggcggcggccaatgaggcagggccgccgagtttcggtcgataccgcgcgacgggccggggcggagggcccggggcagccgggttaatgtttgccgagcggacgcgctccccgagccgcgggtacccctcgctggtccgctgggctgccgtccagcgggagagacaaaagtcgcaagggaaggggaaaaacgaactgagtttgtgtcactgtcttggtggacttttcgagctaacctgtatttgagaaaaacttcagtctcttgggaaaggagaggcagtgacaaaaatgctgagtttcttccgtagaacactagggcgtcggtctatgcgtaaacatgcagagaaggaacgactccgagaagcacaacgcgccgccacacatattcctgcagctggagattctaagtccatcatcacgtgtcgggtgtcccttctggatggtactgatgttagtgtggacttgccaaaaaaagccaaaggacaagagttgtttgatcagattatgtaccacctggacctgattgaaagcgactattttggtctgagatttatggattcagcacaagtagcacattggttggatggtacaaaaagcatcaaaaagcaagtaaaaattggttcaccctattgtctgcatcttcgagttaagttttattcctcagaaccaaataaccttcgtgaggagctaacccggtatttatttgttcttcagttaaaacaagatattctcagtggaaaattagactgtccctttgatacagcagtgcaattggcagcttataatctgcaagctgaacttggtgactatgatcttgctgagcatagtcctgaacttgtctcagagttcagattcgtgcctattcagactgaagagatggaactggctatttttgagaaatggaaggaatacagaggtcaaacaccagcacaggctgaaaccaattatctgaataaagccaaatggctagaaatgtatggggttgatatgcatgtggtcaaggctagagatgggaatgactatagtttgggactaacaccaacaggagtccttgtttttgaaggagataccaaaattggcttatttttttggccgaagataaccagattggattttaagaagaataaattaaccttggtggttgtagaagatgatgatcagggcaaagaacaggaacatacatttgtctttagactggatcatccaaaagcatgcaaacatttatggaaatgtgctgtggagcatcatgctttcttccgccttcgaggccccgtccaaaagagttctcatcgatcaggatttattcgactaggatcacgatttagatatagtgggaaaacagagtatcagaccacaaaaaccaataaagcaagaagatcaacatcctttgaaagaaggcccagcaaacgatattctagacgaactctacaaatgaaagcatgtgctacaaaacctgaagaacttagtgttcacaataatgtttcgacccaaagtaatggctcccaacaggcttgggggatgagatctgctctgcctgtgagtccttccatttcctctgctcctgtgccagtggagatagagaatcttccacagagtcctggaacagaccagcatgacaggaaatggctctctgctgccagcgactgctgtcaacgtggtggaaaccagtggaacacaagggccttgcccccaccccagaccgcacatagaaactacactgactttgttcatgagcacaatgtgaagaatgcaggaatccgtcatgatgttcattttcctggccatacagccatgactgagatatgagtgttgagcctcttaggctttgggactctttgtcatgcaagttgatggtatacattatctggtgtttataaaggattaatcacattaggagtatttgggagaatttacagtgagtcactagttgttcagtgctgtttgtaattgaattcttccatgaaagggacaaggaatcaaggaagccatatagcatcaatgataatgacaaatgtttgtgttgaaaagagtgtgtataccattgtggttttggaagagttttcagaccttagtatgttcacacatcaccagactgtatctcaggagaaggtttgtgtttgtgaacaaggtgcccattattcccccaccacatgccatccaaagagatcgaggttaaaagaatcagacacactaaaaacacagtggaagcatgtctaggcataatatatcagccttttgagatatttattaaaaacttgttcttatacactattttaatatgtctaaagtgacacataccttaatttaagtgcctaagattttaattaatataatttttaattacaaacacttttactttttaataaacacgaatattttaacttaccaaaagatttagagatcacattaataatgtggctcatgtatagagaaatctgaatggttagttttgaatggttaactgattaacattcagttatcataacagttaaccagtggttaactgaatggttacattactactgaatggttctataaaatgaaaaacatatttactttgtcttttcatttgactggcttttctctttcatctcatacacctgacagattacccaggtttgcaacagtctcataatctgatcctgtataacctttaaaataaaattctgaagccaaaacca

SEQ ID NO: 130553 - DNA, 3167 bp, Homo sapiens
  Payload ID: 5534
  Gene Symbol: EPB41L5
  Gene Name: erythrocyte membrane protein band 4.1 like 5
  Uniprot ID: Q9HCM4
  ENST ID: ENST00000443902
  CDS Start-End: 143-2206
gtcctccggggattagagccggtgggctcgttgtgggcgccatttctcggcgtctaccgaggagccgcccctttctcagccttgctcggctcttccccgctctggtcgccggggctgcgccgtccccagctcagtgacaaaaatgctgagtttcttccgtagaacactagggcgtcggtctatgcgtaaacatgcagagaaggaacgactccgagaagcacaacgcgccgccacacatattcctgcagctggagattctaagtccatcatcacgtgtcgggtgtcccttctggatggtactgatgttagtgtggacttgccaaaaaaagccaaaggacaagagttgtttgatcagattatgtaccacctggacctgattgaaagcgactattttggtctgagatttatggattcagcacaagtagcacattggttggatggtacaaaaagcatcaaaaagcaagtaaaaattggttcaccctattgtctgcatcttcgagttaagttttattcctcagaaccaaataaccttcgtgaggagctaacccggtatttatttgttcttcagttaaaacaagatattctcagtggaaaattagactgtccctttgatacagcagtgcaattggcagcttataatctgcaagctgaacttggtgactatgatcttgctgagcatagtcctgaacttgtctcagagttcagattcgtgcctattcagactgaagagatggaactggctatttttgagaaatggaaggaatacagaggtcaaacaccagcacaggctgaaaccaattatctgaataaagccaaatggctagaaatgtatggggttgatatgcatgtggtcaaggctagagatgggaatgactatagtttgggactaacaccaacaggagtccttgtttttgaaggagataccaaaattggcttatttttttggccgaagataaccagattggattttaagaagaataaattaaccttggtggttgtagaagatgatgatcagggcaaagaacaggaacatacatttgtctttagactggatcatccaaaagcatgcaaacatttatggaaatgtgctgtggagcatcatgctttcttccgccttcgaggccccgtccaaaagagttctcatcgatcaggatttattcgactaggatcacgatttagatatagtgggaaaacagagtatcagaccacaaaaaccaataaagcaagaagatcaacatcctttgaaagaaggcccagcaaacgatattctagacgaactctacaaatgaaagcatgtgctacaaaacctgaagaacttagtgttcacaataatgtttcgacccaaagtaatggctcccaacaggcttgggggatgagatctgctctgcctgtgagtccttccatttcctctgctcctgtgccagtggagatagagaatcttccacagagtcctggaacagaccagcatgacaggaaatgcattcctctgaatattgatttgctgaatagcccagacttattggaagcaacgattggtgatgtaattggggcatctgacactatggaaacatcccaagcactgaatgacgttaatgtagccaccaggcttccgggattaggggaacctgaagttgaatatgagacattaaaagacacctcagagaagctcaaacagcttgagatggagaacagtcctttgctgtcccctcgatccaacatcgatgttaacataaacagccaggaggaagtggtgaagttgactgagaaatgccttaataatgtcattgagagcccaggattgaatgtcatgagagttcctcctgacttcaagagtaacattttgaaggctcaagtagaagcagtgcataaggttacaaaagaagatagcttattaagtcataaaaatgccaatgttcaggatgctgccacaaacagtgctgtgttaaatgagaataatgtgcccctccccaaagagtctcttgagactctgatgcttatcacacctgccgacagtggttctgttctaaaggaagctacagatgaattggatgccttgcttgcatctctaactgagaatctaattgatcacacagttgcacctcaggtgtcttccacatccatgatcacaccccggtggattgttccgctctggtcccattttggcagaagaagctgtcctgaagcagaagtgtttactgaccactgagctctgagggcctgtagctggaatacgcatctctccagcattccgtcctgggatccgtttcagctagaatatgttggattcaggagcttgtccattatttgtaggtaaaaaaagctgcacgtagatttgacttcaactccgtaaaaaagacagctgtattttccgtccaactggaattgttgaatcacactgcatagctgcccaaaagagagtgtttggtcttgaactttctatacttttataaatgttacaaattcccgaaagaagggaatttctttttctggggtttccttcaaactcttggctccacctagcggttctatttgttcataacaacttcataacaagcctgcctctggtagtcaacagccttttgaaagctatttccatctagtatcagggtgagagcatccttgatctggctgcctgttagagaaattgcacttttcctgacttacctagaaatcaagaatttaggaaattaatgtggacactataaaggcagacttagggccaacttttttttttttttacaattattacaacactaaagagaagtttagaatatagagagtttttaaatgtctcccattcttttgatttcttactgtactggctatcttaatatttcaagtttacatcaagataaaccctgagaagaactacggagaaatcaaataaaatcctgtcatatttttttcaccctgcctttccacaggaagcactcacaggcaccacacacgtatcatgtaacttatcagtggggtgggttactgttgaagagaccctggggcatttacctcaggcatctgcactcctccgagcccggtggagaatgcaggctgctgtagtctcaggtaatgaaggcacagcacagcagtactccacattgtttcctatttggacatagacttcatttcctttcagtataagctgaataaatttagagctttcaaactgg

SEQ ID NO: 130554 - DNA, 3514 bp, Homo sapiens
  Payload ID: 5535
  Gene Symbol: EPB41L1
  Gene Name: erythrocyte membrane protein band 4.1-like 1
  Uniprot ID: Q9H4G0
  ENST ID: ENST00000202028
  CDS Start-End: 174-2513
cagaattgttgggcttcatcttggctctgtgctgcctggaggggagacctaggataggctcctgatctgcaaaatggggataatcccagctgccacttaagtgagacaagtgcctgactgacagaagttcttgcccccggggagctggtgtggacagaggagggagcctagacatggaggagaaggactacagtgaggccgatggcctttcggagaggaccacgcccagcaaggcccagaaatcgccccagaagattgccaagaaatacaagagtgccatctgccgggtcactctgcttgatgcctcggagtatgagtgtgaggtggagaaacatggccggggccaggtgctgtttgacctggtctgtgaacacctcaacctcctagagaaggactacttcggcctgaccttctgtgatgctgacagccagaagaactggctggacccctccaaggagatcaagaagcagatccggagtagcccctggaattttgccttcacagtcaagttctacccgcctgatcctgcccagctgacagaagacatcacaagatactacctgtgcctgcagctgcgggcagacatcatcacgggccggctgccatgctcctttgtcacgcatgccctactgggctcctacgctgtgcaggctgagctgggtgactatgatgctgaggagcatgtgggcaactatgtcagcgagctccgcttcgcccctaaccagacccgggagctggaggagaggatcatggagctgcataagacatatagggggatgaccccgggagaagcagaaatccacttcttagagaatgccaagaagctttccatgtacggagtagacctgcaccatgccaaggactctgagggcatcgacatcatgttaggcgtttgtgccaatggcctgctcatctaccgggaccggctgagaatcaaccgctttgcctggcccaagatcctcaagatctcctacaagaggagtaacttctatatcaagatccggcctggggagtatgagcaatttgagagcacaattggctttaagctcccaaaccaccggtcagccaagagactgtggaaggtctgcatcgagcatcatacattcttccggctggtgtcccctgagcccccacccaagggcttcctggtgatgggctccaagttccggtacagtgggaggacccaggcacagactcgccaggccagcgccctcattgaccggcctgcacccttctttgagcgttcttccagcaaacggtacaccatgtcccgcagccttgatggagcagagttctcccgcccagcctcggtcagcgagaaccatgatgcagggcctgacggtgacaagcgggatgaggatggcgagtctggggggcaacggtcagaggctgaggagggagaggtcaggactccaaccaagatcaaggagctaaagttcttagacaagccagaagatgtcttgctgaagcaccaggccagcatcaatgagctcaaaaggaccctgaaggagcccaacagcaaactcatccaccgggatcgagactgggaacgggagcgcaggctgccctcctcccccgcctccccctcccccaagggcacccctgagaaagccaatgagagagcagggctgagggagggctccgaggagaaagtcaaaccaccacgtccccgggccccagagagtgacacaggcgatgaggaccaggaccaggagagggacacggtgttcctgaaggacaaccacctggccattgagcgcaagtgctccagcatcacggtcagctctacgtctagcctggaggctgaggtggacttcacggtcattggtgactaccatggcagcgccttcgaagacttctcccgcagcctgcctgagctcgaccgggacaaaagcgactcggacactgagggcctgctgttctcccgggatctcaacaagggggcccccagccaggatgatgagtctgggggcattgaggacagcccggatcgaggggcctgctccaccccggatatgccccagtttgagcccgtgaaaacagaaaccatgactgtcagcagtctggccattagaaagaagattgagccggaggccgtactgcagaccagagtctccgctatggataacacccaggagaacagtctcaagtccgggaagggggcagctgccatgatcccaggcccacagacggtggccacggaaatccgttctctttctccgatcatcgggaaagatgtcctcaccagcacctacggcgccactgcggaaaccctctcaacctccaccaccacccatgtcaccaaaactgtgaaaggagggttttctgagacaaggatcgagaagcgaatcatcattactggggatgaagatgtcgatcaagaccaggccctggctttggccatcaaggaggccaaactgcagcatcctgatatgctggtaaccaaagctgtcgtatacagagaaacagacccatccccagaggagagggacaagaagccacaggaatcctgacctctgtgaagagatcctggcatttctggtccaacccaagccagagaaccattaagaaggggccttcattctggattctccgacgcaacactgacgtcccagctgcgacgtactgtcactgatgagagactgggaagggaaaagcatatatatatagatatatagagatatagatatatatacaggaaacaccgcatccttgcactgctgctggggctggcagagcagttggctgacagcaacaaccgacatctgaacacctacatttcctttgcagacaaattgaagaactggtgggatttttttcaagaaaaaaaattatataataactataatcccttgctcacccctttcccccgccaaataagaaacgcaagccagaccacgatgattgtagaagtccctcccgccctggttctgcacgttacagttagcagacgagcaattccatttgttcttctccagcatctctaaggcccacttgaatgcaaaggaaaacacttgcacagcaaagcaagagaagtcacagcagcaagacacgcacagtcaaccattttccgagaaaaaaagaaaattccccacttggaaagaaagaggaggaacactggattcttactttctggatcttgacactgggctgcaaaacctaccttcctctctcccgcctcccctcaccctcaactctcaatgtcttgctgtcattttctgtctcggctccctcctcccccttcccccttcccccaccccacacccttcaccctctgtgtcctggtccttctgagggccactgcagatgactctcctttgaaatgagaaaaagaaaagaaagcaagaacagaaaacgaagccacaggaagggaagtagacattgtatgcttatggtttctcattatgaaggtgcagcttgtaggaggtttgtacggatgtgctttgaagttatgtatattacatataacaggaaaaaatattaaaataaacagtgctggtaagtatgaagctga

SEQ ID NO: 130555 - DNA, 6266 bp, Homo sapiens
  Payload ID: 5535
  Gene Symbol: EPB41L1
  Gene Name: erythrocyte membrane protein band 4.1-like 1
  Uniprot ID: Q9H4G0
  ENST ID: ENST00000338074
  CDS Start-End: 162-2807
catcagcgggcgggggtgtcgccgaacaggctgctccgcagagcccgccgcgaccccgcgccgccccgccccgcggcctgcctgccagaggagccgagggggccgcccctcgcccaacctgcccgacatggggaaccccgggcccaggcgtgctggtcaccatgacaacagagacaggccccgactctgaggtgaagaaagctcaggaggaggccccgcagcagcccgaggctgctgccgctgtgaccacccctgtgacccctgcaggccacggccacccagaggccaactccaatgagaagcatccatcccagcaggacacgcggcctgctgaacagagcctagacatggaggagaaggactacagtgaggccgatggcctttcggagaggaccacgcccagcaaggcccagaaatcgccccagaagattgccaagaaatacaagagtgccatctgccgggtcactctgcttgatgcctcggagtatgagtgtgaggtggagaaacatggccggggccaggtgctgtttgacctggtctgtgaacacctcaacctcctagagaaggactacttcggcctgaccttctgtgatgctgacagccagaagaactggctggacccctccaaggagatcaagaagcagatccggagtagcccctggaattttgccttcacagtcaagttctacccgcctgatcctgcccagctgacagaagacatcacaagatactacctgtgcctgcagctgcgggcagacatcatcacgggccggctgccatgctcctttgtcacgcatgccctactgggctcctacgctgtgcaggctgagctgggtgactatgatgctgaggagcatgtgggcaactatgtcagcgagctccgcttcgcccctaaccagacccgggagctggaggagaggatcatggagctgcataagacatatagggggatgaccccgggagaagcagaaatccacttcttagagaatgccaagaagctttccatgtacggagtagacctgcaccatgccaaggactctgagggcatcgacatcatgttaggcgtttgtgccaatggcctgctcatctaccgggaccggctgagaatcaaccgctttgcctggcccaagatcctcaagatctcctacaagaggagtaacttctatatcaagatccggcctggggagtatgagcaatttgagagcacaattggctttaagctcccaaaccaccggtcagccaagagactgtggaaggtctgcatcgagcatcatacattcttccggctggtgtcccctgagcccccacccaagggcttcctggtgatgggctccaagttccggtacagtgggaggacccaggcacagactcgccaggccagcgccctcattgaccggcctgcacccttctttgagcgttcttccagcaaacggtacaccatgtcccgcagccttgatggagcagagttctcccgcccagcctcggtcagcgagaaccatgatgcagggcctgacggtgacaagcgggatgaggatggcgagtctggggggcaacggtcagaggctgaggagggagaggtcaggactccaaccaagatcaaggagctaaagccggagcaggaaaccacgccgagacacaagcaggagttcttagacaagccagaagatgtcttgctgaagcaccaggccagcatcaatgagctcaaaaggaccctgaaggagcccaacagcaaactcatccaccgggatcgagactgggaacgggagcgcaggctgccctcctcccccgcctccccctcccccaagggcacccctgagaaagccaatgagagagcagggctgagggagggctccgaggagaaagtcaaaccaccacgtccccgggccccagagagtgacacaggcgatgaggaccaggaccaggagagggacacggtgttcctgaaggacaaccacctggccattgagcgcaagtgctccagcatcacggtcagctctacgtctagcctggaggctgaggtggacttcacggtcattggtgactaccatggcagcgccttcgaagacttctcccgcagcctgcctgagctcgaccgggacaaaagcgactcggacactgagggcctgctgttctcccgggatctcaacaagggggcccccagccaggatgatgagtctgggggcattgaggacagcccggatcgaggggcctgctccaccccggatatgccccagtttgagcccgtgaaaacagaaaccatgactgtcagcagtctggccattagaaagaagattgagccggaggccgtactgcagaccagagtctccgctatggataacacccagcaggttgatgggagtgcctcagtggggagggagttcatagcaaccactccctccatcaccacggagaccatatcgaccaccatggagaacagtctcaagtccgggaagggggcagctgccatgatcccaggcccacagacggtggccacggaaatccgttctctttctccgatcatcgggaaagatgtcctcaccagcacctacggcgccactgcggaaaccctctcaacctccaccaccacccatgtcaccaaaactgtgaaaggagggttttctgagacaaggatcgagaagcgaatcatcattactggggatgaagatgtcgatcaagaccaggccctggctttggccatcaaggaggccaaactgcagcatcctgatatgctggtaaccaaagctgtcgtatacagagaaacagacccatccccagaggagagggacaagaagccacaggaatcctgacctctgtgaagagatcctggcatttctggtccaacccaagccagagaaccattaagaaggggccttcattctggattctccgacgcaacactgacgtcccagctgcgacgtactgtcactgatgagagactgggaagggaaaagcatatatatatagatatatagagatatagatatatatacaggaaacaccgcatccttgcactgctgctggggctggcagagcagttggctgacagcaacaaccgacatctgaacacctacatttcctttgcagacaaattgaagaactggtgggatttttttcaagaaaaaaaattatataataactataatcccttgctcacccctttcccccgccaaataagaaacgcaagccagaccacgatgattgtagaagtccctcccgccctggttctgcacgttacagttagcagacgagcaattccatttgttcttctccagcatctctaaggcccacttgaatgcaaaggaaaacacttgcacagcaaagcaagagaagtcacagcagcaagacacgcacagtcaaccattttccgagaaaaaaagaaaattccccacttggaaagaaagaggaggaacactggattcttactttctggatcttgacactgggctgcaaaacctaccttcctctctcccgcctcccctcaccctcaactctcaatgtcttgctgtcattttctgtctcggctccctcctcccccttcccccttcccccaccccacacccttcaccctctgtgtcctggtccttctgagggccactgcagatgactctcctttgaaatgagaaaaagaaaagaaagcaagaacagaaaacgaagccacaggaagggaagtagacattgtatgcttatggtttctcattatgaaggtgcagcttgtaggaggtttgtacggatgtgctttgaagttatgtatattacatataacaggaaaaaatattaaaataaacagtgctggtaagtatgaagctgacattctaaaattataattatctgactgtgattgatgtatcctgaggttcctagatctcactgaactggcccagctaaggagacctggactctgggtgtgggttggctcacagtaggggctgacgggttcagtgtagtaatactgtgtgtggtgtttgtaattggttgattggtggggaggggtggggggccctaatggagaggtgtgggtttggcaagaaagaagcaacacagatgtcgtccccaaaatgccagttcaagacaccttctccctgcccccctggtagtaacagtcagggcctggtctgtgctcaggtactgggtcccagtctgggactctgctgctgaagttgccacagtagaggtccctggcttagtccttatctccctacggggcttgccttggttttcagtcttctctctctttctctcttttttttttttttgccacattctgcccttccctgaccccattgtaataaccaactccatatccaaagggaggtggtgctctcagccattgtagaagatggtggctttaacctgactgtctaaaaattcccagctaagccttttcctctactctcttccttgttctgaatcatttcttcttctcaggccaaagtagccatggtaaggaggcttcatggggcagaccctgaaagatcaaaactgcatttgcaaagccctcccctgtcccaggacaaagctgagactgacgggtgatgttgctcataggctccagctctgcataagaccttggcttggagacctccctctcagtcaacagctgaactctgagcttgtgcccagaaattaccccaagaccacaggaacccttcaagaagctcccatcacaagcttggcattgctctctgccacacgtgggcttcctcaggcttgtctgccacaagctacttctctgagctcagaaagtgccccttgatgagggaaaatgtcccactgcactgcgaatttctcagttccattttacctcccagtcctccttctaaaccagttaataaattcattccacaagtatttactgattacctgcttgtgccagggactattctcaggctgaagaaggtgggaggggagggcggaacctgaggagccacctgagccagctttatatttcaaccatggctggcccatctgagagcatctccccactctcgccaacctatcggggcatagcccagggatgcccccaggcggcccaggttagatgcgtccctttggcttgtcagtgatgacatacaccttagctgcttagctggtgctggcctgaggcagggcaggaaatcagaatagcatttgcttctctgggcaaatgggaagttcagcggggcagcagaatcagtggcattccccctggtgcaggccggtgggtccactccaactccccctgagtgtagcagcacactttccatacaccaggttctttctacaatcctggtggaaaagccacagaaccttcttcctgcccttcttgagagttccccctctttctgggtcaagagctggagtggtggctccatcctctctgggccacttcggtctaggaactcatctttgcaggaaccaggagtcctgagcacactgaacacacctcagagggaggatccttgttgtggattttgcacctggctttggggcaggggtgaagtgaccaggcttagcttgtggagtttatgggccaccagggtttggggaaatcaccatcccgcggatgctgtgacctcccttctacggagatgcaggcagtgccacgagggaggaggggacctgcaaagctagaatctagggcactgtttcctccccatccttctctttgtagagaatagagacgtttgtcttgtctgtcttcaacctacttttccttttctcttttttgtttctcatcctctctgtgccacctctccacccaggaggccatgtagcatagtggaaaaagtccctgagggcggttaggagttctgggtgaccatcctggctcagctcctaactcaccatgtgacatcaggctatccccattccccctcttgggcctcagtttcccgacttgcaaaataagcagaaagaaccagatgctctccagggtctttttctactttgctatctcatgggtcttcattttctcttattttgttttctctggatcttttccatctgagggtacaggaagtaccaggacctgtttcagtttttgaatcctgcaagcacattccaagactggcctgaaactgcatgagcaacatcactcgaaataattttttttttcaaaagcaccttaacaaccaattgcgatgctgtcctgttcctttttactcacacccttctctcctttctcgtccccatgctcccccacctcagtgctccgtgctgtatgcgtgtgctctctgttcttgtatactcaatataagtgaaataaatgtgtttgatgctgaaccata

SEQ ID NO: 130556 - DNA, 2652 bp, Homo sapiens
  Payload ID: 5535
  Gene Symbol: EPB41L1
  Gene Name: erythrocyte membrane protein band 4.1-like 1
  ENST ID: ENST00000373941
  CDS Start-End: 10-2652
ctggtcaccatgacaacagagacaggccccgactctgaggtgaagaaagctcaggaggaggccccgcagcagcccgaggctgctgccgctgtgaccacccctgtgacccctgcaggccacggccacccagaggccaactccaatgagaagcatccatcccagcaggacacgcggcctgctgaacagagcctagacatggaggagaaggactacagtgaggccgatggcctttcggagaggaccacgcccagcaaggcccagaaatcgccccagaagattgccaagaaatacaagagtgccatctgccgggtcactctgcttgatgcctcggagtatgagtgtgaggtggagaaacatggccggggccaggtgctgtttgacctggtctgtgaacacctcaacctcctagagaaggactacttcggcctgaccttctgtgatgctgacagccagaagaactggctggacccctccaaggagatcaagaagcagatccggagtagcccctggaattttgccttcacagtcaagttctacccgcctgatcctgcccagctgacagaagacatcacaagatactacctgtgcctgcagctgcgggcagacatcatcacgggccggctgccatgctcctttgtcacgcatgccctactgggctcctacgctgtgcaggctgagctgggtgactatgatgctgaggagcatgtgggcaactatgtcagcgagctccgcttcgcccctaaccagacccgggagctggaggagaggatcatggagctgcataagacatatagggggatgaccccgggagaagcagaaatccacttcttagagaatgccaagaagctttccatgtacggagtagacctgcaccatgccaaggactctgagggcatcgacatcatgttaggcgtttgtgccaatggcctgctcatctaccgggaccggctgagaatcaaccgctttgcctggcccaagatcctcaagatctcctacaagaggagtaacttctatatcaagatccggcctggggagtatgagcaatttgagagcacaattggctttaagctcccaaaccaccggtcagccaagagactgtggaaggtctgcatcgagcatcatacattcttccggctggtgtcccctgagcccccacccaagggcttcctggtgatgggctccaagttccggtacagtgggaggacccaggcacagactcgccaggccagcgccctcattgaccggcctgcacccttctttgagcgttcttccagcaaacggtacaccatgtcccgcagccttgatggagcagagttctcccgcccagcctcggtcagcgagaaccatgatgcagggcctgacggtgacaagcgggatgaggatggcgagtctggggggcaacggtcagaggctgaggagggagaggtcaggactccaaccaagatcaaggagctaaagccggagcaggaaaccacgccgagacacaagcaggagttcttagacaagccagaagatgtcttgctgaagcaccaggccagcatcaatgagctcaaaaggaccctgaaggagcccaacagcaaactcatccaccgggatcgagactgggaacgggagcgcaggctgccctcctcccccgcctccccctcccccaagggcacccctgagaaagccaatgagagagcagggctgagggagggctccgaggagaaagtcaaaccaccacgtccccgggccccagagagtgacacaggcgatgaggaccaggaccaggagagggacacggtgttcctgaaggacaaccacctggccattgagcgcaagtgctccagcatcacggtcagctctacgtctagcctggaggctgaggtggacttcacggtcattggtgactaccatggcagcgccttcgaagacttctcccgcagcctgcctgagctcgaccgggacaaaagcgactcggacactgagggcctgctgttctcccgggatctcaacaagggggcccccagccaggatgatgagtctgggggcattgaggacagcccggatcgaggggcctgctccaccccggatatgccccagtttgagcccgtgaaaacagaaaccatgactgtcagcagtctggccattagaaagaagattgagccggaggccgtactgcagaccagagtctccgctatggataacacccaggttgatgggagtgcctcagtggggagggagttcatagcaaccactccctccatcaccacggagaccatatcgaccaccatggagaacagtctcaagtccgggaagggggcagctgccatgatcccaggcccacagacggtggccacggaaatccgttctctttctccgatcatcgggaaagatgtcctcaccagcacctacggcgccactgcggaaaccctctcaacctccaccaccacccatgtcaccaaaactgtgaaaggagggttttctgagacaaggatcgagaagcgaatcatcattactggggatgaagatgtcgatcaagaccaggccctggctttggccatcaaggaggccaaactgcagcatcctgatatgctggtaaccaaagctgtcgtatacagagaaacagacccatccccagaggagagggacaagaagccacaggaatcctga

SEQ ID NO: 130557 - DNA, 763 bp, Homo sapiens
  Payload ID: 5535
  Gene Symbol: EPB41L1
  Gene Name: erythrocyte membrane protein band 4.1-like 1
  ENST ID: ENST00000373945
  CDS Start-End: 165-763
tcggcatccatcagcgggcgggggtgtcgccgaacaggctgctccgcagagcccgccgcgaccccgcgccgccccgccccgcggcctgcctgccagaggagccgagggggccgcccctcgcccaacctgcccgacatggggaaccccgggcccagagcctagacatggaggagaaggactacagtgaggccgatggcctttcggagaggaccacgcccagcaaggcccagaaatcgccccagaagattgccaagaaatacaagagtgccatctgccgggtcactctgcttgatgcctcggagtatgagtgtgaggtggagaaacatggccggggccaggtgctgtttgacctggtctgtgaacacctcaacctcctagagaaggactacttcggcctgaccttctgtgatgctgacagccagaagaactggctggacccctccaaggagatcaagaagcagatccggagtagcccctggaattttgccttcacagtcaagttctacccgcctgatcctgcccagctgacagaagacatcacaagatactacctgtgcctgcagctgcgggcagacatcatcacgggccggctgccatgctcctttgtcacgcatgccctactgggctcctacgctgtgcaggctgagctgggtgactatgatgctgaggagcatgtgggcaactatgtcagcgagctccgcttcgcccctaaccagacccgggagctggaggagaggatcatggagctgcataagacatatag

SEQ ID NO: 130558 - DNA, 6327 bp, Homo sapiens
  Payload ID: 5535
  Gene Symbol: EPB41L1
  Gene Name: erythrocyte membrane protein band 4.1-like 1
  ENST ID: ENST00000373946
  CDS Start-End: 226-2868
gcatttctgcgcagctctagcgcgcctcggagcccgccggggcagccgccggacaccaggaccgcgagccagacagctcccggaagccgcgccgccgccgccagccacagcacagccggacagaggaggtggattaggagttcccgggagggagcctgctcagcctttccctgacatttgggcaaatgtgtggggagatgcggagctcaaggcgtgctggtcaccatgacaacagagacaggccccgactctgaggtgaagaaagctcaggaggaggccccgcagcagcccgaggctgctgccgctgtgaccacccctgtgacccctgcaggccacggccacccagaggccaactccaatgagaagcatccatcccagcaggacacgcggcctgctgaacagagcctagacatggaggagaaggactacagtgaggccgatggcctttcggagaggaccacgcccagcaaggcccagaaatcgccccagaagattgccaagaaatacaagagtgccatctgccgggtcactctgcttgatgcctcggagtatgagtgtgaggtggagaaacatggccggggccaggtgctgtttgacctggtctgtgaacacctcaacctcctagagaaggactacttcggcctgaccttctgtgatgctgacagccagaagaactggctggacccctccaaggagatcaagaagcagatccggagtagcccctggaattttgccttcacagtcaagttctacccgcctgatcctgcccagctgacagaagacatcacaagatactacctgtgcctgcagctgcgggcagacatcatcacgggccggctgccatgctcctttgtcacgcatgccctactgggctcctacgctgtgcaggctgagctgggtgactatgatgctgaggagcatgtgggcaactatgtcagcgagctccgcttcgcccctaaccagacccgggagctggaggagaggatcatggagctgcataagacatatagggggatgaccccgggagaagcagaaatccacttcttagagaatgccaagaagctttccatgtacggagtagacctgcaccatgccaaggactctgagggcatcgacatcatgttaggcgtttgtgccaatggcctgctcatctaccgggaccggctgagaatcaaccgctttgcctggcccaagatcctcaagatctcctacaagaggagtaacttctatatcaagatccggcctggggagtatgagcaatttgagagcacaattggctttaagctcccaaaccaccggtcagccaagagactgtggaaggtctgcatcgagcatcatacattcttccggctggtgtcccctgagcccccacccaagggcttcctggtgatgggctccaagttccggtacagtgggaggacccaggcacagactcgccaggccagcgccctcattgaccggcctgcacccttctttgagcgttcttccagcaaacggtacaccatgtcccgcagccttgatggagcagagttctcccgcccagcctcggtcagcgagaaccatgatgcagggcctgacggtgacaagcgggatgaggatggcgagtctggggggcaacggtcagaggctgaggagggagaggtcaggactccaaccaagatcaaggagctaaagccggagcaggaaaccacgccgagacacaagcaggagttcttagacaagccagaagatgtcttgctgaagcaccaggccagcatcaatgagctcaaaaggaccctgaaggagcccaacagcaaactcatccaccgggatcgagactgggaacgggagcgcaggctgccctcctcccccgcctccccctcccccaagggcacccctgagaaagccaatgagagagcagggctgagggagggctccgaggagaaagtcaaaccaccacgtccccgggccccagagagtgacacaggcgatgaggaccaggaccaggagagggacacggtgttcctgaaggacaaccacctggccattgagcgcaagtgctccagcatcacggtcagctctacgtctagcctggaggctgaggtggacttcacggtcattggtgactaccatggcagcgccttcgaagacttctcccgcagcctgcctgagctcgaccgggacaaaagcgactcggacactgagggcctgctgttctcccgggatctcaacaagggggcccccagccaggatgatgagtctgggggcattgaggacagcccggatcgaggggcctgctccaccccggatatgccccagtttgagcccgtgaaaacagaaaccatgactgtcagcagtctggccattagaaagaagattgagccggaggccgtactgcagaccagagtctccgctatggataacacccaggttgatgggagtgcctcagtggggagggagttcatagcaaccactccctccatcaccacggagaccatatcgaccaccatggagaacagtctcaagtccgggaagggggcagctgccatgatcccaggcccacagacggtggccacggaaatccgttctctttctccgatcatcgggaaagatgtcctcaccagcacctacggcgccactgcggaaaccctctcaacctccaccaccacccatgtcaccaaaactgtgaaaggagggttttctgagacaaggatcgagaagcgaatcatcattactggggatgaagatgtcgatcaagaccaggccctggctttggccatcaaggaggccaaactgcagcatcctgatatgctggtaaccaaagctgtcgtatacagagaaacagacccatccccagaggagagggacaagaagccacaggaatcctgacctctgtgaagagatcctggcatttctggtccaacccaagccagagaaccattaagaaggggccttcattctggattctccgacgcaacactgacgtcccagctgcgacgtactgtcactgatgagagactgggaagggaaaagcatatatatatagatatatagagatatagatatatatacaggaaacaccgcatccttgcactgctgctggggctggcagagcagttggctgacagcaacaaccgacatctgaacacctacatttcctttgcagacaaattgaagaactggtgggatttttttcaagaaaaaaaattatataataactataatcccttgctcacccctttcccccgccaaataagaaacgcaagccagaccacgatgattgtagaagtccctcccgccctggttctgcacgttacagttagcagacgagcaattccatttgttcttctccagcatctctaaggcccacttgaatgcaaaggaaaacacttgcacagcaaagcaagagaagtcacagcagcaagacacgcacagtcaaccattttccgagaaaaaaagaaaattccccacttggaaagaaagaggaggaacactggattcttactttctggatcttgacactgggctgcaaaacctaccttcctctctcccgcctcccctcaccctcaactctcaatgtcttgctgtcattttctgtctcggctccctcctcccccttcccccttcccccaccccacacccttcaccctctgtgtcctggtccttctgagggccactgcagatgactctcctttgaaatgagaaaaagaaaagaaagcaagaacagaaaacgaagccacaggaagggaagtagacattgtatgcttatggtttctcattatgaaggtgcagcttgtaggaggtttgtacggatgtgctttgaagttatgtatattacatataacaggaaaaaatattaaaataaacagtgctggtaagtatgaagctgacattctaaaattataattatctgactgtgattgatgtatcctgaggttcctagatctcactgaactggcccagctaaggagacctggactctgggtgtgggttggctcacagtaggggctgacgggttcagtgtagtaatactgtgtgtggtgtttgtaattggttgattggtggggaggggtggggggccctaatggagaggtgtgggtttggcaagaaagaagcaacacagatgtcgtccccaaaatgccagttcaagacaccttctccctgcccccctggtagtaacagtcagggcctggtctgtgctcaggtactgggtcccagtctgggactctgctgctgaagttgccacagtagaggtccctggcttagtccttatctccctacggggcttgccttggttttcagtcttctctctctttctctcttttttttttttttgccacattctgcccttccctgaccccattgtaataaccaactccatatccaaagggaggtggtgctctcagccattgtagaagatggtggctttaacctgactgtctaaaaattcccagctaagccttttcctctactctcttccttgttctgaatcatttcttcttctcaggccaaagtagccatggtaaggaggcttcatggggcagaccctgaaagatcaaaactgcatttgcaaagccctcccctgtcccaggacaaagctgagactgacgggtgatgttgctcataggctccagctctgcataagaccttggcttggagacctccctctcagtcaacagctgaactctgagcttgtgcccagaaattaccccaagaccacaggaacccttcaagaagctcccatcacaagcttggcattgctctctgccacacgtgggcttcctcaggcttgtctgccacaagctacttctctgagctcagaaagtgccccttgatgagggaaaatgtcccactgcactgcgaatttctcagttccattttacctcccagtcctccttctaaaccagttaataaattcattccacaagtatttactgattacctgcttgtgccagggactattctcaggctgaagaaggtgggaggggagggcggaacctgaggagccacctgagccagctttatatttcaaccatggctggcccatctgagagcatctccccactctcgccaacctatcggggcatagcccagggatgcccccaggcggcccaggttagatgcgtccctttggcttgtcagtgatgacatacaccttagctgcttagctggtgctggcctgaggcagggcaggaaatcagaatagcatttgcttctctgggcaaatgggaagttcagcggggcagcagaatcagtggcattccccctggtgcaggccggtgggtccactccaactccccctgagtgtagcagcacactttccatacaccaggttctttctacaatcctggtggaaaagccacagaaccttcttcctgcccttcttgagagttccccctctttctgggtcaagagctggagtggtggctccatcctctctgggccacttcggtctaggaactcatctttgcaggaaccaggagtcctgagcacactgaacacacctcagagggaggatccttgttgtggattttgcacctggctttggggcaggggtgaagtgaccaggcttagcttgtggagtttatgggccaccagggtttggggaaatcaccatcccgcggatgctgtgacctcccttctacggagatgcaggcagtgccacgagggaggaggggacctgcaaagctagaatctagggcactgtttcctccccatccttctctttgtagagaatagagacgtttgtcttgtctgtcttcaacctacttttccttttctcttttttgtttctcatcctctctgtgccacctctccacccaggaggccatgtagcatagtggaaaaagtccctgagggcggttaggagttctgggtgaccatcctggctcagctcctaactcaccatgtgacatcaggctatccccattccccctcttgggcctcagtttcccgacttgcaaaataagcagaaagaaccagatgctctccagggtctttttctactttgctatctcatgggtcttcattttctcttattttgttttctctggatcttttccatctgagggtacaggaagtaccaggacctgtttcagtttttgaatcctgcaagcacattccaagactggcctgaaactgcatgagcaacatcactcgaaataattttttttttcaaaagcaccttaacaaccaattgcgatgctgtcctgttcctttttactcacacccttctctcctttctcgtccccatgctcccccacctcagtgctccgtgctgtatgcgtgtgctctctgttcttgtatactcaatataagtgaaataaatgtgtttgatgctgaaccata

SEQ ID NO: 130559 - DNA, 3631 bp, Homo sapiens
  Payload ID: 5535
  Gene Symbol: EPB41L1
  Gene Name: erythrocyte membrane protein band 4.1-like 1
  Uniprot ID: Q9H4G0
  ENST ID: ENST00000373950
  CDS Start-End: 326-2644
gcatttctgcgcagctctagcgcgcctcggagcccgccggggcagccgccggacaccaggaccgcgagccagacagctcccggaagccgcgccgccgccgccaggtgcctgactgacagaagttcttgcccccggggagctggtgtggacagaggaggggccctggaagtgaccactgggctgagtagctcatcagcttccccacactgaagcccgaggggtctcctgctggcttctgagagctgacggaacaggttccagcaaggcagaccctgacacagaagccagacctgtccagcagggaccccatacactgagcctagacatggaggagaaggactacagtgaggccgatggcctttcggagaggaccacgcccagcaaggcccagaaatcgccccagaagattgccaagaaatacaagagtgccatctgccgggtcactctgcttgatgcctcggagtatgagtgtgaggtggagaactggctggacccctccaaggagatcaagaagcagatccggagtagcccctggaattttgccttcacagtcaagttctacccgcctgatcctgcccagctgacagaagacatcacaagatactacctgtgcctgcagctgcgggcagacatcatcacgggccggctgccatgctcctttgtcacgcatgccctactgggctcctacgctgtgcaggctgagctgggtgactatgatgctgaggagcatgtgggcaactatgtcagcgagctccgcttcgcccctaaccagacccgggagctggaggagaggatcatggagctgcataagacatatagggggatgaccccgggagaagcagaaatccacttcttagagaatgccaagaagctttccatgtacggagtagacctgcaccatgccaaggactctgagggcatcgacatcatgttaggcgtttgtgccaatggcctgctcatctaccgggaccggctgagaatcaaccgctttgcctggcccaagatcctcaagatctcctacaagaggagtaacttctatatcaagatccggcctggggagtatgagcaatttgagagcacaattggctttaagctcccaaaccaccggtcagccaagagactgtggaaggtctgcatcgagcatcatacattcttccggctggtgtcccctgagcccccacccaagggcttcctggtgatgggctccaagttccggtacagtgggaggacccaggcacagactcgccaggccagcgccctcattgaccggcctgcacccttctttgagcgttcttccagcaaacggtacaccatgtcccgcagccttgatggagcagagttctcccgcccagcctcggtcagcgagaaccatgatgcagggcctgacggtgacaagcgggatgaggatggcgagtctggggggcaacggtcagaggctgaggagggagaggtcaggactccaaccaagatcaaggagctaaagttcttagacaagccagaagatgtcttgctgaagcaccaggccagcatcaatgagctcaaaaggaccctgaaggagcccaacagcaaactcatccaccgggatcgagactgggaacgggagcgcaggctgccctcctcccccgcctccccctcccccaagggcacccctgagaaagccaatgagagagcagggctgagggagggctccgaggagaaagtcaaaccaccacgtccccgggccccagagagtgacacaggcgatgaggaccaggaccaggagagggacacggtgttcctgaaggacaaccacctggccattgagcgcaagtgctccagcatcacggtcagctctacgtctagcctggaggctgaggtggacttcacggtcattggtgactaccatggcagcgccttcgaagacttctcccgcagcctgcctgagctcgaccgggacaaaagcgactcggacactgagggcctgctgttctcccgggatctcaacaagggggcccccagccaggatgatgagtctgggggcattgaggacagcccggatcgaggggcctgctccaccccggatatgccccagtttgagcccgtgaaaacagaaaccatgactgtcagcagtctggccattagaaagaagattgagccggaggccgtactgcagaccagagtctccgctatggataacacccagcaggttgatgggagtgcctcagtggggagggagttcatagcaaccactccctccatcaccacggagaccatatcgaccaccatggagaacagtctcaagtccgggaagggggcagctgccatgatcccaggcccacagacggtggccacggaaatccgttctctttctccgatcatcgggaaagatgtcctcaccagcacctacggcgccactgcggaaaccctctcaacctccaccaccacccatgtcaccaaaactgtgaaaggagggttttctgagacaaggatcgagaagcgaatcatcattactggggatgaagatgtcgatcaagaccaggccctggctttggccatcaaggaggccaaactgcagcatcctgatatgctggtaaccaaagctgtcgtatacagagaaacagacccatccccagaggagagggacaagaagccacaggaatcctgacctctgtgaagagatcctggcatttctggtccaacccaagccagagaaccattaagaaggggccttcattctggattctccgacgcaacactgacgtcccagctgcgacgtactgtcactgatgagagactgggaagggaaaagcatatatatatagatatatagagatatagatatatatacaggaaacaccgcatccttgcactgctgctggggctggcagagcagttggctgacagcaacaaccgacatctgaacacctacatttcctttgcagacaaattgaagaactggtgggatttttttcaagaaaaaaaattatataataactataatcccttgctcacccctttcccccgccaaataagaaacgcaagccagaccacgatgattgtagaagtccctcccgccctggttctgcacgttacagttagcagacgagcaattccatttgttcttctccagcatctctaaggcccacttgaatgcaaaggaaaacacttgcacagcaaagcaagagaagtcacagcagcaagacacgcacagtcaaccattttccgagaaaaaaagaaaattccccacttggaaagaaagaggaggaacactggattcttactttctggatcttgacactgggctgcaaaacctaccttcctctctcccgcctcccctcaccctcaactctcaatgtcttgctgtcattttctgtctcggctccctcctcccccttcccccttcccccaccccacacccttcaccctctgtgtcctggtccttctgagggccactgcagatgactctcctttgaaatgagaaaaagaaaagaaagcaagaacagaaaacgaagccacaggaagggaagtagacattgtatgcttatggtttctcattatgaaggtgcagcttgtaggaggtttgtacggatgtgctttgaagttatgtatattacatataacaggaaaaaatattaaaataaacagtgctggt

SEQ ID NO: 130560 - DNA, 652 bp, Homo sapiens
  Payload ID: 5535
  Gene Symbol: EPB41L1
  Gene Name: erythrocyte membrane protein band 4.1-like 1
  ENST ID: ENST00000406771
  CDS Start-End: 149-652
agagcaggagcgagcgcgcgagagagcggggcatttctgcgcagctctagcgcgcctcggagcccgccggggcagccgccggacaccaggaccgcgagccagacagctcccggaagccgcgccgccgccgccaggcgtgctggtcaccatgacaacagagacaggccccgactctgaggtgaagaaagctcaggaggaggccccgcagcagcccgaggctgctgccgctgtgaccacccctgtgacccctgcaggccacggccacccagaggccaactccaatgagaagcatccatcccagcaggacacgcggcctgctgaacagagcctagacatggaggagaaggactacagtgaggccgatggcctttcggagaggaccacgcccagcaaggcccagaaatcgccccagaagattgccaagaaatacaagagtgccatctgccgggtcactctgcttgatgcctcggagtatgagtgtgaggtggagaaacatggccggggccaggtgctgtttgacctggtctgtgaacacctcaacctcctagagaaggactacttcggcctgaccttctgtgatgctgacagccagaagaactggctggacccctccaaggagatcaagaagcagatccggagtagcccctggaat

SEQ ID NO: 130561 - DNA, 593 bp, Homo sapiens
  Payload ID: 5535
  Gene Symbol: EPB41L1
  Gene Name: erythrocyte membrane protein band 4.1-like 1
  ENST ID: ENST00000454226
  CDS Start-End: 1-593
gtcttgctgaagcaccaggccagcatcaatgagctcaaaaggaccctgaaggagcccaacagcaaactcatccaccgggatcgagactgggaacgggagcgcaggctgccctcctcccccgcctccccctcccccaagggcacccctgagaaagccaatgagcccgtgaaaacagaaaccatgactgtcagcagtctggccattagaaagaagattgagccggaggccgtactgcagaccagagtctccgctatggataacacccagcaggttgatgggagtgcctcagtggggagggagttcatagcaaccactccctccatcaccacggagaccatatcgaccaccatggagaacagtctcaagtccgggaagggggcagctgccatgatcccaggcccacagacggtggccacggaaatccgttctctttctccgatcatcgggaaagatgtcctcaccagcacctacggcgccactgcggaaaccctctcaacctccaccaccacccatgtcaccaaaactgtgaaaggagggttttctgagacaaggatcgagaagcgaatcatcattactggggatgaagatgtcga

SEQ ID NO: 130562 - DNA, 864 bp, Homo sapiens
  Payload ID: 5535
  Gene Symbol: EPB41L1
  Gene Name: erythrocyte membrane protein band 4.1-like 1
  ENST ID: ENST00000432603
  CDS Start-End: 1-359
cctcagtggggagggagttcatagcaaccactccctccatcaccacggagaccatatcgaccaccatgatcatcgggaaagatgtcctcaccagcacctacggcgccactgcggaaaccctctcaacctccaccaccacccatgtcaccaaaactgtgaaaggagggttttctgagacaaggatcgagaagcgaatcatcattactggggatgaagatgtcgatcaagaccaggccctggctttggccatcaaggaggccaaactgcagcatcctgatatgctggtaaccaaagctgtcgtatacagagaaacagacccatccccagaggagagggacaagaagccacaggaatcctgacctctgtgaagagatcctggcatttctggtccaacccaagccagagaaccattaagaaggggccttcattctggattctccgacgcaacactgacgtcccagctgcgacgtactgtcactgatgagagactgggaagggaaaagcatatatatatagatatatagagatatagatatatatacaggaaacaccgcatccttgcactgctgctggggctggcagagcagttggctgacagcaacaaccgacatctgaacacctacatttcctttgcagacaaattgaagaactggtgggatttttttcaagaaaaaaaattatataataactataatcccttgctcacccctttcccccgccaaataagaaacgcaagccagaccacgatgattgtagaagtccctcccgccctggttctgcacgttacagttagcagacgagcaattccatttgttcttctccagcatctctaaggcccacttgaatgcaaaggaaaacacttgc

SEQ ID NO: 130563 - DNA, 210 bp, Homo sapiens
  Payload ID: 5535
  Gene Symbol: EPB41L1
  Gene Name: erythrocyte membrane protein band 4.1-like 1
  ENST ID: ENST00000432589
  CDS Start-End: 99-210
ctttcagatgctatcttgggctcgctgaacacgggtgcctgactgacagaagttcttgcccccggggagctggtgtggacagaggagggagcctagacatggaggagaaggactacagtgaggccgatggcctttcggagaggaccacgcccagcaaggcccagaaatcgccccagaagattgccaagaaatacaagagtgccatctgcc

SEQ ID NO: 130564 - DNA, 896 bp, Homo sapiens
  Payload ID: 5535
  Gene Symbol: EPB41L1
  Gene Name: erythrocyte membrane protein band 4.1-like 1
  ENST ID: ENST00000447825
  CDS Start-End: 555-896
tccgcgtcccggggaccccgccgcgtcgggtcccgcgtgtgcgtgtggggtggccgccgagggcggcgggctcgattcccgatctttgggcactgacaggccggcgggccggctccaggagccgcgggcttcggtagctccttggatattcctttctgcaagtgatcaggcaaagataaattccattttacagatgaggaagctgaggcctgtgaagggaaagtgacctggctacacagccggaacctgaatgcaggacattctgcccctgtcgtggtggtattggagccagctaatgccaccattcgaggttgcaggagcagcacctgaccagaaatccagagcttgtttaaaggaccctgaaatttgaagactatccacacatatctactttctggatatccacggagagaccatgggctttttcatcaaggaggcctgagttcaaatccttcttctatgtctgattctctctgtgaccttgggtgcctgactgacagaagttcttgcccccggggagctggtgtggacagaggaggggcgtgctggtcaccatgacaacagagacaggccccgactctgaggtgaagaaagctcaggaggaggccccgcagcagcccgaggctgctgccgctgtgaccacccctgtgacccctgcaggccacggccacccagaggccaactccaatgagaagcatccatcccagcaggacacgcggcctgctgaacagagcctagacatggaggagaaggactacagtgaggccgatggcctttcggagaggaccacgcccagcaaggcccagaaatcgccccagaagattgccaagaaatacaagagtgccatctgccgggtcactctgcttgatgcctcggagtatgagtgtgaggtggag

SEQ ID NO: 130565 - DNA, 5967 bp, Homo sapiens
  Payload ID: 5535
  Gene Symbol: EPB41L1
  Gene Name: erythrocyte membrane protein band 4.1-like 1
  Uniprot ID: Q9H4G0
  ENST ID: ENST00000441639
  CDS Start-End: 169-2508
gcatttctgcgcagctctagcgcgcctcggagcccgccggggcagccgccggacaccaggaccgcgagccagacagctcccggaagccgcgccgccgccgccaggtgcctgactgacagaagttcttgcccccggggagctggtgtggacagaggagggagcctagacatggaggagaaggactacagtgaggccgatggcctttcggagaggaccacgcccagcaaggcccagaaatcgccccagaagattgccaagaaatacaagagtgccatctgccgggtcactctgcttgatgcctcggagtatgagtgtgaggtggagaaacatggccggggccaggtgctgtttgacctggtctgtgaacacctcaacctcctagagaaggactacttcggcctgaccttctgtgatgctgacagccagaagaactggctggacccctccaaggagatcaagaagcagatccggagtagcccctggaattttgccttcacagtcaagttctacccgcctgatcctgcccagctgacagaagacatcacaagatactacctgtgcctgcagctgcgggcagacatcatcacgggccggctgccatgctcctttgtcacgcatgccctactgggctcctacgctgtgcaggctgagctgggtgactatgatgctgaggagcatgtgggcaactatgtcagcgagctccgcttcgcccctaaccagacccgggagctggaggagaggatcatggagctgcataagacatatagggggatgaccccgggagaagcagaaatccacttcttagagaatgccaagaagctttccatgtacggagtagacctgcaccatgccaaggactctgagggcatcgacatcatgttaggcgtttgtgccaatggcctgctcatctaccgggaccggctgagaatcaaccgctttgcctggcccaagatcctcaagatctcctacaagaggagtaacttctatatcaagatccggcctggggagtatgagcaatttgagagcacaattggctttaagctcccaaaccaccggtcagccaagagactgtggaaggtctgcatcgagcatcatacattcttccggctggtgtcccctgagcccccacccaagggcttcctggtgatgggctccaagttccggtacagtgggaggacccaggcacagactcgccaggccagcgccctcattgaccggcctgcacccttctttgagcgttcttccagcaaacggtacaccatgtcccgcagccttgatggagcagagttctcccgcccagcctcggtcagcgagaaccatgatgcagggcctgacggtgacaagcgggatgaggatggcgagtctggggggcaacggtcagaggctgaggagggagaggtcaggactccaaccaagatcaaggagctaaagttcttagacaagccagaagatgtcttgctgaagcaccaggccagcatcaatgagctcaaaaggaccctgaaggagcccaacagcaaactcatccaccgggatcgagactgggaacgggagcgcaggctgccctcctcccccgcctccccctcccccaagggcacccctgagaaagccaatgagagagcagggctgagggagggctccgaggagaaagtcaaaccaccacgtccccgggccccagagagtgacacaggcgatgaggaccaggaccaggagagggacacggtgttcctgaaggacaaccacctggccattgagcgcaagtgctccagcatcacggtcagctctacgtctagcctggaggctgaggtggacttcacggtcattggtgactaccatggcagcgccttcgaagacttctcccgcagcctgcctgagctcgaccgggacaaaagcgactcggacactgagggcctgctgttctcccgggatctcaacaagggggcccccagccaggatgatgagtctgggggcattgaggacagcccggatcgaggggcctgctccaccccggatatgccccagtttgagcccgtgaaaacagaaaccatgactgtcagcagtctggccattagaaagaagattgagccggaggccgtactgcagaccagagtctccgctatggataacacccaggagaacagtctcaagtccgggaagggggcagctgccatgatcccaggcccacagacggtggccacggaaatccgttctctttctccgatcatcgggaaagatgtcctcaccagcacctacggcgccactgcggaaaccctctcaacctccaccaccacccatgtcaccaaaactgtgaaaggagggttttctgagacaaggatcgagaagcgaatcatcattactggggatgaagatgtcgatcaagaccaggccctggctttggccatcaaggaggccaaactgcagcatcctgatatgctggtaaccaaagctgtcgtatacagagaaacagacccatccccagaggagagggacaagaagccacaggaatcctgacctctgtgaagagatcctggcatttctggtccaacccaagccagagaaccattaagaaggggccttcattctggattctccgacgcaacactgacgtcccagctgcgacgtactgtcactgatgagagactgggaagggaaaagcatatatatatagatatatagagatatagatatatatacaggaaacaccgcatccttgcactgctgctggggctggcagagcagttggctgacagcaacaaccgacatctgaacacctacatttcctttgcagacaaattgaagaactggtgggatttttttcaagaaaaaaaattatataataactataatcccttgctcacccctttcccccgccaaataagaaacgcaagccagaccacgatgattgtagaagtccctcccgccctggttctgcacgttacagttagcagacgagcaattccatttgttcttctccagcatctctaaggcccacttgaatgcaaaggaaaacacttgcacagcaaagcaagagaagtcacagcagcaagacacgcacagtcaaccattttccgagaaaaaaagaaaattccccacttggaaagaaagaggaggaacactggattcttactttctggatcttgacactgggctgcaaaacctaccttcctctctcccgcctcccctcaccctcaactctcaatgtcttgctgtcattttctgtctcggctccctcctcccccttcccccttcccccaccccacacccttcaccctctgtgtcctggtccttctgagggccactgcagatgactctcctttgaaatgagaaaaagaaaagaaagcaagaacagaaaacgaagccacaggaagggaagtagacattgtatgcttatggtttctcattatgaaggtgcagcttgtaggaggtttgtacggatgtgctttgaagttatgtatattacatataacaggaaaaaatattaaaataaacagtgctggtaagtatgaagctgacattctaaaattataattatctgactgtgattgatgtatcctgaggttcctagatctcactgaactggcccagctaaggagacctggactctgggtgtgggttggctcacagtaggggctgacgggttcagtgtagtaatactgtgtgtggtgtttgtaattggttgattggtggggaggggtggggggccctaatggagaggtgtgggtttggcaagaaagaagcaacacagatgtcgtccccaaaatgccagttcaagacaccttctccctgcccccctggtagtaacagtcagggcctggtctgtgctcaggtactgggtcccagtctgggactctgctgctgaagttgccacagtagaggtccctggcttagtccttatctccctacggggcttgccttggttttcagtcttctctctctttctctcttttttttttttttgccacattctgcccttccctgaccccattgtaataaccaactccatatccaaagggaggtggtgctctcagccattgtagaagatggtggctttaacctgactgtctaaaaattcccagctaagccttttcctctactctcttccttgttctgaatcatttcttcttctcaggccaaagtagccatggtaaggaggcttcatggggcagaccctgaaagatcaaaactgcatttgcaaagccctcccctgtcccaggacaaagctgagactgacgggtgatgttgctcataggctccagctctgcataagaccttggcttggagacctccctctcagtcaacagctgaactctgagcttgtgcccagaaattaccccaagaccacaggaacccttcaagaagctcccatcacaagcttggcattgctctctgccacacgtgggcttcctcaggcttgtctgccacaagctacttctctgagctcagaaagtgccccttgatgagggaaaatgtcccactgcactgcgaatttctcagttccattttacctcccagtcctccttctaaaccagttaataaattcattccacaagtatttactgattacctgcttgtgccagggactattctcaggctgaagaaggtgggaggggagggcggaacctgaggagccacctgagccagctttatatttcaaccatggctggcccatctgagagcatctccccactctcgccaacctatcggggcatagcccagggatgcccccaggcggcccaggttagatgcgtccctttggcttgtcagtgatgacatacaccttagctgcttagctggtgctggcctgaggcagggcaggaaatcagaatagcatttgcttctctgggcaaatgggaagttcagcggggcagcagaatcagtggcattccccctggtgcaggccggtgggtccactccaactccccctgagtgtagcagcacactttccatacaccaggttctttctacaatcctggtggaaaagccacagaaccttcttcctgcccttcttgagagttccccctctttctgggtcaagagctggagtggtggctccatcctctctgggccacttcggtctaggaactcatctttgcaggaaccaggagtcctgagcacactgaacacacctcagagggaggatccttgttgtggattttgcacctggctttggggcaggggtgaagtgaccaggcttagcttgtggagtttatgggccaccagggtttggggaaatcaccatcccgcggatgctgtgacctcccttctacggagatgcaggcagtgccacgagggaggaggggacctgcaaagctagaatctagggcactgtttcctccccatccttctctttgtagagaatagagacgtttgtcttgtctgtcttcaacctacttttccttttctcttttttgtttctcatcctctctgtgccacctctccacccaggaggccatgtagcatagtggaaaaagtccctgagggcggttaggagttctgggtgaccatcctggctcagctcctaactcaccatgtgacatcaggctatccccattccccctcttgggcctcagtttcccgacttgcaaaataagcagaaagaaccagatgctctccagggtctttttctactttgctatctcatgggtcttcattttctcttattttgttttctctggatcttttccatctgagggtacaggaagtaccaggacctgtttcagtttttgaatcctgcaagcacattccaagactggcctgaaactgcatgagcaacatcactcgaaataattttttttttcaaaagcaccttaacaaccaattgcgatgctgtcctgttcctttttactcacacccttctctcctttctcgtccccatgctcccccacctcagtgctccgtgctgtatgcgtgtgctctctgttcttgtatactcaatataagtgaaataaatgtgtttgatgctgaaccata

SEQ ID NO: 130566 - DNA, 896 bp, Homo sapiens
  Payload ID: 5535
  Gene Symbol: EPB41L1
  Gene Name: erythrocyte membrane protein band 4.1-like 1
  ENST ID: ENST00000430276
  CDS Start-End: 126-896
cgagagagcggggcatttctgcgcagctctagcgcgcctcggagcccgccggggcagccgccggacaccaggaccgcgagccagacagctcccggaagccgcgccgccgccgccagagcctagacatggaggagaaggactacagtgaggccgatggcctttcggagaggaccacgcccagcaaggcccagaaatcgccccagaagattgccaagaaatacaagagtgccatctgccgggtcactctgcttgatgcctcggagtatgagtgtgaggtggagaaacatggccggggccaggtgctgtttgacctggtctgtgaacacctcaacctcctagagaaggactacttcggcctgaccttctgtgatgctgacagccagaagaactggctggacccctccaaggagatcaagaagcagatccggagtagcccctggaattttgccttcacagtcaagttctacccgcctgatcctgcccagctgacagaagacatcacaagatactacctgtgcctgcagctgcgggcagacatcatcacgggccggctgccatgctcctttgtcacgcatgccctactgggctcctacgctgtgcaggctgagctgggtgactatgatgctgaggagcatgtgggcaactatgtcagcgagctccgcttcgcccctaaccagacccgggagctggaggagaggatcatggagctgcataagacatatagggggatgaccccgggagaagcagaaatccacttcttagagaatgccaagaagctttccatgtacggagtagacctgcaccatgccaaggactctgagggcatcgacatcatgttaggcgtttgtgccaatggcctgctcatctaccgggaccggctgagaatcaaccgcttt

SEQ ID NO: 130567 - DNA, 803 bp, Homo sapiens
  Payload ID: 5535
  Gene Symbol: EPB41L1
  Gene Name: erythrocyte membrane protein band 4.1-like 1
  ENST ID: ENST00000451082
  CDS Start-End: 1-803
aacggtacaccatgtcccgcagccttgatggagcagagttctcccgcccagcctcggtcagcgagaaccatgatgcagggcctgacggtgacaagcgggatgaggatggcgagtctggggggcaacggtcagaggctgaggagggagaggtcaggactccaaccaagatcaaggagctaaagttcttagacaagccagaagatgtcttgctgaagcaccaggccagcatcaatgagctcaaaaggaccctgaaggagcccaacagcaaactcatccaccgggatcgagactgggaacgggagcgcaggctgccctcctcccccgcctccccctcccccaagggcacccctgagaaagccaatgagcccgtgaaaacagaaaccatgactgtcagcagtctggccattagaaagaagattgagccggaggccgtactgcagaccagagtctccgctatggataacacccaggttgatgggagtgcctcagtggggagggagttcatagcaaccactccctccatcaccacggagaccatatcgaccaccatggagaacagtctcaagtccgggaagggggcagctgccatgatcccaggcccacagacggtggccacggaaatccgttctctttctccgatcatcgggaaagatgtcctcaccagcacctacggcgccactgcggaaaccctctcaacctccaccaccacccatgtcaccaaaactgtgaaaggagggttttctgagacaaggatcgagaagcgaatcatcattactggggatgaagatgtcgatcaagaccag

SEQ ID NO: 130568 - DNA, 460 bp, Homo sapiens
  Payload ID: 5535
  Gene Symbol: EPB41L1
  Gene Name: erythrocyte membrane protein band 4.1-like 1
  ENST ID: ENST00000427533
  CDS Start-End: 284-460
tctcctgctggcttctgagagctgacggaacaggttccagcaaggcagaccctgacacagaagccagacctgtccagcagggaccccatacactgggaggcttcctgggaaactggaaggcagaagccacgcagacttctagtcctggttccactgcttactcggctgctgttcgtacctgcctcatggttttcttggggaggatcaatgaggtagaacctgcaaagggcttagcagagagcctagcacctactgagcgctcagtaaaggcgtgctggtcaccatgacaacagagacaggccccgactctgaggtgaagaaagctcaggaggaggccccgcagcagcccgaggctgctgccgctgtgaccacccctgtgacccctgcaggccacggccacccagaggccaactccaatgagaagcatccatcccagcaggacacgcggcctgctgaacag

SEQ ID NO: 130569 - DNA, 769 bp, Homo sapiens
  Payload ID: 5535
  Gene Symbol: EPB41L1
  Gene Name: erythrocyte membrane protein band 4.1-like 1
  ENST ID: ENST00000452261
  CDS Start-End: 204-769
cgcctcggagcccgccggggcagccgccggacaccaggaccgcgagccagacagctcccggaagccgcgccgccgccgccagccacagcacagccggacagaggaggtggattaggagttcccgggagggagcctgctcagcctttccctgacatttgggcaaatgtgtggggagatgcggagctcaaggcgtgctggtcaccatgacaacagagacaggccccgactctgaggtgaagaaagctcaggaggaggccccgcagcagcccgaggctgctgccgctgtgaccacccctgtgacccctgcaggccacggccacccagaggccaactccaatgagaagcatccatcccagcaggacacgcggcctgctgaacagagcctagacatggaggagaaggactacagtgaggccgatggcctttcggagaggaccacgcccagcaaggcccagaaatcgccccagaagattgccaagaaatacaagagtgccatctgccgggtcactctgcttgatgcctcggagtatgagtgtgaggtggagaaacatggccggggccaggtgctgtttgacctggtctgtgaacacctcaacctcctagagaaggactacttcggcctgaccttctgtgatgctgacagccagaagaactggctggacccctccaaggagatcaagaagcagatccggagtagcccctggaattttgccttcacagtcaagttctacccgcctgatcctgcccagctgacagaagacatcacaag

SEQ ID NO: 130570 - DNA, 3287 bp, Homo sapiens
  Payload ID: 5535
  Gene Symbol: EPB41L1
  Gene Name: erythrocyte membrane protein band 4.1-like 1
  Uniprot ID: Q9H4G0
  ENST ID: ENST00000628415
  CDS Start-End: 179-2284
atttctgcgcagctctagcgcgcctcggagcccgccggggcagccgccggacaccaggaccgcgagccagacagctcccggaagccgcgccgccgccgccaggtgcctgactgacagaagttcttgcccccggggagctggtgtggacagaggaggggctgctgttcgtacctgcctcatggttttcttggggaggatcaatgaggtagaacctgcaaagggcttagcagagagcctagcacctactgagcgctcagtaaagagcctagacatggaggagaaggactacagtgaggccgatggcctttcggagaggaccacgcccagcaaggcccagaaatcgccccagaagattgccaagaaatacaagagtgccatctgccgggtcactctgcttgatgcctcggagtatgagtgtgaggtggagaaacatggccggggccaggtgctgtttgacctggtctgtgaacacctcaacctcctagagaaggactacttcggcctgaccttctgtgatgctgacagccagaagaactggctggacccctccaaggagatcaagaagcagatccggagtagcccctggaattttgccttcacagtcaagttctacccgcctgatcctgcccagctgacagaagacatcacaagatactacctgtgcctgcagctgcgggcagacatcatcacgggccggctgccatgctcctttgtcacgcatgccctactgggctcctacgctgtgcaggctgagctgggtgactatgatgctgaggagcatgtgggcaactatgtcagcgagctccgcttcgcccctaaccagacccgggagctggaggagaggatcatggagctgcataagacatatagggggatgaccccgggagaagcagaaatccacttcttagagaatgccaagaagctttccatgtacggagtagacctgcaccatgccaaggactctgagggcatcgacatcatgttaggcgtttgtgccaatggcctgctcatctaccgggaccggctgagaatcaaccgctttgcctggcccaagatcctcaagatctcctacaagaggagtaacttctatatcaagatccggcctggggagtatgagcaatttgagagcacaattggctttaagctcccaaaccaccggtcagccaagagactgtggaaggtctgcatcgagcatcatacattcttccggctggtgtcccctgagcccccacccaagggcttcctggtgatgggctccaagttccggtacagtgggaggacccaggcacagactcgccaggccagcgccctcattgaccggcctgcacccttctttgagcgttcttccagcaaacggtacaccatgtcccgcagccttgatggagcagagttctcccgcccagcctcggtcagcgagaaccatgatgcagggcctgacggtgacaagcgggatgaggatggcgagtctggggggcaacggtcagaggctgaggagggagaggtcaggactccaaccaagatcaaggagctaaagttcttagacaagccagaagatgtcttgctgaagcaccaggccagcatcaatgagctcaaaaggaccctgaaggagcccaacagcaaactcatccaccgggatcgagactgggaacgggagcgcaggctgccctcctcccccgcctccccctcccccaagggcacccctgagaaagccaatgagcccgtgaaaacagaaaccatgactgtcagcagtctggccattagaaagaagattgagccggaggccgtactgcagaccagagtctccgctatggataacacccagcaggttgatgggagtgcctcagtggggagggagttcatagcaaccactccctccatcaccacggagaccatatcgaccaccatggagaacagtctcaagtccgggaagggggcagctgccatgatcccaggcccacagacggtggccacggaaatccgttctctttctccgatcatcgggaaagatgtcctcaccagcacctacggcgccactgcggaaaccctctcaacctccaccaccacccatgtcaccaaaactgtgaaaggagggttttctgagacaaggatcgagaagcgaatcatcattactggggatgaagatgtcgatcaagaccaggccctggctttggccatcaaggaggccaaactgcagcatcctgatatgctggtaaccaaagctgtcgtatacagagaaacagacccatccccagaggagagggacaagaagccacaggaatcctgacctctgtgaagagatcctggcatttctggtccaacccaagccagagaaccattaagaaggggccttcattctggattctccgacgcaacactgacgtcccagctgcgacgtactgtcactgatgagagactgggaagggaaaagcatatatatatagatatatagagatatagatatatatacaggaaacaccgcatccttgcactgctgctggggctggcagagcagttggctgacagcaacaaccgacatctgaacacctacatttcctttgcagacaaattgaagaactggtgggatttttttcaagaaaaaaaattatataataactataatcccttgctcacccctttcccccgccaaataagaaacgcaagccagaccacgatgattgtagaagtccctcccgccctggttctgcacgttacagttagcagacgagcaattccatttgttcttctccagcatctctaaggcccacttgaatgcaaaggaaaacacttgcacagcaaagcaagagaagtcacagcagcaagacacgcacagtcaaccattttccgagaaaaaaagaaaattccccacttggaaagaaagaggaggaacactggattcttactttctggatcttgacactgggctgcaaaacctaccttcctctctcccgcctcccctcaccctcaactctcaatgtcttgctgtcattttctgtctcggctccctcctcccccttcccccttcccccaccccacacccttcaccctctgtgtcctggtccttctgagggccactgcagatgactctcctttgaaatgagaaaaagaaaagaaagcaagaacagaaaacgaagccacaggaagggaagtagacattgtatgcttatggtttctcattatgaaggtgcagcttgtaggaggtttgtacggatgtgctttgaagttatgtatattacatataacaggaaaaaatattaaaataaacagtgctggtaagtatgaagctgaca

SEQ ID NO: 130571 - DNA, 4457 bp, Homo sapiens
  Payload ID: 5536
  Gene Symbol: EPB41L2
  Gene Name: erythrocyte membrane protein band 4.1-like 2
  Uniprot ID: O43491
  ENST ID: ENST00000337057
  CDS Start-End: 183-3200
gtcgcgggaggggcttccgccgcgagggggcggggccggccctcagagtcctctgacggccccagtcagggaatttcaatttgaaacctagcggagggaggaggcaggcgcggctgccggcggctgggactgaagagggacgggtcccgcggcgagcgagctcctgagcataagctgtggccatgactactgaagtaggctctgtgtctgaagtgaagaaggactctagccagttaggaacagatgcaaccaaggaaaaacctaaagaagtagcagaaaatcagcagaatcagtcttccgatccagaggaggaaaaaggttcccagccacctcctgcagctgaaagccaaagtagtctacgccgccagaagagagagaaggaaacatcggagagcaggggtatttctcggttcataccgccatggcttaagaagcaaaagtcatataccttagtagtggccaaagatggaggagataaaaaagagcctacccaagctgttgttgaagaacaggtcttagataaagaggaaccccttccagaagaacagagacaggctaagggtgatgctgaagaaatggctcagaagaaacaagagattaaagttgaagtcaaggaagaaaaaccctcagtgagcaaggaagaaaaaccctcagtgagcaaagtggagatgcagcctactgaattagtaagtaaggagagagaagagaaggtaaaagaaacacaggaagacaaattagaaggaggagcagcaaaaagggagaccaaggaagtgcagaccaatgagctgaaagcagagaaggcatctcaaaaagtcaccaagaagaccaaaactgtccagtgtaaagtgaccctcttagatggcaccgaatacagctgtgacctggagaaacatgccaagggacaagtgttatttgacaaagtgtgtgaacacctcaatctcttggagaaagactactttggacttttgtttcaggaaagccctgagcagaaaaactggttagatcctgctaaagaaataaagagacaactgagaaaccttccatggctattcacttttaatgtgaagttttatcctcctgatccttctcaattgactgaagatatcaccagatacttcttgtgccttcagctccggcaggacattgcctctggccgcctgccctgctcttttgtgactcatgctctcctgggatcctacaccctgcaggctgaacttggtgactatgacccagaagaacatggcagcatcgacctcagtgaattccagtttgcccctactcagactaaggagctggaagagaaggtggcagagctgcacaaaacccacaggggcttatcgccagcacaagctgattcccagttcttagaaaatgcaaagaggctttccatgtatggtgttgacctacatcatgccaaggactcagaaggtgtggacatcaagctgggcgtgtgtgctaatggacttctcatttacaaagacagactgcgaatcaatcgttttgcttggccgaaaatcttaaaaatttcctataaacgcagtaacttctacattaaagtcagaccggcagagctggaacagtttgagagtaccattggattcaaactgccaaaccaccgggcagcgaaaagactatggaaagtgtgcgtggagcatcatactttctacaggcttgtttctccagagcagccaccaaaagccaagttcctgaccttggggtccaaatttcgctatagtggccgcacccaagcacagacccgccaggccagcaccctcatagataggccagcaccacactttgagcgcacttctagtaaacgggtctccaggagtctagatggagctccgattggtgtcatggaccaaagtcttatgaaggattttcctggcgctgctggggagatttcagcctatggacctggacttgtcagcattgccgtggtacaagatggggacggcaggagggaagtgagaagcccaactaaagccccacatttgcagctcattgaaggaaagaaaaattccttgagagtagaaggggataatatttatgtcagacatagcaatttaatgttggaggaactggataaggcccaggaggacatactgaaacatcaggctagcattagtgaactcaagcgcaattttatggaatccacacctgagccgcgccctaatgaatgggaaaaacgacgtatcacacctctgtccctacagacacaagggagttcacatgagactctgaatatagtggaggagaagaagcgggcagaggttgggaaagacgaaagagtaatcacagaagaaatgaatggtaaagagatatcacctgggagtggtcctggggagattcgtaaggtggagcctgtgacacaaaaagactccacctccctgtcttctgagagcagcagcagcagcagtgagagtgaggaggaagacgtgggagagtaccgtccccaccaccgagtgaccgagggcaccatcagggaggaacaggagtatgaagaagaggtggaggaagaaccccgcccggcagccaaggtagtagagagggaggaagcagtgcccgaagccagcccagtcacacaagcaggtgccagtgtaatcacagtagaaacagtgatccaggaaaatgtaggtgcccaaaagatacccggagagaagagtgtacacgaaggcgctcttaagcaagacatgggagaagaagcagaggaagagccacagaaagttaacggagaggtgtcccatgttgacattgatgttttgccacaaattatttgttgttcagagccaccagtggtaaaaacagagatggtaacaatttctgatgcctcacaaaggacagaaatctccaccaaggaagtccccattgtccaaactgagaccaaaaccatcacatatgagtctccacagattgatggcggggctggtggtgattcgggcacgttactgaccgcacaaaccatcacatctgagtccgtgtcaacaacgacaaccacacacatcaccaagactgtaaaaggtggaatttctgaaacaagaattgagaaacgcattgtgatcacaggagatggagatattgatcatgaccaggcactggctcaggcgatcagggaagccagagagcagcaccctgacatgtcggtcacaagagtggtggtacacaaagaaacagagttggctgaggaaggggaagattaagtaagaaagtcattttttaaacaacactcaactttgtgaacccctgaagattttttgaccgttccaagtcttaatgccacaccactattccagcgaatttatgctacaactggtaacaatgaccagaagcctgaagaattaaaatgccaacaccaaacctttccttaccagctctggtctatattgctcccatgcatttaatatattattttgttttataaccacttctaaatattctcagttctttctttttgttgttgttaattaaggggttttggttttgttttctgtttactttgtgtgcaactacctgcttttaatgactcactttgatcaaatgacagtgaacaaagccagcccaagctggtaaggtgctgttcacttgaacaggtgctgttgcgcagaaaggaaactctgtgactaatttagatagtggctttccttcttctggattcttttcattgaattctcacagtaaatatttacggagttttcaaattgcagcaaatatactgtatgagaaaatattaatacagattaaaagcctttcttacatcttgaaaattttctaatatttgagaatttcacagggatgttttttatattggacccttttgactttccagtcctgtgactttctacttttagtagagagtcagaatctctggactggagaataatgaagaagttcactgactgtgcactgtgcttagagaccctgccgcaccacagtgccaatgcttgtcagacacatgcccttcggcagcattccagaacaggagggaagagaaagagaaaactttcttcccttctactaaaagattcaggcagcttaaaaccttagtgctttctttcttaacatacccacatttcaattctttccattatttgaacacttgggtagaactcttgctttgtattaaacctctttgtctacacatgtaaaacttaccttttgttattgagcaggcctatctctttcagatagttttatgattcacacaggtttgaggatgctggggagagggggagggggctgtggtggtgttctgttggttacaagaaagttataccatttaaagctggcaccagagacccgatagggacttattaactatattgaacattttttcctttgcctttgaccctatgtatagttacgatgccagattagatttatagcagcctcaagttgtattaaatgatattttgcttcctgtaatactattataaaataaagtttgtttattctctaaa

SEQ ID NO: 130572 - DNA, 4456 bp, Homo sapiens
  Payload ID: 5536
  Gene Symbol: EPB41L2
  Gene Name: erythrocyte membrane protein band 4.1-like 2
  Uniprot ID: O43491
  ENST ID: ENST00000368128
  CDS Start-End: 192-3209
cgggaggggcttccgccgcgagggggcggggccggccctcagagtcctctgacggccccagtcagggaatttcaatttgaaacctagcggagggaggaggcaggcgcggctgccggcggctgggactgaagagggacgggtcccgcggcgagcgagctcctgaggtacggcgtcgggcataagctgtggccatgactactgaagtaggctctgtgtctgaagtgaagaaggactctagccagttaggaacagatgcaaccaaggaaaaacctaaagaagtagcagaaaatcagcagaatcagtcttccgatccagaggaggaaaaaggttcccagccacctcctgcagctgaaagccaaagtagtctacgccgccagaagagagagaaggaaacatcggagagcaggggtatttctcggttcataccgccatggcttaagaagcaaaagtcatataccttagtagtggccaaagatggaggagataaaaaagagcctacccaagctgttgttgaagaacaggtcttagataaagaggaaccccttccagaagaacagagacaggctaagggtgatgctgaagaaatggctcagaagaaacaagagattaaagttgaagtcaaggaagaaaaaccctcagtgagcaaggaagaaaaaccctcagtgagcaaagtggagatgcagcctactgaattagtaagtaaggagagagaagagaaggtaaaagaaacacaggaagacaaattagaaggaggagcagcaaaaagggagaccaaggaagtgcagaccaatgagctgaaagcagagaaggcatctcaaaaagtcaccaagaagaccaaaactgtccagtgtaaagtgaccctcttagatggcaccgaatacagctgtgacctggagaaacatgccaagggacaagtgttatttgacaaagtgtgtgaacacctcaatctcttggagaaagactactttggacttttgtttcaggaaagccctgagcagaaaaactggttagatcctgctaaagaaataaagagacaactgagaaaccttccatggctattcacttttaatgtgaagttttatcctcctgatccttctcaattgactgaagatatcaccagatacttcttgtgccttcagctccggcaggacattgcctctggccgcctgccctgctcttttgtgactcatgctctcctgggatcctacaccctgcaggctgaacttggtgactatgacccagaagaacatggcagcatcgacctcagtgaattccagtttgcccctactcagactaaggagctggaagagaaggtggcagagctgcacaaaacccacaggggcttatcgccagcacaagctgattcccagttcttagaaaatgcaaagaggctttccatgtatggtgttgacctacatcatgccaaggactcagaaggtgtggacatcaagctgggcgtgtgtgctaatggacttctcatttacaaagacagactgcgaatcaatcgttttgcttggccgaaaatcttaaaaatttcctataaacgcagtaacttctacattaaagtcagaccggcagagctggaacagtttgagagtaccattggattcaaactgccaaaccaccgggcagcgaaaagactatggaaagtgtgcgtggagcatcatactttctacaggcttgtttctccagagcagccaccaaaagccaagttcctgaccttggggtccaaatttcgctatagtggccgcacccaagcacagacccgccaggccagcaccctcatagataggccagcaccacactttgagcgcacttctagtaaacgggtctccaggagtctagatggagctccgattggtgtcatggaccaaagtcttatgaaggattttcctggcgctgctggggagatttcagcctatggacctggacttgtcagcattgccgtggtacaagatggggacggcaggagggaagtgagaagcccaactaaagccccacatttgcagctcattgaaggaaagaaaaattccttgagagtagaaggggataatatttatgtcagacatagcaatttaatgttggaggaactggataaggcccaggaggacatactgaaacatcaggctagcattagtgaactcaagcgcaattttatggaatccacacctgagccgcgccctaatgaatgggaaaaacgacgtatcacacctctgtccctacagacacaagggagttcacatgagactctgaatatagtggaggagaagaagcgggcagaggttgggaaagacgaaagagtaatcacagaagaaatgaatggtaaagagatatcacctgggagtggtcctggggagattcgtaaggtggagcctgtgacacaaaaagactccacctccctgtcttctgagagcagcagcagcagcagtgagagtgaggaggaagacgtgggagagtaccgtccccaccaccgagtgaccgagggcaccatcagggaggaacaggagtatgaagaagaggtggaggaagaaccccgcccggcagccaaggtagtagagagggaggaagcagtgcccgaagccagcccagtcacacaagcaggtgccagtgtaatcacagtagaaacagtgatccaggaaaatgtaggtgcccaaaagatacccggagagaagagtgtacacgaaggcgctcttaagcaagacatgggagaagaagcagaggaagagccacagaaagttaacggagaggtgtcccatgttgacattgatgttttgccacaaattatttgttgttcagagccaccagtggtaaaaacagagatggtaacaatttctgatgcctcacaaaggacagaaatctccaccaaggaagtccccattgtccaaactgagaccaaaaccatcacatatgagtctccacagattgatggcggggctggtggtgattcgggcacgttactgaccgcacaaaccatcacatctgagtccgtgtcaacaacgacaaccacacacatcaccaagactgtaaaaggtggaatttctgaaacaagaattgagaaacgcattgtgatcacaggagatggagatattgatcatgaccaggcactggctcaggcgatcagggaagccagagagcagcaccctgacatgtcggtcacaagagtggtggtacacaaagaaacagagttggctgaggaaggggaagattaaaaagtcattttttaaacaacactcaactttgtgaacccctgaagattttttgaccgttccaagtcttaatgccacaccactattccagcgaatttatgctacaactggtaacaatgaccagaagcctgaagaattaaaatgccaacaccaaacctttccttaccagctctggtctatattgctcccatgcatttaatatattattttgttttataaccacttctaaatattctcagttctttctttttgttgttgttaattaaggggttttggttttgttttctgtttactttgtgtgcaactacctgcttttaatgactcactttgatcaaatgacagtgaacaaagccagcccaagctggtaaggtgctgttcacttgaacaggtgctgttgcgcagaaaggaaactctgtgactaatttagatagtggctttccttcttctggattcttttcattgaattctcacagtaaatatttacggagttttcaaattgcagcaaatatactgtatgagaaaatattaatacagattaaaagcctttcttacatcttgaaaattttctaatatttgagaatttcacagggatgttttttatattggacccttttgactttccagtcctgtgactttctacttttagtagagagtcagaatctctggactggagaataatgaagaagttcactgactgtgcactgtgcttagagaccctgccgcaccacagtgccaatgcttgtcagacacatgcccttcggcagcattccagaacaggagggaagagaaagagaaaactttcttcccttctactaaaagattcaggcagcttaaaaccttagtgctttctttcttaacatacccacatttcaattctttccattatttgaacacttgggtagaactcttgctttgtattaaacctctttgtctacacatgtaaaacttaccttttgttattgagcaggcctatctctttcagatagttttatgattcacacaggtttgaggatgctggggagagggggagggggctgtggtggtgttctgttggttacaagaaagttataccatttaaagctggcaccagagacccgatagggacttattaactatattgaacattttttcctttgcctttgaccctatgtatagttacgatgccagattagatttatagcagcctcaagttgtattaaatgatattttgcttcctgtaatactattataaaataaagtttgtttattct

SEQ ID NO: 130573 - DNA, 3369 bp, Homo sapiens
  Payload ID: 5536
  Gene Symbol: EPB41L2
  Gene Name: erythrocyte membrane protein band 4.1-like 2
  Uniprot ID: O43491
  ENST ID: ENST00000392427
  CDS Start-End: 94-2115
agcggagggaggaggcaggcgcggctgccggcggctgggactgaagagggacgggtcccgcggcgagcgagctcctgagcataagctgtggccatgactactgaagtaggctctgtgtctgaagtgaagaaggactctagccagttaggaacagatgcaaccaaggaaaaacctaaagaagtagcagaaaatcagcagaatcagtcttccgatccagaggaggaaaaaggttcccagccacctcctgcagctgaaagccaaagtagtctacgccgccagaagagagagaaggaaacatcggagagcaggggtatttctcggttcataccgccatggcttaagaagcaaaagtcatataccttagtagtggccaaagatggaggagataaaaaagagcctacccaagctgttgttgaagaacaggtcttagataaagaggaaccccttccagaagaacagagacaggctaagggtgatgctgaagaaatggctcagaagaaacaagagattaaagttgaagtcaaggaagaaaaaccctcagtgagcaaggaagaaaaaccctcagtgagcaaagtggagatgcagcctactgaattagtaagtaaggagagagaagagaaggtaaaagaaacacaggaagacaaattagaaggaggagcagcaaaaagggagaccaaggaagtgcagaccaatgagctgaaagcagagaaggcatctcaaaaagtcaccaagaagaccaaaactgtccagtgtaaagtgaccctcttagatggcaccgaatacagctgtgacctggagaaacatgccaagggacaagtgttatttgacaaagtgtgtgaacacctcaatctcttggagaaagactactttggacttttgtttcaggaaagccctgagcagaaaaactggttagatcctgctaaagaaataaagagacaactgagaaaccttccatggctattcacttttaatgtgaagttttatcctcctgatccttctcaattgactgaagatatcaccagatacttcttgtgccttcagctccggcaggacattgcctctggccgcctgccctgctcttttgtgactcatgctctcctgggatcctacaccctgcaggctgaacttggtgactatgacccagaagaacatggcagcatcgacctcagtgaattccagtttgcccctactcagactaaggagctggaagagaaggtggcagagctgcacaaaacccacaggggcttatcgccagcacaagctgattcccagttcttagaaaatgcaaagaggctttccatgtatggtgttgacctacatcatgccaaggactcagaaggtgtggacatcaagctgggcgtgtgtgctaatggacttctcatttacaaagacagactgcgaatcaatcgttttgcttggccgaaaatcttaaaaatttcctataaacgcagtaacttctacattaaagtcagaccggcagagctggaacagtttgagagtaccattggattcaaactgccaaaccaccgggcagcgaaaagactatggaaagtgtgcgtggagcatcatactttctacaggcttgtttctccagagcagccaccaaaagccaagttcctgaccttggggtccaaatttcgctatagtggccgcacccaagcacagacccgccaggccagcaccctcatagataggccagcaccacactttgagcgcacttctagtaaacgggtctccaggagtctagatggagctccgattggtgtcatggaccaaagtcttatgaaggattttcctggcgctgctggggagatttcagcctatggacctggacttgtcagcattgccgtggtacaagatggggacggcaggagggaagtgagaagcccaactaaagccccacatttgcagctcattgaaggaaagactgtaaaaggtggaatttctgaaacaagaattgagaaacgcattgtgatcacaggagatggagatattgatcatgaccaggcactggctcaggcgatcagggaagccagagagcagcaccctgacatgtcggtcacaagagtggtggtacacaaagaaacagagttggctgaggaaggggaagattaagtaagaaagtcattttttaaacaacactcaactttgtgaacccctgaagattttttgaccgttccaagtcttaatgccacaccactattccagcgaatttatgctacaactggtaacaatgaccagaagcctgaagaattaaaatgccaacaccaaacctttccttaccagctctggtctatattgctcccatgcatttaatatattattttgttttataaccacttctaaatattctcagttctttctttttgttgttgttaattaaggggttttggttttgttttctgtttactttgtgtgcaactacctgcttttaatgactcactttgatcaaatgacagtgaacaaagccagcccaagctggtaaggtgctgttcacttgaacaggtgctgttgcgcagaaaggaaactctgtgactaatttagatagtggctttccttcttctggattcttttcattgaattctcacagtaaatatttacggagttttcaaattgcagcaaatatactgtatgagaaaatattaatacagattaaaagcctttcttacatcttgaaaattttctaatatttgagaatttcacagggatgttttttatattggacccttttgactttccagtcctgtgactttctacttttagtagagagtcagaatctctggactggagaataatgaagaagttcactgactgtgcactgtgcttagagaccctgccgcaccacagtgccaatgcttgtcagacacatgcccttcggcagcattccagaacaggagggaagagaaagagaaaactttcttcccttctactaaaagattcaggcagcttaaaaccttagtgctttctttcttaacatacccacatttcaattctttccattatttgaacacttgggtagaactcttgctttgtattaaacctctttgtctacacatgtaaaacttaccttttgttattgagcaggcctatctctttcagatagttttatgattcacacaggtttgaggatgctggggagagggggagggggctgtggtggtgttctgttggttacaagaaagttataccatttaaagctggcaccagagacccgatagggacttattaactatattgaacattttttcctttgcctttgaccctatgtatagttacgatgccagattagatttatagcagcctcaagttgtattaaatgatattttgcttcctgtaatactattataaaataaagtttgtttattctct

SEQ ID NO: 130574 - DNA, 1138 bp, Homo sapiens
  Payload ID: 5536
  Gene Symbol: EPB41L2
  Gene Name: erythrocyte membrane protein band 4.1-like 2
  ENST ID: ENST00000456097
  CDS Start-End: 1-1138
cttggggtccaaatttcgctatagtggccgcacccaagcacagacccgccaggccagcaccctcatagataggccagcaccacactttgagcgcacttctagtaaacgggtctccaggagtctagatggagctccgattggtgtcatggaccaaagtcttatgaaggattttcctggcgctgctggggagatttcagcctatggacctggacttgtcagcattgccgtggtacaagatggggacggcaggagggaagtgagaagcccaactaaagccccacatttgcagctcattgaaggaaagaaaaattccttgagagtagaaggggataatatttatgtcagacatagcaatttaatgttggaggaactggataaggcccaggaggacatactgaaacatcaggctagcattagtgaactcaagcgcaattttatggaatccacacctgagccgcgccctaatgaatgggaaaaacgacgtatcacacctctgtccctacagacacaagggagaaaaggagaccatcttttcaaggatattttatccgtgaaggagaagtacctgatgccgacaatatggacagttgaagaaaaagctcaggagacggacaagacacgtgctcccgagtcagaagggccttgcactggagccagggatgctgttaagagttcacatgagactctgaatatagtggaggagaagaagcgggcagaggttgggaaagacgaaagagtaatcacagaagaaatgaatggtaaagagatatcacctgggagtggtcctggggagattcgtaaggtggagcctgtgacacaaaaagactccacctccctgtcttctgagagcagcagcagcagcagtgagagtgaggaggaagacgtgggagagtaccgtccccaccaccgagtgaccgagggcaccatcagggaggaacaggagtatgaagaagaggtggaggaagaaccccgcccggcagccaaggtagtagagagggaggaagcagtgcccgaagccagcccagtcacacaagcaggtgccagtgtaatcacagtagaaacagtgatccaggaaaatgtaggtgcccaaaagatacccggagagaagagtgtacacgaaggcgctcttaagcaagac

SEQ ID NO: 130575 - DNA, 3677 bp, Homo sapiens
  Payload ID: 5536
  Gene Symbol: EPB41L2
  Gene Name: erythrocyte membrane protein band 4.1-like 2
  Uniprot ID: O43491
  ENST ID: ENST00000445890
  CDS Start-End: 177-2420
ccgcgagggggcggggccggccctcagagtcctctgacggccccagtcagggaatttcaatttgaaacctagcggagggaggaggcaggcgcggctgccggcggctgggactgaagagggacgggtcccgcggcgagcgagctcctgaggtacggcgtcgggcataagctgtggccatgactactgaagtaggctctgtgtctgaagtgaagaaggactctagccagttaggaacagatgcaaccaaggaaaaacctaaagaagtagcagaaaatcagcagaatcagtcttccgatccagaggaggaaaaaggttcccagccacctcctgcagctgaaagccaaagtagtctacgccgccagaagagagagaaggaaacatcggagagcaggggtatttctcggttcataccgccatggcttaagaagcaaaagtcatataccttagtagtggccaaagatggaggagataaaaaagagcctacccaagctgttgttgaagaacaggtcttagataaagaggaaccccttccagaagaacagagacaggctaagggtgatgctgaagaaatggctcagaagaaacaagagattaaagttgaagtcaaggaagaaaaaccctcagtgagcaaggaagaaaaaccctcagtgagcaaagtggagatgcagcctactgaattagtaagtaaggagagagaagagaaggtaaaagaaacacaggaagacaaattagaaggaggagcagcaaaaagggagaccaaggaagtgcagaccaatgagctgaaagcagagaaggcatctcaaaaagtcaccaagaagaccaaaactgtccagtgtaaagtgaccctcttagatggcaccgaatacagctgtgacctggagaaacatgccaagggacaagtgttatttgacaaagtgtgtgaacacctcaatctcttggagaaagactactttggacttttgtttcaggaaagccctgagcagaaaaactggttagatcctgctaaagaaataaagagacaactgagaaaccttccatggctattcacttttaatgtgaagttttatcctcctgatccttctcaattgactgaagatatcaccagatacttcttgtgccttcagctccggcaggacattgcctctggccgcctgccctgctcttttgtgactcatgctctcctgggatcctacaccctgcaggctgaacttggtgactatgacccagaagaacatggcagcatcgacctcagtgaattccagtttgcccctactcagactaaggagctggaagagaaggtggcagagctgcacaaaacccacaggggcttatcgccagcacaagctgattcccagttcttagaaaatgcaaagaggctttccatgtatggtgttgacctacatcatgccaaggactcagaaggtgtggacatcaagctgggcgtgtgtgctaatggacttctcatttacaaagacagactgcgaatcaatcgttttgcttggccgaaaatcttaaaaatttcctataaacgcagtaacttctacattaaagtcagaccggcagagctggaacagtttgagagtaccattggattcaaactgccaaaccaccgggcagcgaaaagactatggaaagtgtgcgtggagcatcatactttctacaggcttgtttctccagagcagccaccaaaagccaagttcctgaccttggggtccaaatttcgctatagtggccgcacccaagcacagacccgccaggccagcaccctcatagataggccagcaccacactttgagcgcacttctagtaaacgggtctccaggagtctagatggagctccgattggtgtcatggaccaaagtcttatgaaggattttcctggcgctgctggggagatttcagcctatggacctggacttgtcagcattgccgtggtacaagatggggacggcaggagggaagtgagaagcccaactaaagccccacatttgcagctcattgaaggaaagccaccagtggtaaaaacagagatggtaacaatttctgatgcctcacaaaggacagaaatctccaccaaggaagtccccattgtccaaactgagaccaaaaccatcacatatgagtctccacagattgatggcggggctggtggtgattcgggcacgttactgaccgcacaaaccatcacatctgagtccgtgtcaacaacgacaaccacacacatcaccaagactgtaaaaggtggaatttctgaaacaagaattgagaaacgcattgtgatcacaggagatggagatattgatcatgaccaggcactggctcaggcgatcagggaagccagagagcagcaccctgacatgtcggtcacaagagtggtggtacacaaagaaacagagttggctgaggaaggggaagattaagtaagaaagtcattttttaaacaacactcaactttgtgaacccctgaagattttttgaccgttccaagtcttaatgccacaccactattccagcgaatttatgctacaactggtaacaatgaccagaagcctgaagaattaaaatgccaacaccaaacctttccttaccagctctggtctatattgctcccatgcatttaatatattattttgttttataaccacttctaaatattctcagttctttctttttgttgttgttaattaaggggttttggttttgttttctgtttactttgtgtgcaactacctgcttttaatgactcactttgatcaaatgacagtgaacaaagccagcccaagctggtaaggtgctgttcacttgaacaggtgctgttgcgcagaaaggaaactctgtgactaatttagatagtggctttccttcttctggattcttttcattgaattctcacagtaaatatttacggagttttcaaattgcagcaaatatactgtatgagaaaatattaatacagattaaaagcctttcttacatcttgaaaattttctaatatttgagaatttcacagggatgttttttatattggacccttttgactttccagtcctgtgactttctacttttagtagagagtcagaatctctggactggagaataatgaagaagttcactgactgtgcactgtgcttagagaccctgccgcaccacagtgccaatgcttgtcagacacatgcccttcggcagcattccagaacaggagggaagagaaagagaaaactttcttcccttctactaaaagattcaggcagcttaaaaccttagtgctttctttcttaacatacccacatttcaattctttccattatttgaacacttgggtagaactcttgctttgtattaaacctctttgtctacacatgtaaaacttaccttttgttattgagcaggcctatctctttcagatagttttatgattcacacaggtttgaggatgctggggagagggggagggggctgtggtggtgttctgttggttacaagaaagttataccatttaaagctggcaccagagacccgatagggacttattaactatattgaacattttttcctttgcctttgaccctatgtatagttacgatgccagattagatttatagcagcctcaagttgtattaaatgatattttgcttcctgtaatactattataaaataaagtttgtttattctctaaa

SEQ ID NO: 130576 - DNA, 2436 bp, Homo sapiens
  Payload ID: 5536
  Gene Symbol: EPB41L2
  Gene Name: erythrocyte membrane protein band 4.1-like 2
  ENST ID: ENST00000527659
  CDS Start-End: 1-2436
atgactactgaagtaggctctgtgtctgaagtgaagaaggactctagccagttaggaacagatgcaaccaaggaaaaacctaaagaagtagcagaaaatcagcagaatcagtcttccgatccagaggaggaaaaaggttcccagccacctcctgcagctgaaagccaaagtagtctacgccgccagaagagagagaaggaaacatcggagagcaggggtatttctcggttcataccgccatggcttaagaagcaaaagtcatataccttagtagtggccaaagatggaggagataaaaaagagcctacccaagctgttgttgaagaacaggtcttagataaagaggaaccccttccagaagaacagagacaggctaagggtgatgctgaagaaatggctcagaagaaacaagagattaaagttgaagtcaaggaagaaaaaccctcagtgagcaaggaagaaaaaccctcagtgagcaaagtggagatgcagcctactgaattagtaagtaaggagagagaagagaaggtaaaagaaacacaggaagacaaattagaaggaggagcagcaaaaagggagaccaaggaagtgcagaccaatgagctgaaagcagagaaggcatctcaaaaagtcaccaagaagaccaaaactgtccagtgtaaagtgaccctcttagatggcaccgaatacagctgtgacctggagaaacatgccaagggacaagtgttatttgacaaagtgtgtgaacacctcaatctcttggagaaagactactttggacttttgtttcaggaaagccctgagcagaaaaactggttagatcctgctaaagaaataaagagacaactgagaaaccttccatggctattcacttttaatgtgaagttttatcctcctgatccttctcaattgactgaagatatcaccagatacttcttgtgccttcagctccggcaggacattgcctctggccgcctgccctgctcttttgtgactcatgctctcctgggatcctacaccctgcaggctgaacttggtgactatgacccagaagaacatggcagcatcgacctcagtgaattccagtttgcccctactcagactaaggagctggaagagaaggtggcagagctgcacaaaacccacaggggcttatcgccagcacaagctgattcccagttcttagaaaatgcaaagaggctttccatgtatggtgttgacctacatcatgccaaggactcagaaggtgtggacatcaagctgggcgtgtgtgctaatggacttctcatttacaaagacagactgcgaatcaatcgttttgcttggccgaaaatcttaaaaatttcctataaacgcagtaacttctacattaaagtcagaccggcagagctggaacagtttgagagtaccattggattcaaactgccaaaccaccgggcagcgaaaagactatggaaagtgtgcgtggagcatcatactttctacaggcttgtttctccagagcagccaccaaaagccaagttcctgaccttggggtccaaatttcgctatagtggccgcacccaagcacagacccgccaggccagcaccctcatagataggccagcaccacactttgagcgcacttctagtaaacgggtctccaggagtctagatggagctccgattggtgtcatggaccaaagtcttatgaaggattttcctggcgctgctggggagatttcagcctatggacctggacttgtcagcattgccgtggtacaagatggggacggcaggagggaagtgagaagcccaactaaagccccacatttgcagctcattgaaggaaagagttcacatgagactctgaatatagtggaggagaagaagcgggcagaggttgggaaagacgaaagagtaatcacagaagaaatgaatggtaaagagatatcacctgggagtggtcctggggagattcgtaaggtggagcctgtgacacaaaaagactccacctccctgtcttctgagagcagcagcagcagcagtgagagtgaggaggaagacgtgggagagtaccgtccccaccaccgagtgaccgagggcaccatcagggaggaacaggagtatgaagaagaggtggaggaagaaccccgcccggcagccaagattgatggcggggctggtggtgattcgggcacgttactgaccgcacaaaccatcacatctgagtccgtgtcaacaacgacaaccacacacatcaccaagactgtaaaaggtggaatttctgaaacaagaattgagaaacgcattgtgatcacaggagatggagatattgatcatgaccaggcactggctcaggcgatcagggaagccagagagcagcaccctgacatgtcggtcacaagagtggtggtacacaaagaaacagagttggctgaggaaggggaagattaa

SEQ ID NO: 130577 - DNA, 2121 bp, Homo sapiens
  Payload ID: 5536
  Gene Symbol: EPB41L2
  Gene Name: erythrocyte membrane protein band 4.1-like 2
  ENST ID: ENST00000525193
  CDS Start-End: 1-2121
atgactactgaagtaggctctgtgtctgaagtgaagaaggactctagccagttaggaacagatgcaaccaaggaaaaacctaaagaagtagcagaaaatcagcagaatcagtcttccgatccagaggaggaaaaaggttcccagccacctcctgcagctgaaagccaaagtagtctacgccgccagaagagagagaaggaaacatcggagagcaggggtatttctcggttcataccgccatggcttaagaagcaaaagtcatataccttagtagtggccaaagatggaggagataaaaaagagcctacccaagctgttgttgaagaacaggtcttagataaagaggaaccccttccagaagaacagagacaggctaagggtgatgctgaagaaatggctcagaagaaacaagagattaaagttgaagtcaaggaagaaaaaccctcagtgagcaaggaagaaaaaccctcagtgagcaaagtggagatgcagcctactgaattagtaagtaaggagagagaagagaaggtaaaagaaacacaggaagacaaattagaaggaggagcagcaaaaagggagaccaaggaagtgcagaccaatgagctgaaagcagagaaggcatctcaaaaagtcaccaagaagaccaaaactgtccagtgtaaagtgaccctcttagatggcaccgaatacagctgtgacctggagaaacatgccaagggacaagtgttatttgacaaagtgtgtgaacacctcaatctcttggagaaagactactttggacttttgtttcaggaaagccctgagcagaaaaactggttagatcctgctaaagaaataaagagacaactgagaaaccttccatggctattcacttttaatgtgaagttttatcctcctgatccttctcaattgactgaagatatcaccagatacttcttgtgccttcagctccggcaggacattgcctctggccgcctgccctgctcttttgtgactcatgctctcctgggatcctacaccctgcaggctgaacttggtgactatgacccagaagaacatggcagcatcgacctcagtgaattccagtttgcccctactcagactaaggagctggaagagaaggtggcagagctgcacaaaacccacaggggcttatcgccagcacaagctgattcccagttcttagaaaatgcaaagaggctttccatgtatggtgttgacctacatcatgccaaggactcagaaggtgtggacatcaagctgggcgtgtgtgctaatggacttctcatttacaaagacagactgcgaatcaatcgttttgcttggccgaaaatcttaaaaatttcctataaacgcagtaacttctacattaaagtcagaccggcagagctggaacagtttgagagtaccattggattcaaactgccaaaccaccgggcagcgaaaagactatggaaagtgtgcgtggagcatcatactttctacaggcttgtttctccagagcagccaccaaaagccaagttcctgaccttggggtccaaatttcgctatagtggccgcacccaagcacagacccgccaggccagcaccctcatagataggccagcaccacactttgagcgcacttctagtaaacgggtctccaggagtctagatggagctccgattggtgtcatggaccaaagtcttatgaaggattttcctggcgctgctggggagatttcagcctatggacctggacttgtcagcattgccgtggtacaagatggggacggcaggagggaagtgagaagcccaactaaagccccacatttgcagctcattgaaggaaagattgatggcggggctggtggtgattcgggcacgttactgaccgcacaaaccatcacatctgagtccgtgtcaacaacgacaaccacacacatcaccaagactgtaaaaggtggaatttctgaaacaagaattgagaaacgcattgtgatcacaggagatggagatattgatcatgaccaggcactggctcaggcgatcagggaagccagagagcagcaccctgacatgtcggtcacaagagtggtggtacacaaagaaacagagttggctgaggaaggggaagattaa

SEQ ID NO: 130578 - DNA, 591 bp, Homo sapiens
  Payload ID: 5536
  Gene Symbol: EPB41L2
  Gene Name: erythrocyte membrane protein band 4.1-like 2
  ENST ID: ENST00000532499
  CDS Start-End: 104-591
gaacttcggcttcatcctgtgacttgctcagatgtctttatgtgatccatagtattgtagaaaaacctcagattcaaatgaaagatatgcataagctgtggccatgactactgaagtaggctctgtgtctgaagtgaagaaggactctagccagttaggaacagatgcaaccaaggaaaaacctaaagaagtagcagaaaatcagcagaatcagtcttccgatccagaggaggaaaaaggttcccagccacctcctgcagctgaaagccaaagtagtctacgccgccagaagagagagaaggaaacatcggagagcaggggtatttctcggttcataccgccatggcttaagaagcaaaagtcatataccttagtagtggccaaagatggaggagataaaaaagagcctacccaagctgttgttgaagaacaggtcttagataaagaggaaccccttccagaagaacagagacaggctaagggtgatgctgaagaaatggctcagaagaaacaagagattaaagttgaagtcaaggaagaaaaaccctcagtgagcaaggaagaaaaaccctcagtgagcaaagtggagat

SEQ ID NO: 130579 - DNA, 552 bp, Homo sapiens
  Payload ID: 5536
  Gene Symbol: EPB41L2
  Gene Name: erythrocyte membrane protein band 4.1-like 2
  ENST ID: ENST00000526983
  CDS Start-End: 92-552
gatgcagacatagcctatttggcagctattttatgatagtggtgaacagcacacaaaactccttcagaccctcccaacataagctgtggccatgactactgaagtaggctctgtgtctgaagtgaagaaggactctagccagttaggaacagatgcaaccaaggaaaaacctaaagaagtagcagaaaatcagcagaatcagtcttccgatccagaggaggaaaaaggttcccagccacctcctgcagctgaaagccaaagtagtctacgccgccagaagagagagaaggaaacatcggagagcaggggtatttctcggttcataccgccatggcttaagaagcaaaagtcatataccttagtagtggccaaagatggaggagataaaaaagagcctacccaagctgttgttgaagaacaggtcttagataaagaggaaccccttccagaagaacagagacaggctaagggtgatgctgaagaaatggctcagaagaaacaagagattaaagttgaagtcaaggaagaaaaaccctcagtgagcaaggaaga

SEQ ID NO: 130580 - DNA, 2568 bp, Homo sapiens
  Payload ID: 5536
  Gene Symbol: EPB41L2
  Gene Name: erythrocyte membrane protein band 4.1-like 2
  Uniprot ID: O43491
  ENST ID: ENST00000525271
  CDS Start-End: 125-2146
aatttcaatttgaaacctagcggagggaggaggcaggcgcggctgccggcggctgggactgaagagggacgggtcccgcggcgagcgagctcctgaggtacggcgtcgggcataagctgtggccatgactactgaagtaggctctgtgtctgaagtgaagaaggactctagccagttaggaacagatgcaaccaaggaaaaacctaaagaagtagcagaaaatcagcagaatcagtcttccgatccagaggaggaaaaaggttcccagccacctcctgcagctgaaagccaaagtagtctacgccgccagaagagagagaaggaaacatcggagagcaggggtatttctcggttcataccgccatggcttaagaagcaaaagtcatataccttagtagtggccaaagatggaggagataaaaaagagcctacccaagctgttgttgaagaacaggtcttagataaagaggaaccccttccagaagaacagagacaggctaagggtgatgctgaagaaatggctcagaagaaacaagagattaaagttgaagtcaaggaagaaaaaccctcagtgagcaaggaagaaaaaccctcagtgagcaaagtggagatgcagcctactgaattagtaagtaaggagagagaagagaaggtaaaagaaacacaggaagacaaattagaaggaggagcagcaaaaagggagaccaaggaagtgcagaccaatgagctgaaagcagagaaggcatctcaaaaagtcaccaagaagaccaaaactgtccagtgtaaagtgaccctcttagatggcaccgaatacagctgtgacctggagaaacatgccaagggacaagtgttatttgacaaagtgtgtgaacacctcaatctcttggagaaagactactttggacttttgtttcaggaaagccctgagcagaaaaactggttagatcctgctaaagaaataaagagacaactgagaaaccttccatggctattcacttttaatgtgaagttttatcctcctgatccttctcaattgactgaagatatcaccagatacttcttgtgccttcagctccggcaggacattgcctctggccgcctgccctgctcttttgtgactcatgctctcctgggatcctacaccctgcaggctgaacttggtgactatgacccagaagaacatggcagcatcgacctcagtgaattccagtttgcccctactcagactaaggagctggaagagaaggtggcagagctgcacaaaacccacaggggcttatcgccagcacaagctgattcccagttcttagaaaatgcaaagaggctttccatgtatggtgttgacctacatcatgccaaggactcagaaggtgtggacatcaagctgggcgtgtgtgctaatggacttctcatttacaaagacagactgcgaatcaatcgttttgcttggccgaaaatcttaaaaatttcctataaacgcagtaacttctacattaaagtcagaccggcagagctggaacagtttgagagtaccattggattcaaactgccaaaccaccgggcagcgaaaagactatggaaagtgtgcgtggagcatcatactttctacaggcttgtttctccagagcagccaccaaaagccaagttcctgaccttggggtccaaatttcgctatagtggccgcacccaagcacagacccgccaggccagcaccctcatagataggccagcaccacactttgagcgcacttctagtaaacgggtctccaggagtctagatggagctccgattggtgtcatggaccaaagtcttatgaaggattttcctggcgctgctggggagatttcagcctatggacctggacttgtcagcattgccgtggtacaagatggggacggcaggagggaagtgagaagcccaactaaagccccacatttgcagctcattgaaggaaagactgtaaaaggtggaatttctgaaacaagaattgagaaacgcattgtgatcacaggagatggagatattgatcatgaccaggcactggctcaggcgatcagggaagccagagagcagcaccctgacatgtcggtcacaagagtggtggtacacaaagaaacagagttggctgaggaaggggaagattaagtaagaaagtcattttttaaacaacactcaactttgtgaacccctgaagattttttgaccgttccaagtcttaatgccacaccactattccagcgaatttatgctacaactggtaacaatgaccagaagcctgaagaattaaaatgccaacaccaaacctttccttaccagctctggtctatattgctcccatgcatttaatatattattttgttttataaccacttctaaatattctcagttctttctttttgttgttgttaattaaggggttttggttttgttttctgtttactttgtgtgcaactacctgcttttaatgactcactttgatcaaatgacagtgaacaaagccagcccaagctggtaaggtgctgttcacttgaacaggtgctgttgcgcagaaaggaaactctgtgact

SEQ ID NO: 130581 - DNA, 727 bp, Homo sapiens
  Payload ID: 5536
  Gene Symbol: EPB41L2
  Gene Name: erythrocyte membrane protein band 4.1-like 2
  ENST ID: ENST00000527017
  CDS Start-End: 7-727
gcgaagatggaagaagaggaaacgcagctggaagaggaactggataaggcccaggaggacatactgaaacatcaggctagcattagtgaactcaagcgcaattttatggaatccacacctgagccgcgccctaatgaatgggaaaaacgacgtatcacacctctgtccctacagacacaagggagcctagaagaggagataacatcaattttgtttagtgaaaagggcttttctgatagcatgaaagccaccttcacttcagccaccacttggacagcagagggcgctgttgtgagcgctaatgcaccttctgaaaagctttcttcctcgcccttctcacacttgcttgagacacgtgctcccgagtcagaagggccttgcactggagccagggatgctgttaagccaccagtggtaaaaacagagatggtaacaatttctgatgcctcacaaaggacagaaatctccaccaaggaagtccccattgtccaaactgagaccaaaaccatcacatatgagtctccacagattgatggcggggctggtggtgattcgggcacgttactgaccgcacaaaccatcacatctgagtccgtgtcaacaacgacaaccacacacatcaccaagactgtaaaaggtggaatttctgaaacaagaattgagaaacgcattgtgatcacaggagatggagatattgatcatgaccaggcactggctcaggcgatca

SEQ ID NO: 130582 - DNA, 3663 bp, Homo sapiens
  Payload ID: 5536
  Gene Symbol: EPB41L2
  Gene Name: erythrocyte membrane protein band 4.1-like 2
  Uniprot ID: O43491
  ENST ID: ENST00000528282
  CDS Start-End: 163-2406
actgtacttaaggcgtttatcctaatccaggcgtccttggattgcacggtgccagcaagcaaggtggtaacagtgatcacagcctgggctgcaggtgtgagttctgaggagatctatggtttacccagcgaatttattactgataaatcataagctgtggccatgactactgaagtaggctctgtgtctgaagtgaagaaggactctagccagttaggaacagatgcaaccaaggaaaaacctaaagaagtagcagaaaatcagcagaatcagtcttccgatccagaggaggaaaaaggttcccagccacctcctgcagctgaaagccaaagtagtctacgccgccagaagagagagaaggaaacatcggagagcaggggtatttctcggttcataccgccatggcttaagaagcaaaagtcatataccttagtagtggccaaagatggaggagataaaaaagagcctacccaagctgttgttgaagaacaggtcttagataaagaggaaccccttccagaagaacagagacaggctaagggtgatgctgaagaaatggctcagaagaaacaagagattaaagttgaagtcaaggaagaaaaaccctcagtgagcaaggaagaaaaaccctcagtgagcaaagtggagatgcagcctactgaattagtaagtaaggagagagaagagaaggtaaaagaaacacaggaagacaaattagaaggaggagcagcaaaaagggagaccaaggaagtgcagaccaatgagctgaaagcagagaaggcatctcaaaaagtcaccaagaagaccaaaactgtccagtgtaaagtgaccctcttagatggcaccgaatacagctgtgacctggagaaacatgccaagggacaagtgttatttgacaaagtgtgtgaacacctcaatctcttggagaaagactactttggacttttgtttcaggaaagccctgagcagaaaaactggttagatcctgctaaagaaataaagagacaactgagaaaccttccatggctattcacttttaatgtgaagttttatcctcctgatccttctcaattgactgaagatatcaccagatacttcttgtgccttcagctccggcaggacattgcctctggccgcctgccctgctcttttgtgactcatgctctcctgggatcctacaccctgcaggctgaacttggtgactatgacccagaagaacatggcagcatcgacctcagtgaattccagtttgcccctactcagactaaggagctggaagagaaggtggcagagctgcacaaaacccacaggggcttatcgccagcacaagctgattcccagttcttagaaaatgcaaagaggctttccatgtatggtgttgacctacatcatgccaaggactcagaaggtgtggacatcaagctgggcgtgtgtgctaatggacttctcatttacaaagacagactgcgaatcaatcgttttgcttggccgaaaatcttaaaaatttcctataaacgcagtaacttctacattaaagtcagaccggcagagctggaacagtttgagagtaccattggattcaaactgccaaaccaccgggcagcgaaaagactatggaaagtgtgcgtggagcatcatactttctacaggcttgtttctccagagcagccaccaaaagccaagttcctgaccttggggtccaaatttcgctatagtggccgcacccaagcacagacccgccaggccagcaccctcatagataggccagcaccacactttgagcgcacttctagtaaacgggtctccaggagtctagatggagctccgattggtgtcatggaccaaagtcttatgaaggattttcctggcgctgctggggagatttcagcctatggacctggacttgtcagcattgccgtggtacaagatggggacggcaggagggaagtgagaagcccaactaaagccccacatttgcagctcattgaaggaaagccaccagtggtaaaaacagagatggtaacaatttctgatgcctcacaaaggacagaaatctccaccaaggaagtccccattgtccaaactgagaccaaaaccatcacatatgagtctccacagattgatggcggggctggtggtgattcgggcacgttactgaccgcacaaaccatcacatctgagtccgtgtcaacaacgacaaccacacacatcaccaagactgtaaaaggtggaatttctgaaacaagaattgagaaacgcattgtgatcacaggagatggagatattgatcatgaccaggcactggctcaggcgatcagggaagccagagagcagcaccctgacatgtcggtcacaagagtggtggtacacaaagaaacagagttggctgaggaaggggaagattaagtaagaaagtcattttttaaacaacactcaactttgtgaacccctgaagattttttgaccgttccaagtcttaatgccacaccactattccagcgaatttatgctacaactggtaacaatgaccagaagcctgaagaattaaaatgccaacaccaaacctttccttaccagctctggtctatattgctcccatgcatttaatatattattttgttttataaccacttctaaatattctcagttctttctttttgttgttgttaattaaggggttttggttttgttttctgtttactttgtgtgcaactacctgcttttaatgactcactttgatcaaatgacagtgaacaaagccagcccaagctggtaaggtgctgttcacttgaacaggtgctgttgcgcagaaaggaaactctgtgactaatttagatagtggctttccttcttctggattcttttcattgaattctcacagtaaatatttacggagttttcaaattgcagcaaatatactgtatgagaaaatattaatacagattaaaagcctttcttacatcttgaaaattttctaatatttgagaatttcacagggatgttttttatattggacccttttgactttccagtcctgtgactttctacttttagtagagagtcagaatctctggactggagaataatgaagaagttcactgactgtgcactgtgcttagagaccctgccgcaccacagtgccaatgcttgtcagacacatgcccttcggcagcattccagaacaggagggaagagaaagagaaaactttcttcccttctactaaaagattcaggcagcttaaaaccttagtgctttctttcttaacatacccacatttcaattctttccattatttgaacacttgggtagaactcttgctttgtattaaacctctttgtctacacatgtaaaacttaccttttgttattgagcaggcctatctctttcagatagttttatgattcacacaggtttgaggatgctggggagagggggagggggctgtggtggtgttctgttggttacaagaaagttataccatttaaagctggcaccagagacccgatagggacttattaactatattgaacattttttcctttgcctttgaccctatgtatagttacgatgccagattagatttatagcagcctcaagttgtattaaatgatattttgcttcctgtaatactattataaaataaagtttgtttattctctaaa

SEQ ID NO: 130583 - DNA, 3914 bp, Homo sapiens
  Payload ID: 5536
  Gene Symbol: EPB41L2
  Gene Name: erythrocyte membrane protein band 4.1-like 2
  Uniprot ID: O43491
  ENST ID: ENST00000530481
  CDS Start-End: 99-2657
gaggaggcaggcgcggctgccggcggctgggactgaagagggacgggtcccgcggcgagcgagctcctgaggtacggcgtcgggcataagctgtggccatgactactgaagtaggctctgtgtctgaagtgaagaaggactctagccagttaggaacagatgcaaccaaggaaaaacctaaagaagtagcagaaaatcagcagaatcagtcttccgatccagaggaggaaaaaggttcccagccacctcctgcagctgaaagccaaagtagtctacgccgccagaagagagagaaggaaacatcggagagcaggggtatttctcggttcataccgccatggcttaagaagcaaaagtcatataccttagtagtggccaaagatggaggagataaaaaagagcctacccaagctgttgttgaagaacaggtcttagataaagaggaaccccttccagaagaacagagacaggctaagggtgatgctgaagaaatggctcagaagaaacaagagattaaagttgaagtcaaggaagaaaaaccctcagtgagcaaggaagaaaaaccctcagtgagcaaagtggagatgcagcctactgaattagtaagtaaggagagagaagagaaggtaaaagaaacacaggaagacaaattagaaggaggagcagcaaaaagggagaccaaggaagtgcagaccaatgagctgaaagcagagaaggcatctcaaaaagtcaccaagaagaccaaaactgtccagtgtaaagtgaccctcttagatggcaccgaatacagctgtgacctggagaaacatgccaagggacaagtgttatttgacaaagtgtgtgaacacctcaatctcttggagaaagactactttggacttttgtttcaggaaagccctgagcagaaaaactggttagatcctgctaaagaaataaagagacaactgagaaaccttccatggctattcacttttaatgtgaagttttatcctcctgatccttctcaattgactgaagatatcaccagatacttcttgtgccttcagctccggcaggacattgcctctggccgcctgccctgctcttttgtgactcatgctctcctgggatcctacaccctgcaggctgaacttggtgactatgacccagaagaacatggcagcatcgacctcagtgaattccagtttgcccctactcagactaaggagctggaagagaaggtggcagagctgcacaaaacccacaggggcttatcgccagcacaagctgattcccagttcttagaaaatgcaaagaggctttccatgtatggtgttgacctacatcatgccaaggactcagaaggtgtggacatcaagctgggcgtgtgtgctaatggacttctcatttacaaagacagactgcgaatcaatcgttttgcttggccgaaaatcttaaaaatttcctataaacgcagtaacttctacattaaagtcagaccggcagagctggaacagtttgagagtaccattggattcaaactgccaaaccaccgggcagcgaaaagactatggaaagtgtgcgtggagcatcatactttctacaggcttgtttctccagagcagccaccaaaagccaagttcctgaccttggggtccaaatttcgctatagtggccgcacccaagcacagacccgccaggccagcaccctcatagataggccagcaccacactttgagcgcacttctagtaaacgggtctccaggagtctagatggagctccgattggtgtcatggaccaaagtcttatgaaggattttcctggcgctgctggggagatttcagcctatggacctggacttgtcagcattgccgtggtacaagatggggacggcaggagggaagtgagaagcccaactaaagccccacatttgcagctcattgaaggaaagagttcacatgagactctgaatatagtggaggagaagaagcgggcagaggttgggaaagacgaaagagtaatcacagaagaaatgaatggtaaagagatatcacctgggagtggtcctggggagattcgtaaggtggagcctgtgacacaaaaagactccacctccctgtcttctgagagcagcagcagcagcagtgagagtgaggaggaagacgtgggagagtaccgtccccaccaccgagtgaccgagggcaccatcagggaggaacaggagtatgaagaagaggtggaggaagaaccccgcccggcagccaagccaccagtggtaaaaacagagatggtaacaatttctgatgcctcacaaaggacagaaatctccaccaaggaagtccccattgtccaaactgagaccaaaaccatcacatatgagtctccacagattgatggcggggctggtggtgattcgggcacgttactgaccgcacaaaccatcacatctgagtccgtgtcaacaacgacaaccacacacatcaccaagactgtaaaaggtggaatttctgaaacaagaattgagaaacgcattgtgatcacaggagatggagatattgatcatgaccaggcactggctcaggcgatcagggaagccagagagcagcaccctgacatgtcggtcacaagagtggtggtacacaaagaaacagagttggctgaggaaggggaagattaagtaagaaagtcattttttaaacaacactcaactttgtgaacccctgaagattttttgaccgttccaagtcttaatgccacaccactattccagcgaatttatgctacaactggtaacaatgaccagaagcctgaagaattaaaatgccaacaccaaacctttccttaccagctctggtctatattgctcccatgcatttaatatattattttgttttataaccacttctaaatattctcagttctttctttttgttgttgttaattaaggggttttggttttgttttctgtttactttgtgtgcaactacctgcttttaatgactcactttgatcaaatgacagtgaacaaagccagcccaagctggtaaggtgctgttcacttgaacaggtgctgttgcgcagaaaggaaactctgtgactaatttagatagtggctttccttcttctggattcttttcattgaattctcacagtaaatatttacggagttttcaaattgcagcaaatatactgtatgagaaaatattaatacagattaaaagcctttcttacatcttgaaaattttctaatatttgagaatttcacagggatgttttttatattggacccttttgactttccagtcctgtgactttctacttttagtagagagtcagaatctctggactggagaataatgaagaagttcactgactgtgcactgtgcttagagaccctgccgcaccacagtgccaatgcttgtcagacacatgcccttcggcagcattccagaacaggagggaagagaaagagaaaactttcttcccttctactaaaagattcaggcagcttaaaaccttagtgctttctttcttaacatacccacatttcaattctttccattatttgaacacttgggtagaactcttgctttgtattaaacctctttgtctacacatgtaaaacttaccttttgttattgagcaggcctatctctttcagatagttttatgattcacacaggtttgaggatgctggggagagggggagggggctgtggtggtgttctgttggttacaagaaagttataccatttaaagctggcaccagagacccgatagggacttattaactatattgaacattttttcctttgcctttgaccctatgtatagttacgatgccagattagatttatagcagcctcaagttgtattaaatgatattttgcttcctgtaatactattataaaataaagtttgtttattctctaaa

SEQ ID NO: 130584 - DNA, 2926 bp, Homo sapiens
  Payload ID: 5536
  Gene Symbol: EPB41L2
  Gene Name: erythrocyte membrane protein band 4.1-like 2
  ENST ID: ENST00000531410
  CDS Start-End: 1289-1669
taaattatgtaattatatataagagtcactatagggtattttataaggaaggtactattctgttgtctttaacaaatgtatgtgaaaagtgaaacatggctttttgaaaatttagactatataacactaagattgggcctcatagtgctcctttatttaaaattaggtgtttggtttgaggatttttacccctatataaggcaaatttttttcaagtatcctacctctgtgctactaagtcagcattaacatgtacaatatatttttgattattttgttaaatgtggcctggtgatttagtgcctcatattctatggatcctaccaatacatacagtaaatcacaaaatttagagcaaacctaaagaaaaatgtaaagataattgcagtgagtatgcattgtaggacaattgttaaaagtttacctgaggaatgtcaaagatcaacattttagggaattaaatgttgaccaaggagttggaagatgtttcttaacagattattgaatgtctgtgtctcatttttcacatctgataaagactctgagctccttgcttacctctgaaaaatactatgaatggttaaaaaggtaagccgtttgaactctcagatttgacactatcatcctaattaagaaggaaaaggatatatattaggaattaacctataaaggttaaatgatttgcctttgataagggagtcaatatttttattctcaccattttttcccttgagtcaaaattcagtcagtatttgttagttttaaacttctacattcattcttttgaatcatcagatattgagaaatgtccaactatgaaaaactgttcttatttaaagaattttatgtaagtggttatatttcaaagattatttttaaatacccaccattttaatatgaaactagttaaataagccaatccccctcccccagccagaaaagaaatccatatttaacaaactgaatcataggttgaacatttgttccccaatataaagctaaaaacgaattttacatcattatactttaccccatcactagttgctttagacatttcaaattagaacagattgaattatgccatttttgcactctcatattcttgttcctgagtacaaaatattcaaaagcagagcataatctagggactgagaaagagtgaagcttccatcctccattccacctttgcaaaggatcatttccatcattcgtacaacactgtaggtgaagaaagaccaaagaggcttaatattctgcatcttctgagggcctcacagtaaaggcgaagatggaagaagaggaaacgcagctggaagagaaaaattccttgagagtagaaggggataatatttatgtcagacatagcaatttaatgttggagattgatggcggggctggtggtgattcgggcacgttactgaccgcacaaaccatcacatctgagtccgtgtcaacaacgacaaccacacacatcaccaagactgtaaaaggtggaatttctgaaacaagaattgagaaacgcattgtgatcacaggagatggagatattgatcatgaccaggcactggctcaggcgatcagggaagccagagagcagcaccctgacatgtcggtcacaagagtggtggtacacaaagaaacagagttggctgaggaaggggaagattaagtaagaaagtcattttttaaacaacactcaactttgtgaacccctgaagattttttgaccgttccaagtcttaatgccacaccactattccagcgaatttatgctacaactggtaacaatgaccagaagcctgaagaattaaaatgccaacaccaaacctttccttaccagctctggtctatattgctcccatgcatttaatatattattttgttttataaccacttctaaatattctcagttctttctttttgttgttgttaattaaggggttttggttttgttttctgtttactttgtgtgcaactacctgcttttaatgactcactttgatcaaatgacagtgaacaaagccagcccaagctggtaaggtgctgttcacttgaacaggtgctgttgcgcagaaaggaaactctgtgactaatttagatagtggctttccttcttctggattcttttcattgaattctcacagtaaatatttacggagttttcaaattgcagcaaatatactgtatgagaaaatattaatacagattaaaagcctttcttacatcttgaaaattttctaatatttgagaatttcacagggatgttttttatattggacccttttgactttccagtcctgtgactttctacttttagtagagagtcagaatctctggactggagaataatgaagaagttcactgactgtgcactgtgcttagagaccctgccgcaccacagtgccaatgcttgtcagacacatgcccttcggcagcattccagaacaggagggaagagaaagagaaaactttcttcccttctactaaaagattcaggcagcttaaaaccttagtgctttctttcttaacatacccacatttcaattctttccattatttgaacacttgggtagaactcttgctttgtattaaacctctttgtctacacatgtaaaacttaccttttgttattgagcaggcctatctctttcagatagttttatgattcacacaggtttgaggatgctggggagagggggagggggctgtggtggtgttctgttggttacaagaaagttataccatttaaagctggcaccagagacccgatagggacttattaactatattgaacattttttcctttgcctttgaccctatgtatagttacgatgccagattagatttatagcagcctcaagttgtattaaatgatattttgcttcctgtaatactattataaaataaagtttgtttattctctaaa

SEQ ID NO: 130585 - DNA, 981 bp, Homo sapiens
  Payload ID: 5536
  Gene Symbol: EPB41L2
  Gene Name: erythrocyte membrane protein band 4.1-like 2
  ENST ID: ENST00000525198
  CDS Start-End: 308-981
tgttccccaatataaagctaaaaacgaattttacatcattatactttaccccatcactagttgctttagacatttcaaattagaacagattgaattatgccatttttgcactctcatattcttgttcctgagtacaaaatattcaaaagcagagcataatctagggactgagaaagagtgaagcttccatcctccattccacctttgcaaaggatcatttccatcattcgtacaacactgtaggtgaagaaagaccaaagaggcttaatattctgcatcttctgagggcctcacagtaaaggcgaagatggaagaagaggaaacgcagctggaagaggaactggataaggcccaggaggacatactgaaacatcaggctagcattagtgaactcaagcgcaattttatggaatccacacctgagccgcgccctaatgaatgggaaaaacgacgtatcacacctctgtccctacagacacaagggagcctagaagaggagataacatcaattttgtttagtgaaaagggcttttctgatagcatgaaagccaccttcacttcagccaccacttggacagcagagggcgctgttgtgagcgctaatgcaccttctgaaaagctttcttcctcgcccttctcacacttgcttgagacacgtgctcccgagtcagaagggccttgcactggagccagggatgctgttaagagttcacatgagactctgaatatagtggaggagaagaagcgggcagaggttgggaaagacgaaagagtaatcacagaagaaatgaatggtaaagagatatcacctgggagtggtcctggggagattcgtaaggtggagcctgtgacacaaaaagactccacctccctgtcttctgagagcagcagcagcagcagtgagagtgaggaggaagacgtgggagagtaccgtccccaccaccgagtgaccgagggcaccatcagggaggaacaggagta

SEQ ID NO: 130586 - DNA, 565 bp, Homo sapiens
  Payload ID: 5536
  Gene Symbol: EPB41L2
  Gene Name: erythrocyte membrane protein band 4.1-like 2
  ENST ID: ENST00000530707
  CDS Start-End: 212-565
acgcgcggtgcgggtcgggcccgctgtaggctcgcgtccgcgcccccagctgccgcctgcgccgtctgggagctgcggagagggacgcgtgtttcgtgctccgatccttacaattcccacacccaggccatctcaccacagatggcttgttttttctcctcctgcgcctgggggccgagggttgggagcatttttagcataagctgtggccatgactactgaagtaggctctgtgtctgaagtgaagaaggactctagccagttaggaacagatgcaaccaaggaaaaacctaaagaagtagcagaaaatcagcagaatcagtcttccgatccagaggaggaaaaaggttcccagccacctcctgcagctgaaagccaaagtagtctacgccgccagaagagagagaaggaaacatcggagagcaggggtatttctcggttcataccgccatggcttaagaagcaaaagtcatataccttagtagtggccaaagatggaggagataaaaaagagcctacccaagctgttgttgaagaacaggtcttagataaagaggaacccctt

SEQ ID NO: 130587 - DNA, 588 bp, Homo sapiens
  Payload ID: 5536
  Gene Symbol: EPB41L2
  Gene Name: erythrocyte membrane protein band 4.1-like 2
  ENST ID: ENST00000531356
  CDS Start-End: 207-588
ttatagctcttattccctttgtagttagctatttaaatgccctgctctcacactgctggagccacattttatacaggtctgtgtcctcagcagctatcagcaagcacaaagcaattcctcatggaatgaatggatctttacaaaacccaaaagtacagtattaaaatcaagatttcatgggcagaggtaatgcataagctgtggccatgactactgaagtaggctctgtgtctgaagtgaagaaggactctagccagttaggaacagatgcaaccaaggaaaaacctaaagaagtagcagaaaatcagcagaatcagtcttccgatccagaggaggaaaaaggttcccagccacctcctgcagctgaaagccaaagtagtctacgccgccagaagagagagaaggaaacatcggagagcaggggtatttctcggttcataccgccatggcttaagaagcaaaagtcatataccttagtagtggccaaagatggaggagataaaaaagagcctacccaagctgttgttgaagaacaggtcttagataaagaggaaccccttccagaagaacagagacaggctaagggtg

SEQ ID NO: 130588 - DNA, 4186 bp, Homo sapiens
  Payload ID: 5536
  Gene Symbol: EPB41L2
  Gene Name: erythrocyte membrane protein band 4.1-like 2
  ENST ID: ENST00000527411
  CDS Start-End: 132-2939
gtcagggaatttcaatttgaaacctagcggagggaggaggcaggcgcggctgccggcggctgggactgaagagggacgggtcccgcggcgagcgagctcctgaggtacggcgtcgggcataagctgtggccatgactactgaagtaggctctgtgtctgaagtgaagaaggactctagccagttaggaacagatgcaaccaaggaaaaacctaaagaagtagcagaaaatcagcagaatcagtcttccgatccagaggaggaaaaaggttcccagccacctcctgcagctgaaagccaaagtagtctacgccgccagaagagagagaaggaaacatcggagagcaggggtatttctcggttcataccgccatggcttaagaagcaaaagtcatataccttagtagtggccaaagatggaggagataaaaaagagcctacccaagctgttgttgaagaacaggtcttagataaagaggaaccccttccagaagaacagagacaggctaagggtgatgctgaagaaatggctcagaagaaacaagagattaaagttgaagtcaaggaagaaaaaccctcagtgagcaaggaagaaaaaccctcagtgagcaaagtggagatgcagcctactgaattagtaagtaaggagagagaagagaaggtaaaagaaacacaggaagacaaattagaaggaggagcagcaaaaagggagaccaaggaagtgcagaccaatgagctgaaagcagagaaggcatctcaaaaagtcaccaagaagaccaaaactgtccagtgtaaagtgaccctcttagatggcaccgaatacagctgtgacctggagaaacatgccaagggacaagtgttatttgacaaagtgtgtgaacacctcaatctcttggagaaagactactttggacttttgtttcaggaaagccctgagcagaaaaactggttagatcctgctaaagaaataaagagacaactgagaaaccttccatggctattcacttttaatgtgaagttttatcctcctgatccttctcaattgactgaagatatcaccagatacttcttgtgccttcagctccggcaggacattgcctctggccgcctgccctgctcttttgtgactcatgctctcctgggatcctacaccctgcaggctgaacttggtgactatgacccagaagaacatggcagcatcgacctcagtgaattccagtttgcccctactcagactaaggagctggaagagaaggtggcagagctgcacaaaacccacaggggcttatcgccagcacaagctgattcccagttcttagaaaatgcaaagaggctttccatgtatggtgttgacctacatcatgccaaggactcagaaggtgtggacatcaagctgggcgtgtgtgctaatggacttctcatttacaaagacagactgcgaatcaatcgttttgcttggccgaaaatcttaaaaatttcctataaacgcagtaacttctacattaaagtcagaccggcagagctggaacagtttgagagtaccattggattcaaactgccaaaccaccgggcagcgaaaagactatggaaagtgtgcgtggagcatcatactttctacaggcttgtttctccagagcagccaccaaaagccaagttcctgaccttggggtccaaatttcgctatagtggccgcacccaagcacagacccgccaggccagcaccctcatagataggccagcaccacactttgagcgcacttctagtaaacgggtctccaggagtctagatggagctccgattggtgtcatggaccaaagtcttatgaaggattttcctggcgctgctggggagatttcagcctatggacctggacttgtcagcattgccgtggtacaagatggggacggcaggagggaagtgagaagcccaactaaagccccacatttgcagctcattgaaggaaagagttcacatgagactctgaatatagtggaggagaagaagcgggcagaggttgggaaagacgaaagagtaatcacagaagaaatgaatggtaaagagatatcacctgggagtggtcctggggagattcgtaaggtggagcctgtgacacaaaaagactccacctccctgtcttctgagagcagcagcagcagcagtgagagtgaggaggaagacgtgggagagtaccgtccccaccaccgagtgaccgagggcaccatcagggaggaacaggagtatgaagaagaggtggaggaagaaccccgcccggcagccaaggtagtagagagggaggaagcagtgcccgaagccagcccagtcacacaagcaggtgccagtgtaatcacagtagaaacagtgatccaggaaaatgtaggtgcccaaaagatacccggagagaagagtgtacacgaaggcgctcttaagcaagacatgggagaagaagcagaggaagagccacagaaagttaacggagaggtgtcccatgttgacattgatgttttgccacaaattatttgttgttcagagccaccagtggtaaaaacagagatggtaacaatttctgatgcctcacaaaggacagaaatctccaccaaggaagtccccattgtccaaactgagaccaaaaccatcacatatgagtctccacagattgatggcggggctggtggtgattcgggcacgttactgaccgcacaaaccatcacatctgagtccgtgtcaacaacgacaaccacacacatcaccaagactgtaaaaggtggaatttctgaaacaagaattgagaaacgcattgtgatcacaggagatggagatattgatcatgaccaggcactggctcaggcgatcagggaagccagagagcagcaccctgacatgtcggtcacaagagtggtggtacacaaagaaacagagttggctgaggaaggggaagattaagtaagtcattttttaaacaacactcaactttgtgaacccctgaagattttttgaccgttccaagtcttaatgccacaccactattccagcgaatttatgctacaactggtaacaatgaccagaagcctgaagaattaaaatgccaacaccaaacctttccttaccagctctggtctatattgctcccatgcatttaatatattattttgttttataaccacttctaaatattctcagttctttctttttgttgttgttaattaaggggttttggttttgttttctgtttactttgtgtgcaactacctgcttttaatgactcactttgatcaaatgacagtgaacaaagccagcccaagctggtaaggtgctgttcacttgaacaggtgctgttgcgcagaaaggaaactctgtgactaatttagatagtggctttccttcttctggattcttttcattgaattctcacagtaaatatttacggagttttcaaattgcagcaaatatactgtatgagaaaatattaatacagattaaaagcctttcttacatcttgaaaattttctaatatttgagaatttcacagggatgttttttatattggacccttttgactttccagtcctgtgactttctacttttagtagagagtcagaatctctggactggagaataatgaagaagttcactgactgtgcactgtgcttagagaccctgccgcaccacagtgccaatgcttgtcagacacatgcccttcggcagcattccagaacaggagggaagagaaagagaaaactttcttcccttctactaaaagattcaggcagcttaaaaccttagtgctttctttcttaacatacccacatttcaattctttccattatttgaacacttgggtagaactcttgctttgtattaaacctctttgtctacacatgtaaaacttaccttttgttattgagcaggcctatctctttcagatagttttatgattcacacaggtttgaggatgctggggagagggggagggggctgtggtggtgttctgttggttacaagaaagttataccatttaaagctggcaccagagacccgatagggacttattaactatattgaacattttttcctttgcctttgaccctatgtatagttacgatgccagattagatttatagcagcctcaagttgtattaaatgatattttgcttcctgtaatactattataaaataaagtttgtttattc

SEQ ID NO: 130589 - DNA, 4360 bp, Homo sapiens
  Payload ID: 5536
  Gene Symbol: EPB41L2
  Gene Name: erythrocyte membrane protein band 4.1-like 2
  ENST ID: ENST00000530757
  CDS Start-End: 2501-3106
ctgaaatggacttgctttcagacatttcagaggaagacccctttggggaggctgaccagatcacactagacagcttagagcacctttccacaggtgaaatatcggagcagggggattctgaagttgctatgcctgatttggtcttggattctgccatagccccttctcagcctgactgtccttctcccatccatgggaagactcttaaagcagctgacgacagtgattctgagtttggttacttctccttcagtttctccaaatgttttccctccggcttcccctcccttcttgatgaagatggatatcttgctttccccagcctccccaaggtctgggtctccttcctccccgctggtgtgcagcactatgtcccaatcacctccccttcattcattccttcccttatcctcatctttgggctacttctgtctgcttctcagtcagttcctttttctcttgccttttcccttcctctggctctatccctctgctatctggaggctaaagccgcctcctttaatgtttcttatgactgtgacttgaatgacaagctcgaggaagaggaagtagttgctggcatgcctacgtaagctcagtttgtggagtcaacacaatacactttatcttaaacccttcctaatatagagtgtaaatgtgtgcatacatttcaccactgattaccctcaacatagtagtacctgcacattttcacacacacaatattttagtgcatgagaaataagtgtagacacttctccttcattgataccattgaccagttccacacattctaagttaggagcgaaattgtaggattattttacaaatatctagatcaaagtagatttgtaacagaaggtgtgggggaggagggaaggaggagggaacctgtattgcccgtaacaatccatacagggtctctccattttgcaaacagatattaatgctgttcctttaggatgacatctttttgttttgatatagaatttaggatgcagtggacataactgttcctgatgtatattagtagaattccttagtactgttatttctcttgttggaaacccaagtgtgttctagcatctatgaggatgtatctgtaacctttactcctgacatttgtaagtctaatctcaaaagctccttatctccctattattgtagtatttggagaccagatgaattttagctagtttttttttctaaccttaaattatgtaattatatataagagtcactatagggtattttataaggaaggtactattctgttgtctttaacaaatgtatgtgaaaagtgaaacatggctttttgaaaatttagactatataacactaagattgggcctcatagtgctcctttatttaaaattaggtgtttggtttgaggatttttacccctatataaggcaaatttttttcaagtatcctacctctgtgctactaagtcagcattaacatgtacaatatatttttgattattttgttaaatgtggcctggtgatttagtgcctcatattctatggatcctaccaatacatacagtaaatcacaaaatttagagcaaacctaaagaaaaatgtaaagataattgcagtgagtatgcattgtaggacaattgttaaaagtttacctgaggaatgtcaaagatcaacattttagggaattaaatgttgaccaaggagttggaagatgtttcttaacagattattgaatgtctgtgtctcatttttcacatctgataaagactctgagctccttgcttacctctgaaaaatactatgaatggttaaaaaggtaagccgtttgaactctcagatttgacactatcatcctaattaagaaggaaaaggatatatattaggaattaacctataaaggttaaatgatttgcctttgataagggagtcaatatttttattctcaccattttttcccttgagtcaaaattcagtcagtatttgttagttttaaacttctacattcattcttttgaatcatcagatattgagaaatgtccaactatgaaaaactgttcttatttaaagaattttatgtaagtggttatatttcaaagattatttttaaatacccaccattttaatatgaaactagttaaataagccaatccccctcccccagccagaaaagaaatccatatttaacaaactgaatcataggttgaacatttgttccccaatataaagctaaaaacgaattttacatcattatactttaccccatcactagttgctttagacatttcaaattagaacagattgaattatgccatttttgcactctcatattcttgttcctgagtacaaaatattcaaaagcagagcataatctagggactgagaaagagtgaagcttccatcctccattccacctttgcaaaggatcatttccatcattcgtacaacactgtaggtgaagaaagaccaaagaggcttaatattctgcatcttctgagggcctcacagtaaaggcgaagatggaagaagaggaaacgcagctggaagagaaaaattccttgagagtagaaggggataatatttatgtcagacatagcaatttaatgttggaggaactggataaggcccaggaggacatactgaaacatcaggctagcattagtgaactcaagcgcaattttatggaatccacacctgagccgcgccctaatgaatgggaaaaacgacgtatcacacctctgtccctacagacacaagggacacgtgctcccgagtcagaagggccttgcactggagccagggatgctgttaagccaccagtggtaaaaacagagatggtaacaatttctgatgcctcacaaaggacagaaatctccaccaaggaagtccccattgtccaaactgagaccaaaaccatcacatatgagtctccacagactgtaaaaggtggaatttctgaaacaagaattgagaaacgcattgtgatcacaggagatggagatattgatcatgaccaggcactggctcaggcgatcagggaagccagagagcagcaccctgacatgtcggtcacaagagtggtggtacacaaagaaacagagttggctgaggaaggggaagattaagtaagaaagtcattttttaaacaacactcaactttgtgaacccctgaagattttttgaccgttccaagtcttaatgccacaccactattccagcgaatttatgctacaactggtaacaatgaccagaagcctgaagaattaaaatgccaacaccaaacctttccttaccagctctggtctatattgctcccatgcatttaatatattattttgttttataaccacttctaaatattctcagttctttctttttgttgttgttaattaaggggttttggttttgttttctgtttactttgtgtgcaactacctgcttttaatgactcactttgatcaaatgacagtgaacaaagccagcccaagctggtaaggtgctgttcacttgaacaggtgctgttgcgcagaaaggaaactctgtgactaatttagatagtggctttccttcttctggattcttttcattgaattctcacagtaaatatttacggagttttcaaattgcagcaaatatactgtatgagaaaatattaatacagattaaaagcctttcttacatcttgaaaattttctaatatttgagaatttcacagggatgttttttatattggacccttttgactttccagtcctgtgactttctacttttagtagagagtcagaatctctggactggagaataatgaagaagttcactgactgtgcactgtgcttagagaccctgccgcaccacagtgccaatgcttgtcagacacatgcccttcggcagcattccagaacaggagggaagagaaagagaaaactttcttcccttctactaaaagattcaggcagcttaaaaccttagtgctttctttcttaacatacccacatttcaattctttccattatttgaacacttgggtagaactcttgctttgtattaaacctctttgtctacacatgtaaaacttaccttttgttattgagcaggcctatctctttcagatagttttatgattcacacaggtttgaggatgctggggagagggggagggggctgtggtggtgttctgttggttacaagaaagttataccatttaaagctggcaccagagacccgatagggacttattaactatattgaacattttttcctttgcctttgaccctatgtatagttacgatgccagattagatttatagcagcctcaagttgtattaaatgatattttgcttcctgtaatactattataaaataaagtttgtttattctct

SEQ ID NO: 130590 - DNA, 3023 bp, Homo sapiens
  Payload ID: 5536
  Gene Symbol: EPB41L2
  Gene Name: erythrocyte membrane protein band 4.1-like 2
  ENST ID: ENST00000529208
  CDS Start-End: 216-3023
gtgcattttctagctgaggaatgaagtgacttggaaccaaactgggcttttctactgagcatgtccctctccagcagggtctggcttgggtggagccagtcttgctcgttaagcttttggacgctggatttccatcagctttccacagttttccaatgacaggaaatagcagacagcgggcttgatgtgcttaaaagctgccataagctgtggccatgactactgaagtaggctctgtgtctgaagtgaagaaggactctagccagttaggaacagatgcaaccaaggaaaaacctaaagaagtagcagaaaatcagcagaatcagtcttccgatccagaggaggaaaaaggttcccagccacctcctgcagctgaaagccaaagtagtctacgccgccagaagagagagaaggaaacatcggagagcaggggtatttctcggttcataccgccatggcttaagaagcaaaagtcatataccttagtagtggccaaagatggaggagataaaaaagagcctacccaagctgttgttgaagaacaggtcttagataaagaggaaccccttccagaagaacagagacaggctaagggtgatgctgaagaaatggctcagaagaaacaagagattaaagttgaagtcaaggaagaaaaaccctcagtgagcaaggaagaaaaaccctcagtgagcaaagtggagatgcagcctactgaattagtaagtaaggagagagaagagaaggtaaaagaaacacaggaagacaaattagaaggaggagcagcaaaaagggagaccaaggaagtgcagaccaatgagctgaaagcagagaaggcatctcaaaaagtcaccaagaagaccaaaactgtccagtgtaaagtgaccctcttagatggcaccgaatacagctgtgacctggagaaacatgccaagggacaagtgttatttgacaaagtgtgtgaacacctcaatctcttggagaaagactactttggacttttgtttcaggaaagccctgagcagaaaaactggttagatcctgctaaagaaataaagagacaactgagaaaccttccatggctattcacttttaatgtgaagttttatcctcctgatccttctcaattgactgaagatatcaccagatacttcttgtgccttcagctccggcaggacattgcctctggccgcctgccctgctcttttgtgactcatgctctcctgggatcctacaccctgcaggctgaacttggtgactatgacccagaagaacatggcagcatcgacctcagtgaattccagtttgcccctactcagactaaggagctggaagagaaggtggcagagctgcacaaaacccacaggggcttatcgccagcacaagctgattcccagttcttagaaaatgcaaagaggctttccatgtatggtgttgacctacatcatgccaaggactcagaaggtgtggacatcaagctgggcgtgtgtgctaatggacttctcatttacaaagacagactgcgaatcaatcgttttgcttggccgaaaatcttaaaaatttcctataaacgcagtaacttctacattaaagtcagaccggcagagctggaacagtttgagagtaccattggattcaaactgccaaaccaccgggcagcgaaaagactatggaaagtgtgcgtggagcatcatactttctacaggcttgtttctccagagcagccaccaaaagccaagttcctgaccttggggtccaaatttcgctatagtggccgcacccaagcacagacccgccaggccagcaccctcatagataggccagcaccacactttgagcgcacttctagtaaacgggtctccaggagtctagatggagctccgattggtgtcatggaccaaagtcttatgaaggattttcctggcgctgctggggagatttcagcctatggacctggacttgtcagcattgccgtggtacaagatggggacggcaggagggaagtgagaagcccaactaaagccccacatttgcagctcattgaaggaaagagttcacatgagactctgaatatagtggaggagaagaagcgggcagaggttgggaaagacgaaagagtaatcacagaagaaatgaatggtaaagagatatcacctgggagtggtcctggggagattcgtaaggtggagcctgtgacacaaaaagactccacctccctgtcttctgagagcagcagcagcagcagtgagagtgaggaggaagacgtgggagagtaccgtccccaccaccgagtgaccgagggcaccatcagggaggaacaggagtatgaagaagaggtggaggaagaaccccgcccggcagccaaggtagtagagagggaggaagcagtgcccgaagccagcccagtcacacaagcaggtgccagtgtaatcacagtagaaacagtgatccaggaaaatgtaggtgcccaaaagatacccggagagaagagtgtacacgaaggcgctcttaagcaagacatgggagaagaagcagaggaagagccacagaaagttaacggagaggtgtcccatgttgacattgatgttttgccacaaattatttgttgttcagagccaccagtggtaaaaacagagatggtaacaatttctgatgcctcacaaaggacagaaatctccaccaaggaagtccccattgtccaaactgagaccaaaaccatcacatatgagtctccacagattgatggcggggctggtggtgattcgggcacgttactgaccgcacaaaccatcacatctgagtccgtgtcaacaacgacaaccacacacatcaccaagactgtaaaaggtggaatttctgaaacaagaattgagaaacgcattgtgatcacaggagatggagatattgatcatgaccaggcactggctcaggcgatcagggaagccagagagcagcaccctgacatgtcggtcacaagagtggtggtacacaaagaaacagagttggctgaggaaggggaagattaa

SEQ ID NO: 130591 - DNA, 585 bp, Homo sapiens
  Payload ID: 5536
  Gene Symbol: EPB41L2
  Gene Name: erythrocyte membrane protein band 4.1-like 2
  ENST ID: ENST00000529709
  CDS Start-End: 49-585
aaaaacagcaactctaaactggctctggatatgtcataagctgtggccatgactactgaagtaggctctgtgtctgaagtgaagaaggactctagccagttaggaacagatgcaaccaaggaaaaacctaaagaagtagcagaaaatcagcagaatcagtcttccgatccagaggaggaaaaaggttcccagccacctcctgcagctgaaagccaaagtagtctacgccgccagaagagagagaaggaaacatcggagagcaggggtatttctcggttcataccgccatggcttaagaagcaaaagtcatataccttagtagtggccaaagatggaggagataaaaaagagcctacccaagctgttgttgaagaacaggtcttagataaagaggaaccccttccagaagaacagagacaggctaagggtgatgctgaagaaatggctcagaagaaacaagagattaaagttgaagtcaaggaagaaaaaccctcagtgagcaaggaagaaaaaccctcagtgagcaaagtggagatgcagcctactgaattagtaagtaaggagagagaagagaaggtaaaagaa

SEQ ID NO: 130592 - DNA, 3090 bp, Homo sapiens
  Payload ID: 5536
  Gene Symbol: EPB41L2
  Gene Name: erythrocyte membrane protein band 4.1-like 2
  ENST ID: ENST00000524581
  CDS Start-End: 1470-2621
agaattccttagtactgttatttctcttgttggaaacccaagtgtgttctagcatctatgaggatgtatctgtaacctttactcctgacatttgtaagtctaatctcaaaagctccttatctccctattattgtagtatttggagaccagatgaattttagctagtttttttttctaaccttaaattatgtaattatatataagagtcactatagggtattttataaggaaggtactattctgttgtctttaacaaatgtatgtgaaaagtgaaacatggctttttgaaaatttagactatataacactaagattgggcctcatagtgctcctttatttaaaattaggtgtttggtttgaggatttttacccctatataaggcaaatttttttcaagtatcctacctctgtgctactaagtcagcattaacatgtacaatatatttttgattattttgttaaatgtggcctggtgatttagtgcctcatattctatggatcctaccaatacatacagtaaatcacaaaatttagagcaaacctaaagaaaaatgtaaagataattgcagtgagtatgcattgtaggacaattgttaaaagtttacctgaggaatgtcaaagatcaacattttagggaattaaatgttgaccaaggagttggaagatgtttcttaacagattattgaatgtctgtgtctcatttttcacatctgataaagactctgagctccttgcttacctctgaaaaatactatgaatggttaaaaaggtaagccgtttgaactctcagatttgacactatcatcctaattaagaaggaaaaggatatatattaggaattaacctataaaggttaaatgatttgcctttgataagggagtcaatatttttattctcaccattttttcccttgagtcaaaattcagtcagtatttgttagttttaaacttctacattcattcttttgaatcatcagatattgagaaatgtccaactatgaaaaactgttcttatttaaagaattttatgtaagtggttatatttcaaagattatttttaaatacccaccattttaatatgaaactagttaaataagccaatccccctcccccagccagaaaagaaatccatatttaacaaactgaatcataggttgaacatttgttccccaatataaagctaaaaacgaattttacatcattatactttaccccatcactagttgctttagacatttcaaattagaacagattgaattatgccatttttgcactctcatattcttgttcctgagtacaaaatattcaaaagcagagcataatctagggactgagaaagagtgaagcttccatcctccattccacctttgcaaaggatcatttccatcattcgtacaacactgtaggtgaagaaagaccaaagaggcttaatattctgcatcttctgagggcctcacagtaaaggcgaagatggaagaagaggaaacgcagctggaagaggaactggataaggcccaggaggacatactgaaacatcaggctagcattagtgaactcaagcgcaattttatggaatccacacctgagccgcgccctaatgaatgggaaaaacgacgtatcacacctctgtccctacagacacaagggagttcacatgagactctgaatatagtggaggagaagaagcgggcagaggttgggaaagacgaaagagtaatcacagaagaaatgaatggtaaagagatatcacctgggagtggtcctggggagattcgtaaggtggagcctgtgacacaaaaagactccacctccctgtcttctgagagcagcagcagcagcagtgagagtgaggaggaagacgtgggagagtaccgtccccaccaccgagtgaccgagggcaccatcagggaggaacaggagtatgaagaagaggtggaggaagaaccccgcccggcagccaaggtagtagagagggaggaagcagtgcccgaagccagcccagtcacacaagcaggtgccagtgtaatcacagtagaaacagtgatccaggaaaatgtaggtgcccaaaagatacccggagagaagagtgtacacgaaggcgctcttaagcaagacatgggagaagaagcagaggaagagccacagaaagttaacggagaggtgtcccatgttgacattgatgttttgccacaaattatttgttgttcagagccaccagtggtaaaaacagagatggtaacaatttctgatgcctcacaaaggacagaaatctccaccaaggaagtccccattgtccaaactgagaccaaaaccatcacatatgagtctccacagattgatggcggggctggtggtgattcgggcacgttactgaccgcacaaaccatcacatctgagtccgtgtcaacaacgacaaccacacacatcaccaagactgtaaaaggtggaatttctgaaacaagaattgagaaacgcattgtgatcacaggagatggagatattgatcatgaccaggcactggctcaggcgatcagggaagccagagagcagcaccctgacatgtcggtcacaagagtggtggtacacaaagaaacagagttggctgaggaaggggaagattaagtaagaaagtcattttttaaacaacactcaactttgtgaacccctgaagattttttgaccgttccaagtcttaatgccacaccactattccagcgaatttatgctacaactggtaacaatgaccagaagcctgaagaattaaaatgccaacaccaaacctttccttaccagctctggtctatattgctcccatgcatttaatatattattttgttttataaccacttctaaatattctcagttctttctttttgttgttgttaattaaggggttttggttttgttttctgtttactttgtgtgcaactacctgcttttaatgactcactttgatcaaatgacagtgaacaaagccagcccaagctggtaaggtgctgttcacttgaacaggtgctgttgcgcagaaaggaaactctgtgactaatttagatagtggctttccttcttctggattcttttcattgaattc

SEQ ID NO: 130593 - DNA, 962 bp, Homo sapiens
  Payload ID: 5536
  Gene Symbol: EPB41L2
  Gene Name: erythrocyte membrane protein band 4.1-like 2
  ENST ID: ENST00000527423
  CDS Start-End: 159-962
cagagcataatctagggactgagaaagagtgaagcttccatcctccattccacctttgcaaaggatcatttccatcattcgtacaacactgtaggtgaagaaagaccaaagaggcttaatattctgcatcttctgagggcctcacagtaaaggcgaagatggaagaagaggaaacgcagctggaagagaaaaattccttgagagtagaaggggataatatttatgtcagacatagcaatttaatgttggaggaactggataaggcccaggaggacatactgaaacatcaggctagcattagtgaactcaagcgcaattttatggaatccacacctgagccgcgccctaatgaatgggaaaaacgacgtatcacacctctgtccctacagacacaagggagttcacatgagactctgaatatagtggaggagaagaagcgggcagaggttgggaaagacgaaagagtaatcacagaagaaatgaatggtaaagagatatcacctgggagtggtcctggggagattcgtaaggtggagcctgtgacacaaaaagactccacctccctgtcttctgagagcagcagcagcagcagtgagagtgaggaggaagacgtgggagagtaccgtccccaccaccgagtgaccgagggcaccatcagggaggaacaggagtatgaagaagaggtggaggaagaaccccgcccggcagccaaggtagtagagagggaggaagcagtgcccgaagccagcccagtcacacaagcaggtgccagtgtaatcacagtagaaacagtgatccaggaaaatgtaggtgcccaaaagatacccggagagaagagtgtacacgaaggcgctcttaagcaagacatgggagaagaagcagaggaagagccacagaaagttaacggagaggtgtcccatgttgacattgatgttttgccacaaattatttgttgttcagag

SEQ ID NO: 130594 - DNA, 3910 bp, Homo sapiens
  Payload ID: 5536
  Gene Symbol: EPB41L2
  Gene Name: erythrocyte membrane protein band 4.1-like 2
  ENST ID: ENST00000610431
  CDS Start-End: 99-2000
gaggaggcaggcgcggctgccggcggctgggactgaagagggacgggtcccgcggcgagcgagctcctgaggtacggcgtcgggcataagctgtggccatgactactgaagtaggctctgtgtctgaagtgaagaaggactctagccagttaggaacagatgcaaccaaggaaaaacctaaagaagtagcagaaaatcagcagaatcagtcttccgatccagaggaggaaaaaggttcccagccacctcctgcagctgaaagccaaagtagtctacgccgccagaagagagagaaggaaacatcggagagcaggggtatttctcggttcataccgccatggcttaagaagcaaaagtcatataccttagtagtggccaaagatggaggagataaaaaagagcctacccaagctgttgttgaagaacaggtcttagataaagaggaaccccttccagaagaacagagacaggctaagggtgatgctgaagaaatggctcagaagaaacaagagattaaagttgaagtcaaggaagaaaaaccctcagtgagcaaggaagaaaaaccctcagtgagcaaagtggagatgcagcctactgaattagtaagtaaggagagagaagagaaggtaaaagaaacacaggaagacaaattagaaggaggagcagcaaaaagggagaccaaggaagtgcagaccaatgagctgaaagcagagaaggcatctcaaaaagtcaccaagaagaccaaaactgtccagtgtaaagtgaccctcttagatggcaccgaatacagctgtgacctggagaaacatgccaagggacaagtgttatttgacaaagtgtgtgaacacctcaatctcttggagaaagactactttggacttttgtttcaggaaagccctgagcagaaaaactggttagatcctgctaaagaaataaagagacaactgagaaaccttccatggctattcacttttaatgtgaagttttatcctcctgatccttctcaattgactgaagatatcaccagatacttcttgtgccttcagctccggcaggacattgcctctggccgcctgccctgctcttttgtgactcatgctctcctgggatcctacaccctgcaggctgaacttggtgactatgacccagaagaacatggcagcatcgacctcagtgaattccagtttgcccctactcagactaaggagctggaagagaaggtggcagagctgcacaaaacccacaggggcttatcgccagcacaagctgattcccagttcttagaaaatgcaaagaggctttccatgtatggtgttgacctacatcatgccaaggactcagaaggtgtggacatcaagctgggcgtgtgtgctaatggacttctcatttacaaagacagactgcgaatcaatcgttttgcttggccgaaaatcttaaaaatttcctataaacgcagtaacttctacattaaagtcagaccggcagagctggaacagtttgagagtaccattggattcaaactgccaaaccaccgggcagcgaaaagactatggaaagtgtgcgtggagcatcatactttctacaggcttgtttctccagagcagccaccaaaagccaagttcctgaccttggggtccaaatttcgctatagtggccgcacccaagcacagacccgccaggccagcaccctcatagataggccagcaccacactttgagcgcacttctagtaaacgggtctccaggagtctagatggagctccgattggtgtcatggaccaaagtcttatgaaggattttcctggcgctgctggggagatttcagcctatggacctggacttgtcagcattgccgtggtacaagatggggacggcaggagggaagtgagaagcccaactaaagccccacatttgcagctcattgaaggaaagagttcacatgagactctgaatatagtggaggagaagagcgggcagaggttgggaaagacgaaagagtaatcacagaagaaatgaatggtaaagagatatcacctgggagtggtcctggggagattcgtaaggtggagcctgtgacacaaaaagactccacctccctgtcttctgagagcagcagcagcagcagtgagagtgaggaggaagacgtgggagagtaccgtccccaccaccgagtgaccgagggcaccatcagggaggaacaggagtatgaagaagaggtggaggaagaaccccgcccggcagccaagccaccagtggtaaaaacagagatggtaacaatttctgatgcctcacaaaggacagaaatctccaccaaggaagtccccattgtccaaactgagaccaaaaccatcacatatgagtctccacagattgatggcggggctggtggtgattcgggcacgttactgaccgcacaaaccatcacatctgagtccgtgtcaacaacgacaaccacacacatcaccaagactgtaaaaggtggaatttctgaaacaagaattgagaaacgcattgtgatcacaggagatggagatattgatcatgaccaggcactggctcaggcgatcagggaagccagagagcagcaccctgacatgtcggtcacaagagtggtggtacacaaagaaacagagttggctgaggaaggggaagattaagtaagaaagtcattttttaaacaacactcaactttgtgaacccctgaagattttttgaccgttccaagtcttaatgccacaccactattccagcgaatttatgctacaactggtaacaatgaccagaagcctgaagaattaaaatgccaacaccaaacctttccttaccagctctggtctatattgctcccatgcatttaatatattattttgttttataaccacttctaaatattctcagttctttctttttgttgttgttaattaaggggttttggttttgttttctgtttactttgtgtgcaactacctgcttttaatgactcactttgatcaaatgacagtgaacaaagccagcccaagctggtaaggtgctgttcacttgaacaggtgctgttgcgcagaaaggaaactctgtgactaatttagatagtggctttccttcttctggattcttttcattgaattctcacagtaaatatttacggagttttcaaattgcagcaaatatactgtatgagaaaatattaatacagattaaaagcctttcttacatcttgaaaattttctaatatttgagaatttcacagggatgttttttatattggacccttttgactttccagtcctgtgactttctacttttagtagagagtcagaatctctggactggagaataatgaagaagttcactgactgtgcactgtgcttagagaccctgccgcaccacagtgccaatgcttgtcagacacatgcccttcggcagcattccagaacaggagggaagagaaagagaaaactttcttcccttctactaaaagattcaggcagcttaaaaccttagtgctttctttcttaacatacccacatttcaattctttccattatttgaacacttgggtagaactcttgctttgtattaaacctctttgtctacacatgtaaaacttaccttttgttattgagcaggcctatctctttcagatagttttatgattcacacaggtttgaggatgctggggagagggggagggggctgtggtggtgttctgttggttacaagaaagttataccatttaaagctggcaccagagacccgatagggacttattaactatattgaacattttttcctttgcctttgaccctatgtatagttacgatgccagattagatttatagcagcctcaagttgtattaaatgatattttgcttcctgtaatactattataaaataaagtttgtttattctct

SEQ ID NO: 130595 - DNA, 4247 bp, Homo sapiens
  Payload ID: 5536
  Gene Symbol: EPB41L2
  Gene Name: erythrocyte membrane protein band 4.1-like 2
  ENST ID: ENST00000628542
  CDS Start-End: 183-2990
gtcgcgggaggggcttccgccgcgagggggcggggccggccctcagagtcctctgacggccccagtcagggaatttcaatttgaaacctagcggagggaggaggcaggcgcggctgccggcggctgggactgaagagggacgggtcccgcggcgagcgagctcctgagcataagctgtggccatgactactgaagtaggctctgtgtctgaagtgaagaaggactctagccagttaggaacagatgcaaccaaggaaaaacctaaagaagtagcagaaaatcagcagaatcagtcttccgatccagaggaggaaaaaggttcccagccacctcctgcagctgaaagccaaagtagtctacgccgccagaagagagagaaggaaacatcggagagcaggggtatttctcggttcataccgccatggcttaagaagcaaaagtcatataccttagtagtggccaaagatggaggagataaaaaagagcctacccaagctgttgttgaagaacaggtcttagataaagaggaaccccttccagaagaacagagacaggctaagggtgatgctgaagaaatggctcagaagaaacaagagattaaagttgaagtcaaggaagaaaaaccctcagtgagcaaggaagaaaaaccctcagtgagcaaagtggagatgcagcctactgaattagtaagtaaggagagagaagagaaggtaaaagaaacacaggaagacaaattagaaggaggagcagcaaaaagggagaccaaggaagtgcagaccaatgagctgaaagcagagaaggcatctcaaaaagtcaccaagaagaccaaaactgtccagtgtaaagtgaccctcttagatggcaccgaatacagctgtgacctggagaaacatgccaagggacaagtgttatttgacaaagtgtgtgaacacctcaatctcttggagaaagactactttggacttttgtttcaggaaagccctgagcagaaaaactggttagatcctgctaaagaaataaagagacaactgagaaaccttccatggctattcacttttaatgtgaagttttatcctcctgatccttctcaattgactgaagatatcaccagatacttcttgtgccttcagctccggcaggacattgcctctggccgcctgccctgctcttttgtgactcatgctctcctgggatcctacaccctgcaggctgaacttggtgactatgacccagaagaacatggcagcatcgacctcagtgaattccagtttgcccctactcagactaaggagctggaagagaaggtggcagagctgcacaaaacccacaggggcttatcgccagcacaagctgattcccagttcttagaaaatgcaaagaggctttccatgtatggtgttgacctacatcatgccaaggactcagaaggtgtggacatcaagctgggcgtgtgtgctaatggacttctcatttacaaagacagactgcgaatcaatcgttttgcttggccgaaaatcttaaaaatttcctataaacgcagtaacttctacattaaagtcagaccggcagagctggaacagtttgagagtaccattggattcaaactgccaaaccaccgggcagcgaaaagactatggaaagtgtgcgtggagcatcatactttctacaggcttgtttctccagagcagccaccaaaagccaagttcctgaccttggggtccaaatttcgctatagtggccgcacccaagcacagacccgccaggccagcaccctcatagataggccagcaccacactttgagcgcacttctagtaaacgggtctccaggagtctagatggagctccgattggtgtcatggaccaaagtcttatgaaggattttcctggcgctgctggggagatttcagcctatggacctggacttgtcagcattgccgtggtacaagatggggacggcaggagggaagtgagaagcccaactaaagccccacatttgcagctcattgaaggaaagagttcacatgagactctgaatatagtggaggagaagaagcgggcagaggttgggaaagacgaaagagtaatcacagaagaaatgaatggtaaagagatatcacctgggagtggtcctggggagattcgtaaggtggagcctgtgacacaaaaagactccacctccctgtcttctgagagcagcagcagcagcagtgagagtgaggaggaagacgtgggagagtaccgtccccaccaccgagtgaccgagggcaccatcagggaggaacaggagtatgaagaagaggtggaggaagaaccccgcccggcagccaaggtagtagagagggaggaagcagtgcccgaagccagcccagtcacacaagcaggtgccagtgtaatcacagtagaaacagtgatccaggaaaatgtaggtgcccaaaagatacccggagagaagagtgtacacgaaggcgctcttaagcaagacatgggagaagaagcagaggaagagccacagaaagttaacggagaggtgtcccatgttgacattgatgttttgccacaaattatttgttgttcagagccaccagtggtaaaaacagagatggtaacaatttctgatgcctcacaaaggacagaaatctccaccaaggaagtccccattgtccaaactgagaccaaaaccatcacatatgagtctccacagattgatggcggggctggtggtgattcgggcacgttactgaccgcacaaaccatcacatctgagtccgtgtcaacaacgacaaccacacacatcaccaagactgtaaaaggtggaatttctgaaacaagaattgagaaacgcattgtgatcacaggagatggagatattgatcatgaccaggcactggctcaggcgatcagggaagccagagagcagcaccctgacatgtcggtcacaagagtggtggtacacaaagaaacagagttggctgaggaaggggaagattaagtaagaaagtcattttttaaacaacactcaactttgtgaacccctgaagattttttgaccgttccaagtcttaatgccacaccactattccagcgaatttatgctacaactggtaacaatgaccagaagcctgaagaattaaaatgccaacaccaaacctttccttaccagctctggtctatattgctcccatgcatttaatatattattttgttttataaccacttctaaatattctcagttctttctttttgttgttgttaattaaggggttttggttttgttttctgtttactttgtgtgcaactacctgcttttaatgactcactttgatcaaatgacagtgaacaaagccagcccaagctggtaaggtgctgttcacttgaacaggtgctgttgcgcagaaaggaaactctgtgactaatttagatagtggctttccttcttctggattcttttcattgaattctcacagtaaatatttacggagttttcaaattgcagcaaatatactgtatgagaaaatattaatacagattaaaagcctttcttacatcttgaaaattttctaatatttgagaatttcacagggatgttttttatattggacccttttgactttccagtcctgtgactttctacttttagtagagagtcagaatctctggactggagaataatgaagaagttcactgactgtgcactgtgcttagagaccctgccgcaccacagtgccaatgcttgtcagacacatgcccttcggcagcattccagaacaggagggaagagaaagagaaaactttcttcccttctactaaaagattcaggcagcttaaaaccttagtgctttctttcttaacatacccacatttcaattctttccattatttgaacacttgggtagaactcttgctttgtattaaacctctttgtctacacatgtaaaacttaccttttgttattgagcaggcctatctctttcagatagttttatgattcacacaggtttgaggatgctggggagagggggagggggctgtggtggtgttctgttggttacaagaaagttataccatttaaagctggcaccagagacccgatagggacttattaactatattgaacattttttcctttgcctttgaccctatgtatagttacgatgccagattagatttatagcagcctcaagttgtattaaatgatattttgcttcctgtaatactattataaaataaagtttgtttattctctaaa

SEQ ID NO: 130596 - DNA, 4270 bp, Homo sapiens
  Payload ID: 5537
  Gene Symbol: EPB41L3
  Gene Name: erythrocyte membrane protein band 4.1-like 3
  ENST ID: ENST00000342933
  CDS Start-End: 410-3166
agaggccaggccatcatctaagtgggaataaagggctaaagctattggcattggcagctgtctccaggcgtcgtccgcggagcctgaccctgcgccaggacggaggaggctgtgcccatgtaactgtcctgaagtactgcggtggccccctcccccgcggctgggagggcaggcaggacgaggttggctttcctcgcacggtctctgggcgtgggcccccgccgcagctccgcggagcctcggtgtctcctgcaacagggggcggggggaacagcggcgagcagccctgggctgcggcttcctccccacgcccgagtctcctgcgcaccgccgccgaggacgcgcgcccgagcctagtccccacgccgcggcgcgcccgggctccctgctgatcccagaacaatcaaccatgacgaccgaatctggatcagactcggaatccaagccggaccaggaggccgagccccaggaggcggcgggggcgcaggggcgcgcgggggcgcccgtgccggagccgcccaaggaggagcagcagcaggccctggagcagttcgccgccgctgcagcgcacagcaccccggtgcggagggaggtcactgacaaggaacaggagtttgctgccagggctgcaaaacagctcgaatatcagcaattagaagacgataaactttctcagaaatcatctagcagtaaactctctcggtctccattaaagattgtcaaaaagcctaaaagcatgcagtgcaaagtgatacttctcgatggatcagaatatacctgtgatgtagagaaacgctccagaggacaagtgctgtttgataaagtgtgtgaacacttgaacttgctagagaaagactactttgggcttacgtatcgagatgctgaaaaccagaagaattggttggaccctgctaaggaaataaaaaaacaggttcgaagtggtgcttggcacttttcatttaatgtgaaattttatccaccagaccctgcccaactatctgaagatatcaccaggtactacctctgcttgcagttgcgagatgacatcgtgtccggaaggctgccctgctcctttgttaccctggccttgctgggctcctacactgtccagtcagagctcggagactatgacccagatgaatgtgggagcgattacattagtgagttccgctttgcaccaaaccacactaaagaactggaagacaaagtgatcgagctgcacaagagccacagaggaatgacgccagcagaagcagagatgcatttcttggaaaatgccaaaaaattatcaatgtatggggtagatttacatcatgctaaggactcagaaggggtagaaattatgttaggagtttgtgcaagtggtctgttgatatatcgcgaccggctgcgaataaacagatttgcctggcccaaggttctaaagatttcatacaaacggaacaacttttacattaagatccggccgggagagtttgaacaatttgaaagcaccattgggtttaagctgccaaaccatcgagctgccaagcgtttatggaaagtatgtgttgagcatcatacatttttcagactactgttaccagaagcacctcccaagaaattcctaaccttgggttccaagtttcgttatagtggcaggacacaagcgcaaacgagaagagccagtgcgttgatagatcgcccagcaccttactttgaacgctcatccagcaaacgttataccatgtctcgcagcttggatggagcatcagtgaatgaaaaccatgaaatatacatgaaggattctatgtctgctgcagaggttggtactggccagtacgccacaacaaaaggcatctctcagaccaacttgatcaccactgtgactccggagaagaaggctgaggaggagcgggacgaggaagaggacaaacggaggaagggggaagaagtcacgcccatctcggccatccggcacgagggaaagactgacagtgagcgcacggacaccgcagccgacggggagaccactgccactgagtcggaccaggaggaagatgcagagctcaaggcacaggagctagaaaaaactcaagatgacctgatgaaacatcaaaccaacattagcgagctgaaaagaaccttcttagaaacctcaacagacactgccgtaacgaatgaatgggagaagaggctttccacctcccccgtgcgactggccgccaggcaggaggatgcccccatgatcgaaccacttgtccctgaagagactaagcagtcttctggggaaaagctcatggatggctctgaaatcttcagtttattagagtctgcgcgaaaaccaacagaattcataggaggggttacttctacttctcaaagctgggttcagaaaatggaaaccaagacggagtccagtggaatagagacggaacccaccgtgcaccacctgccgcttagcactgagaaggtggtgcaggagaccgtgttggtggaggagcggcgtgtggtgcacgcgagtggggatgcttcttactcggcgggagacagcggggatgctgcagcacagcccgcattcacaggcattaaagggaaagagggctctgccttgacggagggggctaaagaggaaggaggggaggaggtcgctaaagctgtcctggaacaggaagagacagccgctgcttcccgtgagcgacaagaggagcagagtgcagccatccacatttcagaaactttggaacaaaaacctcattttgagtcctcaacggtgaagacggaaaccatcagttttggcagtgtttcaccgggaggagtaaagctagaaatttccacgaaggaagtgccagtagttcacaccgaaaccaaaaccatcacatatgaatcatcacaggtcgatccaggcacagatctggagccaggcgtgctgatgagtgcacagacgatcacatctgaaaccaccagtaccaccaccactacgcacatcaccaaaactgtgaaagggggcatttcagagacaagaattgagaagcgaatagtcatcacgggggatgcagacattgaccatgaccaggcgctggctcaggcaattaaagaggccaaagagcagcaccctgacatgtcagtgaccaaagtagtggtccataaagagacagagatcacaccagaagatggagaggattgaccagaggaataacttagcttgcacatgaatgcagtcatgcaaaccgttaggaaaaccagagcctatatggagttccctcttctaacccaactgacttgtatctgtccgtggaaaatttcagtccagaagaattgaccttgaccattaataaagacactggcagagagatcttcccataataaagcaatctgattcagcatcactaaaccgataatgcatgaagcaacgataaaattacaaaagagcagcatttttaattttcacaaaatgtctcagttttcagctatacctgcacgttcataaccaacaatataaaccgtggtctcatgtaacacataaacaattcatgcctttcatagtttattattattaaagtctaaacaaaattgcaatttcttaggtaaccttatatttacaataaatgaagattaccctcaaatgctagaagctgtctaggtccgtccggtgtgtcagattttcctcagattagatgtgccaataaccaagtttattcagtaaacaacttgtacttgtttcatctggttttattactctcacccataaacagtaatgactctctgaccctctggaaatatgtaatgcttccaatcttgctttgtgtatctcatttaatttgttataaggtagtactgattttagcatattaatgcgatttcttccttgttgtttgctttggtctgtgttcaatccagagagcttaaattgtcattattttgggaagaaaacctgtatttttgttagtttacaatattatgaaatttcacttcaggagaaactgctgggcttcctgtggctttgttttcttagttactttttccgtgccgtgtattttttaattgatttttcttcttttacttgaaaagaaagtgttttattttcaaatctggtccatatttacattctagttcagagccaagccttaaactgtacagaatttccactgtaattaaaactatttagtgttagttataaatagccttcaaaaagagagattctccattacacgatcacctgcatcacagcccatggtgaatgtatgtttctgcatagcgaaataaaaatggcaaatgcactgaaagctct

SEQ ID NO: 130597 - DNA, 4706 bp, Homo sapiens
  Payload ID: 5537
  Gene Symbol: EPB41L3
  Gene Name: erythrocyte membrane protein band 4.1-like 3
  Uniprot ID: Q9Y2J2
  ENST ID: ENST00000341928
  CDS Start-End: 342-3605
cgtcgtccgcggagcctgaccctgcgccaggacggaggaggctgtgcccatgtaactgtcctgaagtactgcggtggccccctcccccgcggctgggagggcaggcaggacgaggttggctttcctcgcacggtctctgggcgtgggcccccgccgcagctccgcggagcctcggtgtctcctgcaacagggggcggggggaacagcggcgagcagccctgggctgcggcttcctccccacgcccgagtctcctgcgcaccgccgccgaggacgcgcgcccgagcctagtccccacgccgcggcgcgcccgggctccctgctgatcccagaacaatcaaccatgacgaccgaatctggatcagactcggaatccaagccggaccaggaggccgagccccaggaggcggcgggggcgcaggggcgcgcgggggcgcccgtgccggagccgcccaaggaggagcagcagcaggccctggagcagttcgccgccgctgcagcgcacagcaccccggtgcggagggaggtcactgacaaggaacaggagtttgctgccagggctgcaaaacagctcgaatatcagcaattagaagacgataaactttctcagaaatcatctagcagtaaactctctcggtctccattaaagattgtcaaaaagcctaaaagcatgcagtgcaaagtgatacttctcgatggatcagaatatacctgtgatgtagagaaacgctccagaggacaagtgctgtttgataaagtgtgtgaacacttgaacttgctagagaaagactactttgggcttacgtatcgagatgctgaaaaccagaagaattggttggaccctgctaaggaaataaaaaaacaggttcgaagtggtgcttggcacttttcatttaatgtgaaattttatccaccagaccctgcccaactatctgaagatatcaccaggtactacctctgcttgcagttgcgagatgacatcgtgtccggaaggctgccctgctcctttgttaccctggccttgctgggctcctacactgtccagtcagagctcggagactatgacccagatgaatgtgggagcgattacattagtgagttccgctttgcaccaaaccacactaaagaactggaagacaaagtgatcgagctgcacaagagccacagaggaatgacgccagcagaagcagagatgcatttcttggaaaatgccaaaaaattatcaatgtatggggtagatttacatcatgctaaggactcagaaggggtagaaattatgttaggagtttgtgcaagtggtctgttgatatatcgcgaccggctgcgaataaacagatttgcctggcccaaggttctaaagatttcatacaaacggaacaacttttacattaagatccggccgggagagtttgaacaatttgaaagcaccattgggtttaagctgccaaaccatcgagctgccaagcgtttatggaaagtatgtgttgagcatcatacatttttcagactactgttaccagaagcacctcccaagaaattcctaaccttgggttccaagtttcgttatagtggcaggacacaagcgcaaacgagaagagccagtgcgttgatagatcgcccagcaccttactttgaacgctcatccagcaaacgttataccatgtctcgcagcttggatggagaggttggtactggccagtacgccacaacaaaaggcatctctcagaccaacttgatcaccactgtgactccggagaagaaggctgaggaggagcgggacgaggaagaggacaaacggaggaagggggaagaagtcacgcccatctcggccatccggcacgagggaaagtcacctgggcttggcactgactcatgtcccttgtcacccccatccacccattgtgcccccacatctcccacagagctccgtaggaggtgtaaggagaatgactgcaaactgccaggttatgagccgtccagagctgagcacctgcctggagagcccgccttggactctgatggcccagggaggccttacctaggggatcaagatgtggcttttagctacagacagcaaactggcaaggggaccaccctgttctccttctccttgcagctccctgagtcattcccctccctcctagatgatgatggatacctctctttccccaacctttctgaaaccaacctcctgccccagagcttgcagcattacctcccgatccgctcaccgtcccttgtgccctgtttcctcttcatctttttctttctgctgtctgcctccttctcagtgccatacgctctcactctctccttccctctggctctgtgcctctgctacctggagcccaaggcggcctccttgagcgcctccctagacaatgacccgagtgacagttcagaggaagagactgacagtgagcgcacggacaccgcagccgacggggagaccactgccactgagtcggaccaggaggaagatgcagagctcaaggcacaggagctagaaaaaactcaagatgacctgatgaaacatcaaaccaacattagcgagctgaaaagaaccttcttagaaacctcaacagacactgccgtaacgaatgaatgggagaagaggctttccacctcccccgtgcgactggccgccaggcaggaggatgcccccatgatcgaaccacttgtccctgaagagactaagcagtcttctggggaaaagctcatggatggctctgaaatcttcagtttattagagtctgcgcgaaaaccaacagaattcataggaggggttacttctacttctcaaagctgggttcagaaaatggaaaccaagacggagtccagtggaatagagacggaacccaccgtgcaccacctgccgcttagcactgagaaggtggtgcaggagaccgtgttggtggaggagcggcgtgtggtgcacgcgagtggggatgcttcttactcggcgggagacagcggggatgctgcagcacagcccgcattcacaggcattaaagggaaagagggctctgccttgacggagggggctaaagaggaaggaggggaggaggtcgctaaagctgtcctggaacaggaagagacagccgctgcttcccgtgagcgacaagaggagcagagtgcagccatccacatttcagaaactttggaacaaaaacctcattttgagtcctcaacggtgaagacggaaaccatcagttttggcagtgtttcaccgggaggagtaaagctagaaatttccacgaaggaagtgccagtagttcacaccgaaaccaaaaccatcacatatgaatcatcacaggtcgatccaggcacagatctggagccaggcgtgctgatgagtgcacagacgatcacatctgaaaccaccagtaccaccaccactacgcacatcaccaaaactgtgaaagggggcatttcagagacaagaattgagaagcgaatagtcatcacgggggatgcagacattgaccatgaccaggcgctggctcaggcaattaaagaggccaaagagcagcaccctgacatgtcagtgaccaaagtagtggtccataaagagacagagatcacaccagaagatggagaggattgaccagaggaataacttagcttgcacatgaatgcagtcatgcaaaccgttaggaaaaccagagcctatatggagttccctcttctaacccaactgacttgtatctgtccgtggaaaatttcagtccagaagaattgaccttgaccattaataaagacactggcagagagatcttcccataataaagcaatctgattcagcatcactaaaccgataatgcatgaagcaacgataaaattacaaaagagcagcatttttaattttcacaaaatgtctcagttttcagctatacctgcacgttcataaccaacaatataaaccgtggtctcatgtaacacataaacaattcatgcctttcatagtttattattattaaagtctaaacaaaattgcaatttcttaggtaaccttatatttacaataaatgaagattaccctcaaatgctagaagctgtctaggtccgtccggtgtgtcagattttcctcagattagatgtgccaataaccaagtttattcagtaaacaacttgtacttgtttcatctggttttattactctcacccataaacagtaatgactctctgaccctctggaaatatgtaatgcttccaatcttgctttgtgtatctcatttaatttgttataaggtagtactgattttagcatattaatgcgatttcttccttgttgtttgctttggtctgtgttcaatccagagagcttaaattgtcattattttgggaagaaaacctgtatttttgttagtttacaatattatgaaatttcacttcaggagaaactgctgggcttcctgtggctttgttttcttagttactttttccgtgccgtgtattttttaattgatttttcttcttttacttgaaaagaaagtgttttattttcaaatctggtccatatttacattctagttcagagccaagccttaaactgtacagaatttccactgtaattaaaactatttagtgttagttataaatagccttcaaaaagagagattctccattacacgatcacctgcatcacagcccatggtgaatgtatgtttctgcatagcgaaataaaaatggcaaatgcactgaaagc

SEQ ID NO: 130598 - DNA, 3304 bp, Homo sapiens
  Payload ID: 5537
  Gene Symbol: EPB41L3
  Gene Name: erythrocyte membrane protein band 4.1-like 3
  ENST ID: ENST00000400111
  CDS Start-End: 396-1907
gcgcgcccgagcctagtccccacgccgcggcgcgcccgggctccctgctgatcccagaacaatcaaccatgacgaccgaatctggatcagactcggaatccaagccggaccaggaggccgagccccaggaggcggcgggggcgcaggggcgcgcgggggcgcccgtgccggagccgcccaaggaggagcagcagcaggccctggagcagttcgccgccgctgcagcgcacagcaccccggtgcggagggaggtcactgacaaggaacaggagtttgctgccagggctgcaaaacagctcgaatatcagcaattagaagacgataaactttctcagaaatcatctagcagtaaactctctcggtctccattaaagattgtcaaaaagcctaaaagcatgcagtgcaaagtgatacttctcgatggatcagaatatacctgtgatgtagagaaacgctccagaggacaagtgctgtttgataaagtgtgtgaacacttgaacttgctagagaaagactactttgggcttacgtatcgagatgctgaaaaccagaagaattggttggaccctgctaaggaaataaaaaaacaggttcgaagtggtgcttggcacttttcatttaatgtgaaattttatccaccagaccctgcccaactatctgaagatatcaccaggtactacctctgcttgcagttgcgagatgacatcgtgtccggaaggctgccctgctcctttgttaccctggccttgctgggctcctacactgtccagtcagagctcggagactatgacccagatgaatgtgggagcgattacattagtgagttccgctttgcaccaaaccacactaaagaactggaagacaaagtgatcgagctgcacaagagccacagaggaatgacgccagcagaagcagagatgcatttcttggaaaatgccaaaaaattatcaatgtatggggtagatttacatcatgctaaggactcagaaggggtagaaattatgttaggagtttgtgcaagtggtctgttgatatatcgcgaccggctgcgaataaacagatttgcctggcccaaggttctaaagatttcatacaaacggaacaacttttacattaagatccggccgggagagtttgaacaatttgaaagcaccattgggtttaagctgccaaaccatcgagctgccaagcgtttatggaaagtatgtgttgagcatcatacatttttcagactactgttaccagaagcacctcccaagaaattcctaaccttgggttccaagtttcgttatagtggcaggacacaagcgcaaacgagaagagccagtgcgttgatagatcgcccagcaccttactttgaacgctcatccagcaaacgttataccatgtctcgcagcttggatggagcatcagtgaatgaaaaccatgaaatatacatgaaggattctatgtctgctgcagaggttggtactggccagtacgccacaacaaaaggcatctctcagaccaacttgatcaccactgtgactccggagaagaaggctgaggaggagcgggacgaggaagaggacaaacggaggaagggggaagaagtcacgcccatctcggccatccggcacgagggaaagactgacagtgagcgcacggacaccgcagccgacggggagaccactgccactgaggagctagaaaaaactcaagatgacctgatgaaacatcaaaccaacattagcgagctgaaaagaaccttcttagaaacctcaacagacactgccgtaacgaatgaatgggagaagaggctttccacctcccccgtgcgactggccgccaggcaggaggatgcccccatgatcgaaccacttgtccctgaagagaaaatggaaaccaagacggagtccagtggatagagacggaacccaccgtgcaccacctgccgcttagcactgagaaggtggtgcaggagaccgtgttggtggaggagcggcgtgtggtgcacgcgagtggggatgcttcttactcggcgggagacagcggggatgctgcagcacagcccgcattcacaggcattaaagggaaagagggctctgccttgacggagggggctaaagaggaaggaggggaggaggtcgctaaagctgtcctggaacaggaagagacagccgctgcttcccgtgagcgacaagaggagcagagtgcagccatccacatttcagaaactttggaacaaaaacctcattttgagtcctcaacggtgaagacggaaaccatcagttttggcagtgtttcaccgggaggagtaaagctagaaatttccacgaaggaagtgccagtagttcacaccgaaaccaaaaccatcacatatgaatcatcacaggtcgatccaggcacagatctggagccaggcgtgctgatgagtgcacagacgatcacatctgaaaccaccagtaccaccaccactacgcacatcaccaaaactgtgaaagggggcatttcagagacaagaattgagaagcgaatagtcatcacgggggatgcagacattgaccatgaccaggcgctggctcaggcaattaaagaggccaaagagcagcaccctgacatgtcagtgaccaaagtagtggtccataaagagacagagatcacaccagaagatggagaggattgaccagaggaataacttagcttgcacatgaatgcagtcatgcaaaccgttaggaaaaccagagcctatatggagttccctcttctaacccaactgacttgtatctgtccgtggaaaatttcagtccagaagaattgaccttgaccattaataaagacactggcagagagatcttcccataataaagcaatctgattcagcatcactaaaccgataatgcatgaagcaacgataaaattacaaaagagcagcatttttaattttcacaaaatgtctcagttttcagctatacctgcacgttcataaccaacaatataaaccgtggtctcatgtaacacataaacaattcatgcctttcatagtttattattattaaagtctaaacaaaattgcaatttcttaggtaaccttatatttacaataaatgaagattaccctcaaatgctagaagctgtctaggtccgtccggtgtgtcagattttcctcagattagatgtgccaataaccaagtttattcagtaaacaacttgtacttgtttcatctggttttattactctcacccataaacagtaatgactctctgaccctctggaaatatgtaatgcttccaatcttgctttgtgtatctcatttaatttgtt

SEQ ID NO: 130599 - DNA, 3972 bp, Homo sapiens
  Payload ID: 5537
  Gene Symbol: EPB41L3
  Gene Name: erythrocyte membrane protein band 4.1-like 3
  Uniprot ID: Q9Y2J2
  ENST ID: ENST00000544123
  CDS Start-End: 229-2880
gttatttgatttgccttggctgtggggaattctgtgctcagaagcaaggactggagcagtgaagtcattgtcctgcctggtgttgtgacatcactatggctcaaaggaaacaagggtggggcaggcaaaaccagaccatctgaagcatcttgctggctttaaaactttgcctgatcaatcaatgagactcctttctcaagttgaactgcattgcgagaacaatcaaccatgacgaccgaatctggatcagactcggaatccaagccggaccaggaggccgagccccaggaggcggcgggggcgcaggggcgcgcgggggcgcccgtgccggagccgcccaaggaggagcagcagcaggccctggagcagttcgccgccgctgcagcgcacagcaccccggtgcggagggaggtcactgacaaggaacaggagtttgctgccagggctgcaaaacagctcgaatatcagcaattagaagacgataaactttctcagaaatcatctagcagtaaactctctcggtctccattaaagattgtcaaaaagcctaaaagcatgcagtgcaaagtgatacttctcgatggatcagaatatacctgtgatgtagagaaacgctccagaggacaagtgctgtttgataaagtgtgtgaacacttgaacttgctagagaaagactactttgggcttacgtatcgagatgctgaaaaccagaagaattggttggaccctgctaaggaaataaaaaaacaggttcgaagtggtgcttggcacttttcatttaatgtgaaattttatccaccagaccctgcccaactatctgaagatatcaccaggtactacctctgcttgcagttgcgagatgacatcgtgtccggaaggctgccctgctcctttgttaccctggccttgctgggctcctacactgtccagtcagagctcggagactatgacccagatgaatgtgggagcgattacattagtgagttccgctttgcaccaaaccacactaaagaactggaagacaaagtgatcgagctgcacaagagccacagaggaatgacgccagcagaagcagagatgcatttcttggaaaatgccaaaaaattatcaatgtatggggtagatttacatcatgctaaggactcagaaggggtagaaattatgttaggagtttgtgcaagtggtctgttgatatatcgcgaccggctgcgaataaacagatttgcctggcccaaggttctaaagatttcatacaaacggaacaacttttacattaagatccggccgggagagtttgaacaatttgaaagcaccattgggtttaagctgccaaaccatcgagctgccaagcgtttatggaaagtatgtgttgagcatcatacatttttcagactactgttaccagaagcacctcccaagaaattcctaaccttgggttccaagtttcgttatagtggcaggacacaagcgcaaacgagaagagccagtgcgttgatagatcgcccagcaccttactttgaacgctcatccagcaaacgttataccatgtctcgcagcttggatggagcatcagtgaatgaaaaccatgaaatatacatgaaggattctatgtctgctgcagaggttggtactggccagtacgccacaacaaaaggcatctctcagaccaacttgatcaccactgtgactccggagaagaaggctgaggaggagcgggacgaggaagaggacaaacggaggaagggggaagaagtcacgcccatctcggccatccggcacgagggaaagactgacagtgagcgcacggacaccgcagccgacggggagaccactgccactgagtcggaccaggaggaagatgcagagctcaaggcacaggagctagaaaaaactcaagatgacctgatgaaacatcaaaccaacattagcgagctgaaaagaaccttcttagaaacctcaacagacactgccgtaacgaatgaatgggagaagaggctttccacctcccccgtgcgactggccgccaggcaggaggatgcccccatgatcgaaccacttgtccctgaagagactaagcagtcttctggggaaaagctcatggatggctctgaaatcttcagtttattagagtctgcgcgaaaaccaacagaattcataggaggggttacttctacttctcaaagctgggttcagaaaatggaaaccaagacggagtccagtggaatagagacggaacccaccgtgcaccacctgccgcttagcactgagaaggtggtgcaggagaccgtgttggtggaggagcggcgtgtggtgcacgcgagtggggatgcttcttactcggcgggagacagcggggatgctgcagcacagcccgcattcacaggcattaaagggaaagagggctctgccttgacggagggggctaaagaggaaggaggggaggaggtcgctaaagctgtcctggaacaggaagagacagccgctgcttcccgtgagcgacaagaggagcagagtgcagccatccacatttcagaaactttggaacaaaaacctcattttgagtcctcaacggtgaagacggaaaccatcagttttggcagtgtttcaccgggaggagtaaagctagaaatttccacgaaggaagtgccagtagttcacaccgaaaccaaaaccatcacatatgaatcatcacaggtcgatccaggcacagatctggagccaggcgtgctgatgagtgcacagacgatcacatctgaaaccaccagtaccaccaccactacgcacatcaccaaaactgtgaaagggggcatttcagagacaagaattgagaagcgaatagtcatcacgggggatgcagacattgaccatgaccaggaataacttagcttgcacatgaatgcagtcatgcaaaccgttaggaaaaccagagcctatatggagttccctcttctaacccaactgacttgtatctgtccgtggaaaatttcagtccagaagaattgaccttgaccattaataaagacactggcagagagatcttcccataataaagcaatctgattcagcatcactaaaccgataatgcatgaagcaacgataaaattacaaaagagcagcatttttaattttcacaaaatgtctcagttttcagctatacctgcacgttcataaccaacaatataaaccgtggtctcatgtaacacataaacaattcatgcctttcatagtttattattattaaagtctaaacaaaattgcaatttcttaggtaaccttatatttacaataaatgaagattaccctcaaatgctagaagctgtctaggtccgtccggtgtgtcagattttcctcagattagatgtgccaataaccaagtttattcagtaaacaacttgtacttgtttcatctggttttattactctcacccataaacagtaatgactctctgaccctctggaaatatgtaatgcttccaatcttgctttgtgtatctcatttaatttgttataaggtagtactgattttagcatattaatgcgatttcttccttgttgtttgctttggtctgtgttcaatccagagagcttaaattgtcattattttgggaagaaaacctgtatttttgttagtttacaatattatgaaatttcacttcaggagaaactgctgggcttcctgtggctttgttttcttagttactttttccgtgccgtgtattttttaattgatttttcttcttttacttgaaaagaaagtgttttattttcaaatctggtccatatttacattctagttcagagccaagccttaaactgtacagaatttccactgtaattaaaactatttagtgttagttataaatagccttcaaaaagagagattctccattacacgatcacctgcatcacagcccatggtgaatgtatgtttctgcatagcgaaataaaaatggcaaatgcactgaaagctct

SEQ ID NO: 130600 - DNA, 3370 bp, Homo sapiens
  Payload ID: 5537
  Gene Symbol: EPB41L3
  Gene Name: erythrocyte membrane protein band 4.1-like 3
  Uniprot ID: Q9Y2J2
  ENST ID: ENST00000540638
  CDS Start-End: 381-2978
aaagggctaaagctattggcattggcagctgtctccaggcgtcgtccgcggagcctgaccctgcgccaggacggaggaggctgtgcccatgtaactgtcctgaagtactgcggtggccccctcccccgcggctgggagggcaggcaggacgaggttggctttcctcgcacggtctctgggcgtgggcccccgccgcagctccgcggagcctcggtgtctcctgcaacagggggcggggggaacagcggcgagcagccctgggctgcggcttcctccccacgcccgagtctcctgcgcaccgccgccgaggacgcgcgcccgagcctagtccccacgccgcggcgcgcccgggctccctgctgatcccagaacaatcaaccatgacgaccgaatctggatcagactcggaatccaagccggaccaggaggccgagccccaggaggcggcgggggcgcaggggcgcgcgggggcgcccgtgccggagccgcccaaggaggagcagcagcaggccctggagcagttcgccgccgctgcagcgcacagcaccccggtgcggagggaggtcactgacaaggaacaggagtttgctgccagggctgcaaaacagctcgaatatcagcaattagaagacgataaactttctcagaaatcatctagcagtaaactctctcggtctccattaaagattgtcaaaaagcctaaaagcatgcagtgcaaagtgatacttctcgatggatcagaatatacctgtgatgtagagaaacgctccagaggacaagtgctgtttgataaagtgtgtgaacacttgaacttgctagagaaagactactttgggcttacgtatcgagatgctgaaaaccagaagaattggttggaccctgctaaggaaataaaaaaacaggttcgaagtggtgcttggcacttttcatttaatgtgaaattttatccaccagaccctgcccaactatctgaagatatcaccaggtactacctctgcttgcagttgcgagatgacatcgtgtccggaaggctgccctgctcctttgttaccctggccttgctgggctcctacactgtccagtcagagctcggagactatgacccagatgaatgtgggagcgattacattagtgagttccgctttgcaccaaaccacactaaagaactggaagacaaagtgatcgagctgcacaagagccacagaggaatgacgccagcagaagcagagatgcatttcttggaaaatgccaaaaaattatcaatgtatggggtagatttacatcatgctaaggactcagaaggggtagaaattatgttaggagtttgtgcaagtggtctgttgatatatcgcgaccggctgcgaataaacagatttgcctggcccaaggttctaaagatttcatacaaacggaacaacttttacattaagatccggccgggagagtttgaacaatttgaaagcaccattgggtttaagctgccaaaccatcgagctgccaagcgtttatggaaagtatgtgttgagcatcatacatttttcagactactgttaccagaagcacctcccaagaaattcctaaccttgggttccaagtttcgttatagtggcaggacacaagcgcaaacgagaagagccagtgcgttgatagatcgcccagcaccttactttgaacgctcatccagcaaacgttataccatgtctcgcagcttggatggagcatcagtgaatgaaaaccatgaaatatacatgaaggattctatgtctgctgcagaggttggtactggccagtacgccacaacaaaaggcatctctcagaccaacttgatcaccactgtgactccggagaagaaggctgaggaggagcgggacgaggaagaggacaaacggaggaagggggaagaagtcacgcccatctcggccatccggcacgagggaaagactgacagtgagcgcacggacaccgcagccgacggggagaccactgccactgaggagctagaaaaaactcaagatgacctgatgaaacatcaaaccaacattagcgagctgaaaagaaccttcttagaaacctcaacagacactgccgtaacgaatgaatgggagaagaggctttccacctcccccgtgcgactggccgccaggcaggaggatgcccccatgatcgaaccacttgtccctgaagagaaaatggaaaccaagacggagtccagtggaatagagacggaacccaccgtgcaccacctgccgcttagcactgagaaggtggtgcaggagaccgtgttggtggaggagcggcgtgtggtgcacgcgagtggggatgcttcttactcggcgggagacagcggggatgctgcagcacagcccgcattcacaggcattaaagggaaagagggctctgccttgacggagggggctaaagaggaaggaggggaggaggtcgctaaagctgtcctggaacaggaagagacagccgctgcttcccgtgagcgacaagaggagcagagtgcagccatccacatttcagaaactttggaacaaaaacctcattttgagtcctcaacggtgaagacggaaaccatcagttttggcagtgtttcaccgggaggagtaaagctagaaatttccacgaaggaagtgccagtagttcacaccgaaaccaaaaccatcacatatgaatcatcacaggtcgatccaggcacagatctggagccaggcgtgctgatgagtgcacagacgatcacatctgaaaccaccagtaccaccaccactacgcacatcaccaaaactgtgaaagggggcatttcagagacaagaattgagaagcgaatagtcatcacgggggatgcagacattgaccatgaccaggcgctggctcaggcaattaaagaggccaaagagcagcaccctgacatgtcagtgaccaaagtagtggtccataaagagacagagatcacaccagaagatggagaggattgaccagaggaataacttagcttgcacatgaatgcagtcatgcaaaccgttaggaaaaccagagcctatatggagttccctcttctaacccaactgacttgtatctgtccgtggaaaatttcagtccagaagaattgaccttgaccattaataaagacactggcagagagatcttcccataataaagcaatctgattcagcatcactaaaccgataatgcatgaagcaacgataaaattacaaaagagcagcatttttaattttcacaaaatgtctcagttttcagctatacctgcacgttcataaccaacaatataaaccgtggtctcatgtaacacataaacaattcatgcctttcatagtttattattattaaagtctaaacaaaattgcaa

SEQ ID NO: 130601 - DNA, 572 bp, Homo sapiens
  Payload ID: 5537
  Gene Symbol: EPB41L3
  Gene Name: erythrocyte membrane protein band 4.1-like 3
  ENST ID: ENST00000581833
  CDS Start-End: 223-572
gtgacatcactatggctcaaaggaaacaagggtggggcaggcaaaaccagaccatctgaagcatcttgctggctttaaaactttgcctgatcaatcaatgagactcctttctcaagttgaactgcattgcgagtaatatcagcataaaaaatgaagaaccacagaatggctgcagatgttccttgtcttttccatgactgacatttttcataacaatcaaccatgacgaccgaatctggatcagactcggaatccaagccggaccaggaggccgagccccaggaggcggcgggggcgcaggggcgcgcgggggcgcccgtgccggagccgcccaaggaggagcagcagcaggccctggagcagttcgccgccgctgcagcgcacagcaccccggtgcggagggaggtcactgacaaggaacaggagtttgctgccagggctgcaaaacagctcgaatatcagcaattagaagacgataaactttctcagaaatcatctagcagtaaactctctcggtctccattaaagattgtcaaaaagcctaaaagcatgcagtgcaaagtgatacttct

SEQ ID NO: 130602 - DNA, 551 bp, Homo sapiens
  Payload ID: 5537
  Gene Symbol: EPB41L3
  Gene Name: erythrocyte membrane protein band 4.1-like 3
  ENST ID: ENST00000582703
  CDS Start-End: 280-551
gaagcatcttgctggctttaaaactttgcctgatcaatcaatgagactcctttctcaagttgaactgcattgcgagtaatatcagcataaaaaatgaagaaccacagaatggctgcagatgttccttgtcttttccatgactgacatttttcatgggaaaacacagcttggaaagtaaagaagattttttgttattgttttatcatgccgtttagaagctaaatgaagaagacaaagtatttatagtatcagataagaagttgctctgaacaatcaaccatgacgaccgaatctggatcagactcggaatccaagccggaccaggaggccgagccccaggaggcggcgggggcgcaggggcgcgcgggggcgcccgtgccggagccgcccaaggaggagcagcagcaggccctggagcagttcgccgccgctgcagcgcacagcaccccggtgcggagggaggtcactgacaaggaacaggagtttgctgccagggctgcaaaacagctcgaatatcagcaattagaagacgataaactttctcagaaatc

SEQ ID NO: 130603 - DNA, 546 bp, Homo sapiens
  Payload ID: 5537
  Gene Symbol: EPB41L3
  Gene Name: erythrocyte membrane protein band 4.1-like 3
  ENST ID: ENST00000584651
  CDS Start-End: 61-546
gatcacagatgagcagaaatagtgcagctgtattgaccattactcaaagaacaatcaaccatgacgaccgaatctggatcagactcggaatccaagccggaccaggaggccgagccccaggaggcggcgggggcgcaggggcgcgcgggggcgcccgtgccggagccgcccaaggaggagcagcagcaggccctggagcagttcgccgccgctgcagcgcacagcaccccggtgcggagggaggtcactgacaaggaacaggagtttgctgccagggctgcaaaacagctcgaatatcagcaattagaagacgataaactttctcagaaatcatctagcagtaaactctctcggtctccattaaagattgtcaaaaagcctaaaagcatgcagtgcaaagtgatacttctcgatggatcagaatatacctgtgatgtagagaaacgctccagaggacaagtgctgtttgataaagtgtgtgaacacttgaacttgctagagaaagactactttgggcttacgtatcgagatgctgaaaaccagaag

SEQ ID NO: 130604 - DNA, 542 bp, Homo sapiens
  Payload ID: 5537
  Gene Symbol: EPB41L3
  Gene Name: erythrocyte membrane protein band 4.1-like 3
  ENST ID: ENST00000584670
  CDS Start-End: 100-542
aaaactttgcctgatcaatcaatgagactcctttctcaagttgaactgcattgcgagtaatatcagcataaaaaatgaagaaccacagaatggctgcagatgttccttgtcttttccatgactgacatttttcattttgaacaatttgaaagcaccattgggtttaagctgccaaaccatcgagctgccaagcgtttatggaaagtatgtgttgagcatcatacatttttcagactactgttaccagaagcacctcccaagaaattcctaaccttgggttccaagtttcgttatagtggcaggacacaagcgcaaacgagaagagccagtgcgttgatagatcgcccagcaccttactttgaacgctcatccagcaaacgttataccatgtctcgcagcttggatggagcatcagtgaatgaaaaccatgaaatatacatgaaggattctatgtctgctgcagaggttggtactggccagtacgccacaacaaaaggcatctctcagaccaacttgatcaccactgtgactccggagaagaa

SEQ ID NO: 130605 - DNA, 552 bp, Homo sapiens
  Payload ID: 5537
  Gene Symbol: EPB41L3
  Gene Name: erythrocyte membrane protein band 4.1-like 3
  ENST ID: ENST00000580989
  CDS Start-End: 178-552
tttggtactaagctagataatgttgggggttaacttgatgagctgaatgttagcctactctggacctgaactgtaatcttccagtggacattactaggcatgcgccattcacccaagaaaaactgaagtgaatcctagataggatcctttttttgtgtgtgctcagaacaatcaaccatgacgaccgaatctggatcagactcggaatccaagccggaccaggaggccgagccccaggaggcggcgggggcgcaggggcgcgcgggggcgcccgtgccggagccgcccaaggaggagcagcagcaggccctggagcagttcgccgccgctgcagcgcacagcaccccggtgcggagggaggtcactgacaaggaacaggagtttgctgccagggctgcaaaacagctcgaatatcagcaattagaagacgataaactttctcagaaatcatctagcagtaaactctctcggtctccattaaagattgtcaaaaagcctaaaagcatgcagtgcaaagtgatacttctcgatggatcagaatatacctgtgat

SEQ ID NO: 130606 - DNA, 567 bp, Homo sapiens
  Payload ID: 5537
  Gene Symbol: EPB41L3
  Gene Name: erythrocyte membrane protein band 4.1-like 3
  ENST ID: ENST00000585142
  CDS Start-End: 229-567
gttatttgatttgccttggctgtggggaattctgtgctcagaagcaaggactggagcagtgaagtcattgtcctgcctggtgttgtgacatcactatggctcaaaggaaacaagggtggggcaggcaaaaccagaccatctgaagcatcttgctggctttaaaactttgcctgatcaatcaatgagactcctttctcaagttgaactgcattgcgagaacaatcaaccatgacgaccgaatctggatcagactcggaatccaagccggaccaggaggccgagccccaggaggcggcgggggcgcaggggcgcgcgggggcgcccgtgccggagccgcccaaggaggagcagcagcaggccctggagcagttcgccgccgctgcagcgcacagcaccccggtgcggagggaggtcactgacaaggaacaggagtttgctgccagggctgcaaaacagctcgaatatcagcaattagaagacgataaactttctcagaaatcatctagcagtaaactctctcggtctccattaaagattgtcaaaaagcctaaaagcatgcagtgcaaa

SEQ ID NO: 130607 - DNA, 553 bp, Homo sapiens
  Payload ID: 5537
  Gene Symbol: EPB41L3
  Gene Name: erythrocyte membrane protein band 4.1-like 3
  ENST ID: ENST00000582592
  CDS Start-End: 265-553
acagtcatgcggagaagctacactgggaaccaggggaaatattagaagaagaatctgaaggacactataaaatactgtgcagttattgcttcctgccccggcttgatttttggagtgttgaatttaaggagagaatctggatgtgatagaaagcaattgcttttacctttccgggatctttctgtgtttcacagagaatattcctggaggaatagaagccggagagtcaatgctacagtaactttgaaattgctgcactgcagcatgccatctttcatctgtctctatctgtgctcaaagtctctcttaggatttggagaacaatcaaccatgacgaccgaatctggatcagactcggaatccaagccggaccaggaggccgagccccaggaggcggcgggggcgcaggggcgcgcgggggcgcccgtgccggagccgcccaaggaggagcagcagcaggccctggagcagttcgccgccgctgcagcgcacagcaccccggtgcggagggaggtcactgacaaggaacaggagtttgctgccagggctgcaa

SEQ ID NO: 130608 - DNA, 492 bp, Homo sapiens
  Payload ID: 5537
  Gene Symbol: EPB41L3
  Gene Name: erythrocyte membrane protein band 4.1-like 3
  ENST ID: ENST00000580308
  CDS Start-End: 112-492
ccatctcagtggtgaagttgacaagtcatctgtccagtgtgtggaataggatggggtttggtagcatctccctctctgtggttctcttgagcctttcacgaacaatcaaccatgacgaccgaatctggatcagactcggaatccaagccggaccaggaggccgagccccaggaggcggcgggggcgcaggggcgcgcgggggcgcccgtgccggagccgcccaaggaggagcagcagcaggccctggagcagttcgccgccgctgcagcgcacagcaccccggtgcggagggaggtcactgacaaggaacaggagtttgctgccagggctgcaaaacagctcgaatatcagcaattagaagacgataaactttctcagaaatcatctagcagtaaactctctcggtctccattaaagattgtcaaaaagcctaaaagcatgcagtgcaaagtgatacttctcgatggatcagaatatacctgtgatgtagag

SEQ ID NO: 130609 - DNA, 500 bp, Homo sapiens
  Payload ID: 5537
  Gene Symbol: EPB41L3
  Gene Name: erythrocyte membrane protein band 4.1-like 3
  ENST ID: ENST00000584015
  CDS Start-End: 120-500
ggcgggtggcggctggcgggccgcgggaggggccctgcgctcagcgcgcggcggcagcgggctcgtcccgggtgcaggcgcgggcgggcgcagcgcggggccgataagaacaatcaaccatgacgaccgaatctggatcagactcggaatccaagccggaccaggaggccgagccccaggaggcggcgggggcgcaggggcgcgcgggggcgcccgtgccggagccgcccaaggaggagcagcagcaggccctggagcagttcgccgccgctgcagcgcacagcaccccggtgcggagggaggtcactgacaaggaacaggagtttgctgccagggctgcaaaacagctcgaatatcagcaattagaagacgataaactttctcagaaatcatctagcagtaaactctctcggtctccattaaagattgtcaaaaagcctaaaagcatgcagtgcaaagtgatacttctcgatggatcagaatatacctgtgatgtagag

SEQ ID NO: 130610 - DNA, 496 bp, Homo sapiens
  Payload ID: 5537
  Gene Symbol: EPB41L3
  Gene Name: erythrocyte membrane protein band 4.1-like 3
  ENST ID: ENST00000580179
  CDS Start-End: 258-496
agaccatctgaagcatcttgctggctttaaaactttgcctgatcaatcaatgagactcctttctcaagttgaactgcattgcgagtaatatcagcataaaaaatgaagaaccacagaatggctgcagatgttccttgtcttttccatgactgacatttttcattcccaggcattcttctaggactgaagatggaagagaagcaagcagatacaaacccctgctgttctggagcttctattgcacagaacaatcaaccatgacgaccgaatctggatcagactcggaatccaagccggaccaggaggccgagccccaggaggcggcgggggcgcaggggcgcgcgggggcgcccgtgccggagccgcccaaggaggagcagcagcaggccctggagcagttcgccgccgctgcagcgcacagcaccccggtgcggagggaggtcactgacaaggaacaggagtttgctgccagggctgcaaaacagctcgaatatca

SEQ ID NO: 130611 - DNA, 553 bp, Homo sapiens
  Payload ID: 5537
  Gene Symbol: EPB41L3
  Gene Name: erythrocyte membrane protein band 4.1-like 3
  ENST ID: ENST00000578503
  CDS Start-End: 68-553
gcagagggaaggtagtggcacggagtgacctgctcttcccttttttctgcttgcagaacaatcaaccatgacgaccgaatctggatcagactcggaatccaagccggaccaggaggccgagccccaggaggcggcgggggcgcaggggcgcgcgggggcgcccgtgccggagccgcccaaggaggagcagcagcaggccctggagcagttcgccgccgctgcagcgcacagcaccccggtgcggagggaggtcactgacaaggaacaggagtttgctgccagggctgcaaaacagctcgaatatcagcaattagaagacgataaactttctcagaaatcatctagcagtaaactctctcggtctccattaaagattgtcaaaaagcctaaaagcatgcagtgcaaagtgatacttctcgatggatcagaatatacctgtgatgtagagaaacgctccagaggacaagtgctgtttgataaagtgtgtgaacacttgaacttgctagagaaagactactttgggcttacgtatcgagatgctgaaaaccagaag

SEQ ID NO: 130612 - DNA, 596 bp, Homo sapiens
  Payload ID: 5537
  Gene Symbol: EPB41L3
  Gene Name: erythrocyte membrane protein band 4.1-like 3
  ENST ID: ENST00000579951
  CDS Start-End: 1-333
tcctcaacggtgaagacggaaaccatcagttttggcagtgtttcaccgggaggagtaaagctagaaatttccacgaaggaagtgccagtagttcacaccgaaaccaaaaccatcacatatgaatcatcacaggtcgatccaggcacagatctggagccaggcgtgctgatgagtgcacagacgatcacatctgaaaccaccagtaccaccaccactacgcacatcaccaaaactgtgaaagggggcatttcagagacaagaattgagaagcgaatagtcatcacgggggatgcagacattgaccatgaccaggtagtgtgtgtgagacggtaaataccctggcagagaaacaaagaaaaacctgttggtcctacagtttcaatgctattcctctagtccagcatgtattccgaagaaaattccgaattaactttccaatatatgatttatgattccttttgtaatcattgtacctcatttgtaaattgtggatatagatctagctcataagtctccacctcaccactgatcatgcatgttccacctcctttttgtttctgcccttctgtgatttcccggggataggcgctggctca

SEQ ID NO: 130613 - DNA, 564 bp, Homo sapiens
  Payload ID: 5537
  Gene Symbol: EPB41L3
  Gene Name: erythrocyte membrane protein band 4.1-like 3
  ENST ID: ENST00000580316
  CDS Start-End: 1-564
gttataccatgtctcgcagcttggatggagcatcagtgaatgaaaaccatgaaatatacatgaaggattctatgtctgctgcagaggttggtactggccagtacgccacaacaaaaggcatctctcagaccaacttgatcaccactgtgactccggagaagaaggctgaggaggagcgggacgaggaagaggacaaacggaggaagggggaagaagtcacgcccatctcggccatccggcacgagggaaagactgacagtgagcgcacggacaccgcagccgacggggagaccactgccactgagtcggaccaggaggaagatgcagagctcaaggcacaggagctagaaaaaactcaagatgacctgatgaaacatcaaaccaacattagcgagctgaaaagaaccttcttagaaacctcaacagacactgccgtaacgaatgaatgggagaagaggctttccacctcccccgtgcgactggccgccaggcaggaggatgcccccatgatcgaaccacttgtccctgaagagactaagcagtcttctggggaaaagctcatgg

SEQ ID NO: 130614 - DNA, 551 bp, Homo sapiens
  Payload ID: 5537
  Gene Symbol: EPB41L3
  Gene Name: erythrocyte membrane protein band 4.1-like 3
  ENST ID: ENST00000581292
  CDS Start-End: 1-551
aaggctgaggaggagcgggacgaggaagaggacaaacggaggaagggggaagaagtcacgcccatctcggccatccggcacgagggaaaggagctagaaaaaactcaagatgacctgatgaaacatcaaaccaacattagcgagctgaaaagaaccttcttagaaacctcaacagacactgccgtaacgaatgaatgggagaagaggctttccacctcccccgtgcgactggccgccaggcaggaggatgcccccatgatcgaaccacttgtccctgaagagaaaatggaaaccaagacggagtccagtggaatagagacggaacccaccgtgcaccacctgccgcttagcactgagaaggtggtgcaggagaccgtgttggtggaggagcggcgtgtggtgcacgcgagtggggatgcttcttactcggcgggagacagcggggatgctgcagcacagcccgcattcacaggcattaaagggaaagagggctctgccttgacggagggggctaaagaggaaggaggggaggaggtcgctaaagctgtcct

SEQ ID NO: 130615 - DNA, 583 bp, Homo sapiens
  Payload ID: 5537
  Gene Symbol: EPB41L3
  Gene Name: erythrocyte membrane protein band 4.1-like 3
  ENST ID: ENST00000581387
  CDS Start-End: 1-583
gtgactccggagaagaaggctgaggaggagcgggacgaggaagaggacaaacggaggaagggggaagaagtcacgcccatctcggccatccggcacgagggaaagactgacagtgagcgcacggacaccgcagccgacggggagaccactgccactgaggagctagaaaaaactcaagatgacctgatgaaacatcaaaccaacattagcgagctgaaaagaaccttcttagaaacctcaacagacactgccgtaacgaatgaatgggagaagaggctttccacctcccccgtgcgactggccgccaggcaggaggatgcccccatgatcgaaccacttgtccctgaagagaccaaagaagaaacagagatttctgaaaaagttatatttttgcagcaaggaagcgctccattccttgagtctcagactaagcagtcttctggggaaaagctcatggatggctctgaaatcttcagtttattagagtctgcgcgaaaaccaacagaattcataggaggggttacttctacttctcaaagctgggttcagaaaatggaaaccaagacggagtccagtggaatag

SEQ ID NO: 130616 - DNA, 569 bp, Homo sapiens
  Payload ID: 5537
  Gene Symbol: EPB41L3
  Gene Name: erythrocyte membrane protein band 4.1-like 3
  ENST ID: ENST00000580647
  CDS Start-End: 1-569
gaggaggagcgggacgaggaagaggacaaacggaggaagggggaagaagtcacgcccatctcggccatccggcacgagggaaagactgacagtgagcgcacggacaccgcagccgacggggagaccactgccactgaggagctagaaaaaactcaagatgacctgatgaaacatcaaaccaacattagcgagctgaaaagaaccttcttagaaacctcaacagacactgccgtaacgaatgaatgggagaagaggctttccacctcccccgtgcgactggccgccaggcaggaggatgcccccatgatcgaaccacttgtccctgaagaggtcagtagtcagaccaaagaagaaacagagatttctgaaaaagttatatttttgcagcaaggaagcgctccattccttgagtctcagactaagcagtcttctggggaaaagctcatggatggctctgaaatcttcagtttattagagtctgcgcgaaaaccaacagaattcataggaggggttacttctacttctcaaagctgggttcagaaaatggaaaccaagacggagtccagtgg

SEQ ID NO: 130617 - DNA, 591 bp, Homo sapiens
  Payload ID: 5537
  Gene Symbol: EPB41L3
  Gene Name: erythrocyte membrane protein band 4.1-like 3
  ENST ID: ENST00000579271
  CDS Start-End: 1-591
gaaggctgaggaggagcgggacgaggaagaggacaaacggaggaagggggaagaagtcacgcccatctcggccatccggcacgagggaaagactgacagtgagcgcacggacaccgcagccgacggggagaccactgccactgaggagctagaaaaaactcaagatgacctgatgaaacatcaaaccaacattagcgagctgaaaagaaccttcttagaaacctcaacagacactgccgtaacgaatgaatgggagaagaggctttccacctcccccgtgcgactggccgccaggcaggaggatgcccccatgatcgaaccacttgtccctgaagagccaagtgtgataaagaaaatgcaggaaggagactctgctgactctgtggttacttctcgtcaaataattttccagaaaactgtcccatcaaccctagagactaagcagtcttctggggaaaagctcatggatggctctgaaatcttcagtttattagagtctgcgcgaaaaccaacagaattcataggaggggttacttctacttctcaaagctgggttcagaaaatggaaaccaagacggagtccagtggaat

SEQ ID NO: 130618 - DNA, 3190 bp, Homo sapiens
  Payload ID: 5537
  Gene Symbol: EPB41L3
  Gene Name: erythrocyte membrane protein band 4.1-like 3
  ENST ID: ENST00000545076
  CDS Start-End: 538-2808
ctttggcgcgtcctgctcagaagccggggagctcctggccggcggctggcggggaagcgcggcgcgggaggaggtattgggagacaaaagaagctcatctataaacattttccatgaatcaagcagaaacttgggttttaaaggattcgcatagaacgggatgccacaggcaaggacagatcccctgaggctgtggaatgagtggggacatccccgcccatctctggtcttgactcggaatccaagccggaccaggaggccgagccccaggaggcggcgggggcgcaggggcgcgcgggggcgcccgtgccggagccgcccaaggaggagcagcagcaggccctggagcagttcgccgccgctgcagcgcacagcaccccggtgcggagggaggtcactgacaaggaacaggagtttgctgccagggctgcaaaacagctcgaatatcagcaattagaagacgataaactttctcagaaatcatctagcagtaaactctctcggtctccattaaagattgtcaaaaagcctaaaagcatgcagtgcaaagtgatacttctcgatggatcagaatatacctgtgatgtagagaaacgctccagaggacaagtgctgtttgataaagtgtgtgaacacttgaacttgctagagaaagactactttgggcttacgtatcgagatgctgaaaaccagaagaattggttggaccctgctaaggaaataaaaaaacaggttcgaagtggtgcttggcacttttcatttaatgtgaaattttatccaccagaccctgcccaactatctgaagatatcaccaggtactacctctgcttgcagttgcgagatgacatcgtgtccggaaggctgccctgctcctttgttaccctggccttgctgggctcctacactgtccagtcagagctcggagactatgacccagatgaatgtgggagcgattacattagtgagttccgctttgcaccaaaccacactaaagaactggaagacaaagtgatcgagctgcacaagagccacagaggaatgacgccagcagaagcagagatgcatttcttggaaaatgccaaaaaattatcaatgtatggggtagatttacatcatgctaaggactcagaaggggtagaaattatgttaggagtttgtgcaagtggtctgttgatatatcgcgaccggctgcgaataaacagatttgcctggcccaaggttctaaagatttcatacaaacggaacaacttttacattaagatccggccgggagagtttgaacaatttgaaagcaccattgggtttaagctgccaaaccatcgagctgccaagcgtttatggaaagtatgtgttgagcatcatacatttttcagactactgttaccagaagcacctcccaagaaattcctaaccttgggttccaagtttcgttatagtggcaggacacaagcgcaaacgagaagagccagtgcgttgatagatcgcccagcaccttactttgaacgctcatccagcaaacgttataccatgtctcgcagcttggatggagcatcagtgaatgaaaaccatgaaatatacatgaaggattctatgtctgctgcagaggttggtactggccagtacgccacaacaaaaggcatctctcagaccaacttgatcaccactgtgactccggagaagaaggctgaggaggagcgggacgaggaagaggacaaacggaggaagggggaagaagtcacgcccatctcggccatccggcacgagggaaagactgacagtgagcgcacggacaccgcagccgacggggagaccactgccactgaggagctagaaaaaactcaagatgacctgatgaaacatcaaaccaacattagcgagctgaaaagaaccttcttagaaacctcaacagacactgccgtaacgaatgaatgggagaagaggctttccacctcccccgtgcgactggccgccaggcaggaggatgcccccatgatcgaaccacttgtccctgaagagaaaatggaaaccaagacggagtccagtggaatagagacggaacccaccgtgcaccacctgccgcttagcactgagaaggtggtgcaggagaccgtgttggtggaggagcggcgtgtggtgcacgcgagtggggatgcttcttactcggcgggagacagcggggatgctgcagcacagcccgcattcacaggcattaaagggaaagagggctctgccttgacggagggggctaaagaggaaggaggggaggaggtcgctaaagctgtcctggaacaggaagagacagccgctgcttcccgtgagcgacaagaggagcagagtgcagccatccacatttcagaaactttggaacaaaaacctcattttgagtcctcaacggtgaagacggaaaccatcagttttggcagtgtttcaccgggaggagtaaagctagaaatttccacgaaggaagtgccagtagttcacaccgaaaccaaaaccatcacatatgaatcatcacaggtcgatccaggcacagatctggagccaggcgtgctgatgagtgcacagacgatcacatctgaaaccaccagtaccaccaccactacgcacatcaccaaaactgtgaaagggggcatttcagagacaagaattgagaagcgaatagtcatcacgggggatgcagacattgaccatgaccaggcgctggctcaggcaattaaagaggccaaagagcagcaccctgacatgtcagtgaccaaagtagtggtccataaagagacagagatcacaccagaagatggagaggattgaccagaggaataacttagcttgcacatgaatgcagtcatgcaaaccgttaggaaaaccagagcctatatggagttccctcttctaacccaactgacttgtatctgtccgtggaaaatttcagtccagaagaattgaccttgaccattaataaagacactggcagagagatcttcccataataaagcaatctgattcagcatcactaaaccgataatgcatgaagcaacgataaaattacaaaagagcagcatttttaattttcacaaaatgtctcagttttcagctatacctgcacgttcataaccaacaatataaaccgtggtctcatgtaacacataaacaattcatgcctttcatagtttattattattaaagtctaaac

SEQ ID NO: 130619 - DNA, 973 bp, Homo sapiens
  Payload ID: 5537
  Gene Symbol: EPB41L3
  Gene Name: erythrocyte membrane protein band 4.1-like 3
  ENST ID: ENST00000578524
  CDS Start-End: 1-973
gactccggagaagaaggctgaggaggagcgggacgaggaagaggacaaacggaggaagggggaagaagtcacgcccatctcggccatccggcacgagggaaagactgacagtgagcgcacggacaccgcagccgacggggagaccactgccactgaggagctagaaaaaactcaagatgacctgatgaaacatcaaaccaacattagcgagctgaaaagaaccttcttagaaacctcaacagacactgccgtaacgaatgaatgggagaagaggctttccacctcccccgtgcgactggccgccaggcaggaggatgcccccatgatcgaaccacttgtccctgaagagactaagcagtcttctggggaaaagctcatggatggctctgaaatcttcagtttattagagtctgcgcgaaaaccaacagaattcataggaggggttacttctacttctcaaagctgggttcagaaaatggaaaccaagacggagtccagtggaatagagacggaacccaccgtgcaccacctgccgcttagcactgagaaggtggtgcaggagaccgtgttggtggaggagcggcgtgtggtgcacgcgagtggggatgcttcttactcggcgggagacagcggggatgctgcagcacagcccgcattcacaggcattaaagggaaagagggctctgccttgacggagggggctaaagaggaaggaggggaggaggtcgctaaagctgtcctggaacaggaagagacagccgctgcttcccgtgagcgacaagaggagcagagtgcagccatccacatttcagaaactttggaacaaaaacctcattttgagtcctcaacggtgaagacggaaaccatcagttttggcagtgtttcaccgggaggagtaaagctagaaatttccacgaaggaagtgccagtagttcacaccgaaaccaaaaccatcacatatgaatcatcacag

SEQ ID NO: 130620 - DNA, 489 bp, Homo sapiens
  Payload ID: 5537
  Gene Symbol: EPB41L3
  Gene Name: erythrocyte membrane protein band 4.1-like 3
  ENST ID: ENST00000580866
  CDS Start-End: 1-110
agcagttcgccgccgctgcagcgcacagcaccccggtgcggagggaggtgagcccaggccagaaaactaatgacgcagtgtttgctgagctgctccaggatcggctttaaccttggtctcttagccctagaggcagctatgaggggtcatctgctgttccccttctagccccaggcagatgaaaatgtcactgacaaggaacaggagtttgctgccagggctgcaaaacagctcgaatatcagcaattagaagacgataaactttctcagaaatcatctagcagtaaactctctcggtctccattaaagattgtcaaaaagcctaaaagcatgcagtgcaaagtgatacttctcgatggatcagaatatacctgtgatgtagagaaacgctccagaggacaagtgctgtttgataaagtgtgtgaacacttgaacttgctagagaaagactactttgggcttacgtatcgagatgctgaaaaccagaag

SEQ ID NO: 130621 - DNA, 4553 bp, Homo sapiens
  Payload ID: 5538
  Gene Symbol: EPB42
  Gene Name: erythrocyte membrane protein band 4.2
  Uniprot ID: P16452
  ENST ID: ENST00000300215
  CDS Start-End: 459-2624
tggatatgggactcctgtttgtggcctcctctcttccagagtcttccagtgcagtccagataacatctctgagagtctcttgagaccactgaagcaagaggcttcaaggtttgttctaggcttctctagttggcaggtcttccccatcccaccccctcccccagggctgccaggcgtattcctgcctgggcctcctggcacaagagataaaatgaacagggttactcccagtaactggtccaggagataccagcagagagggagtaggagagaagaaacatgtcagggtgctcacaggagtagtggggggaggttttgctatttccagattcttaagccaacaaaagtgccttcatattttctgtctggaagacagaaagcccagaaggagcccagaagcaacagtttgagagaggcgctttctgcggccaagtggataagaggagcggcctgcaaccatgggacagggtgagccaagccagcgctcgacagggcttgctggactgtatgcagcccccgcagcatcacctgttttcattaaaggaagtgggatggatgccctgggtatcaagagctgtgactttcaggcagcaagaaacaatgaggagcaccacaccaaggccctcagctcccggcgcctctttgtgaggagggggcagcccttcaccatcatcctgtacttccgcgctccagtccgtgcatttctgcctgccctgaagaaggtggccctcactgcacaaactggagagcagccttccaagatcaacaggacccaagccacattcccaatttccagtctgggggaccgaaagtggtggagtgcagtggtggaggagagagatgcccagtcctggaccatctctgtgaccacacctgcggacgctgtcattggccactactcgcttctgctgcaggtctcaggcaggaagcaactcctcttgggtcagttcacactgctttttaacccctggaatagagaggatgctgtgttcctgaagaatgaggctcagcgcatggagtacttgttgaaccagaatggtctcatctacctgggtacagctgactgcatccaggcagagtcctgggactttggccagttcgagggggatgtcattgacctcagcctgcgcttgctgagcaaggacaagcaggtagagaagtggagccagccggtgcacgtggcccgtgtgttgggtgccttgctgcattttctcaaggagcagagggtcctgcccaccccgcagacccaggccacccaggaaggggccttgctgaacaagcgccggggcagcgtgcccatcctgcggcagtggctcaccggccgaggccgacctgtgtatgatggccaggcctgggtgttggctgctgttgcttgcacagtgctgcgatgcctgggaatccctgcccgcgtggtgaccacgtttgcctcagcacagggcaccggtgggcgtcttctcatagatgaatactataatgaggagggacttcagaacggagaaggccagagaggcagaatctggatcttccagacttccacagagtgctggatgacgcggcctgccttgccccagggttatgatggatggcagattctgcacccaagtgctcctaatggaggtggagtcctggggtcctgtgatctggtgccggtcagagcagtcaaggaggggacgctggggctgaccccagcagtgtcagacctttttgctgccataaatgcctcatgtgtggtctggaagtgctgtgaggatgggacactggagttgactgactccaacacaaagtatgttggcaacaacatcagcaccaagggtgtgggcagtgaccgctgcgaggacatcactcagaactacaagtatcctgaagggtctcttcaggaaaaagaggtgctggagagagtcgagaaagagaaaatggaacgtgagaaagacaacggcatccgtcctcccagtctcgagactgccagtcctctgtacctgctcttgaaagcacccagctccctacccctgagaggggatgcccagatctcagtgacgctggttaatcacagtgagcaggagaaggcagtgcagctggcaattggggtccaggctgtacactacaacggtgtccttgctgccaagctctggaggaagaagctgcacctcacgctcagtgccaacctggaaaagataataaccatcggcctgttcttctccaattttgagcgaaacccacccgagaacaccttccttagactcaccgccatggcaacacactctgaatccaaccttagctgctttgctcaggaagacattgccatttgtagaccacaccttgccatcaagatgccagagaaagcagagcagtatcaacccctcacagcctcagtcagcctccagaactccctagatgcccccatggaggactgtgtgatctccatcctgggaagggggctcattcacagagagaggagctacagattccgttcagtgtggcctgaaaacaccatgtgtgccaagttccagttcacgccaacacatgtggggctccagagactcactgtggaagtggactgcaacatgttccagaacctaaccaactataaaagcgtcaccgtggtagcccctgaactatcagcttaaacttccagctctatcaccactctcctgccaacccttgttctacaatctaaaccaaacatgtgctaggaagagaaactttgcgtctcagtgtttgtgttgctataaaggaataactgaggctgggtagtttaaaagaaaagagctttatttggctcacggctctgcaggctgtacaagaaacagtgagggcttcaggctgcttccacttatgcaggaagatgaagggaggcaacgtgagcagagatcacagggcaagaatgggttgaggggtaggggtaagtgccaggtgccagcctcgttttaacagccagctctggggtgggggagggacatatagagcgagaacttactcattaccccaccaatggaacgaagccattcatgagggatccaaacacctcccattaggccccacctccaacactgggaatccaatttcagcatgaggtttgcagggttgaatatccaaactacatcactttatcagataaatgagtagtcattcaggttgaaaaggtgctcagatacctttaaggagtacattcagattgttcaggttcaggttttttgcaaccattttactgctcattaatacattcattaacttacagataagggaaaggacctaacacttaaatcattctaatatttctgatgaagtgggatattatcccaaaatggaatttttaggtaatcttaaaattacattgatcaagctgggctcggtggctcacatctgtaatcccagcactttgggaggctgacgtgggcagatcacctgaggtcaggagtttgagaccagcctggccaacatggtgaaaccccatctctactaaaaatacaaaaattagctggacatggtggtgtgcatctgtagtcccagctacttgagaggctgaagccagagaattgcttgagaacctgggaggcggaggttgcagtgagccgagagtgtgccactgcactccagcttgggggacagagcaagactccatctcaaaaaaaaaaaaaaaaaaaaaaaaattacattgatcagtgctttccctgatcattatccttaaagatccaaacatgactgaacgaagttatacaatacaggacctgagagaataattcagctagaggtaagtctttatattagagttctatattcattaagtatcccacaattaaagtctgatgttaataacatgaatttggtccagtagagaaatataaaagtatataaaaaataggctctatatgaaaggataaaagaactagactgttgtacaatgttattattttgtttatgttattttgttgccttgacactctgtcagtttgattttagttccttcccttcatgacacttgttaacaatacaaaatggcacttcaaaacagtaagctaaaactcatttggcttaaggaatttcaaccccaaccccaagtatacattagtcactcaaagaatgactgctgttgctgattatacctaaagacagcagaaaggcatatgttatgaattacacctacaaaaggaagatgatgggcatgagaggtggcggagacctgtaggacatgcataatgccctattcagctcaccagaatatacatcattatagatttacactgctttccaatatgcagtcttctagactgatgcaaaagtataattaagtggtgatggttttgcaaaaggatgaactgaaaaggcccttaaaattacataaaatctcttacacactaaaaaatttttgatttataaaaatttggtatttacatttggggacacacgtaaccaaggacaacacaagtatgtataaggaaaataaatctgttcaataaggtgggcaaacctaacaaatgagctcaatgccaatatattttagagacatggagtaatctgtgataatattcagaaggacttgctgataataatatata

SEQ ID NO: 130622 - DNA, 2374 bp, Homo sapiens
  Payload ID: 5538
  Gene Symbol: EPB42
  Gene Name: erythrocyte membrane protein band 4.2
  Uniprot ID: P16452
  ENST ID: ENST00000441366
  CDS Start-End: 227-2302
aactggtccaggagataccagcagagagggagtaggagagaagaaacatgtcagggtgctcacaggagtagtggggggaggttttgctatttccagattcttaagccaacaaaagtgccttcatattttctgtctggaagacagaaagcccagaaggagcccagaagcaacagtttgagagaggcgctttctgcggccaagtggataagaggagcggcctgcaaccatgggacaggccctgggtatcaagagctgtgactttcaggcagcaagaaacaatgaggagcaccacaccaaggccctcagctcccggcgcctctttgtgaggagggggcagcccttcaccatcatcctgtacttccgcgctccagtccgtgcatttctgcctgccctgaagaaggtggccctcactgcacaaactggagagcagccttccaagatcaacaggacccaagccacattcccaatttccagtctgggggaccgaaagtggtggagtgcagtggtggaggagagagatgcccagtcctggaccatctctgtgaccacacctgcggacgctgtcattggccactactcgcttctgctgcaggtctcaggcaggaagcaactcctcttgggtcagttcacactgctttttaacccctggaatagagaggatgctgtgttcctgaagaatgaggctcagcgcatggagtacttgttgaaccagaatggtctcatctacctgggtacagctgactgcatccaggcagagtcctgggactttggccagttcgagggggatgtcattgacctcagcctgcgcttgctgagcaaggacaagcaggtagagaagtggagccagccggtgcacgtggcccgtgtgttgggtgccttgctgcattttctcaaggagcagagggtcctgcccaccccgcagacccaggccacccaggaaggggccttgctgaacaagcgccggggcagcgtgcccatcctgcggcagtggctcaccggccgaggccgacctgtgtatgatggccaggcctgggtgttggctgctgttgcttgcacagtgctgcgatgcctgggaatccctgcccgcgtggtgaccacgtttgcctcagcacagggcaccggtgggcgtcttctcatagatgaatactataatgaggagggacttcagaacggagaaggccagagaggcagaatctggatcttccagacttccacagagtgctggatgacgcggcctgccttgccccagggttatgatggatggcagattctgcacccaagtgctcctaatggaggtggagtcctggggtcctgtgatctggtgccggtcagagcagtcaaggaggggacgctggggctgaccccagcagtgtcagacctttttgctgccataaatgcctcatgtgtggtctggaagtgctgtgaggatgggacactggagttgactgactccaacacaaagtatgttggcaacaacatcagcaccaagggtgtgggcagtgaccgctgcgaggacatcactcagaactacaagtatcctgaagggtctcttcaggaaaaagaggtgctggagagagtcgagaaagagaaaatggaacgtgagaaagacaacggcatccgtcctcccagtctcgagactgccagtcctctgtacctgctcttgaaagcacccagctccctacccctgagaggggatgcccagatctcagtgacgctggttaatcacagtgagcaggagaaggcagtgcagctggcaattggggtccaggctgtacactacaacggtgtccttgctgccaagctctggaggaagaagctgcacctcacgctcagtgccaacctggaaaagataataaccatcggcctgttcttctccaattttgagcgaaacccacccgagaacaccttccttagactcaccgccatggcaacacactctgaatccaaccttagctgctttgctcaggaagacattgccatttgtagaccacaccttgccatcaagatgccagagaaagcagagcagtatcaacccctcacagcctcagtcagcctccagaactccctagatgcccccatggaggactgtgtgatctccatcctgggaagggggctcattcacagagagaggagctacagattccgttcagtgtggcctgaaaacaccatgtgtgccaagttccagttcacgccaacacatgtggggctccagagactcactgtggaagtggactgcaacatgttccagaacctaaccaactataaaagcgtcaccgtggtagcccctgaactatcagcttaaacttccagctctatcaccactctcctgccaacccttgttctacaatctaaaccaaacatgtgctaggaagag

SEQ ID NO: 130623 - DNA, 2098 bp, Homo sapiens
  Payload ID: 5538
  Gene Symbol: EPB42
  Gene Name: erythrocyte membrane protein band 4.2
  ENST ID: ENST00000540029
  CDS Start-End: 185-2026
gaaacatgtcagggtgctcacaggagtagtggggggaggttttgctatttccagattcttaagccaacaaaagtgccttcatattttctgtctggaagacagaaagcccagaaggagcccagaagcaacagtttgagagaggcgctttctgcggccaagtggataagaggagcggcctgcaaccatgggacaggccctgggtatcaagagctgtgactttcaggcagcaagaaacaatgaggagcaccacaccaaggccctcagctcccggcgcctctttgtgaggagggggcagcccttcaccatcatcctgtacttccgcgctccagtccgtgcatttctgcctgccctgaagaaggtggccctcactgcacaaactgaggatgctgtgttcctgaagaatgaggctcagcgcatggagtacttgttgaaccagaatggtctcatctacctgggtacagctgactgcatccaggcagagtcctgggactttggccagttcgagggggatgtcattgacctcagcctgcgcttgctgagcaaggacaagcaggtagagaagtggagccagccggtgcacgtggcccgtgtgttgggtgccttgctgcattttctcaaggagcagagggtcctgcccaccccgcagacccaggccacccaggaaggggccttgctgaacaagcgccggggcagcgtgcccatcctgcggcagtggctcaccggccgaggccgacctgtgtatgatggccaggcctgggtgttggctgctgttgcttgcacagtgctgcgatgcctgggaatccctgcccgcgtggtgaccacgtttgcctcagcacagggcaccggtgggcgtcttctcatagatgaatactataatgaggagggacttcagaacggagaaggccagagaggcagaatctggatcttccagacttccacagagtgctggatgacgcggcctgccttgccccagggttatgatggatggcagattctgcacccaagtgctcctaatggaggtggagtcctggggtcctgtgatctggtgccggtcagagcagtcaaggaggggacgctggggctgaccccagcagtgtcagacctttttgctgccataaatgcctcatgtgtggtctggaagtgctgtgaggatgggacactggagttgactgactccaacacaaagtatgttggcaacaacatcagcaccaagggtgtgggcagtgaccgctgcgaggacatcactcagaactacaagtatcctgaagggtctcttcaggaaaaagaggtgctggagagagtcgagaaagagaaaatggaacgtgagaaagacaacggcatccgtcctcccagtctcgagactgccagtcctctgtacctgctcttgaaagcacccagctccctacccctgagaggggatgcccagatctcagtgacgctggttaatcacagtgagcaggagaaggcagtgcagctggcaattggggtccaggctgtacactacaacggtgtccttgctgccaagctctggaggaagaagctgcacctcacgctcagtgccaacctggaaaagataataaccatcggcctgttcttctccaattttgagcgaaacccacccgagaacaccttccttagactcaccgccatggcaacacactctgaatccaaccttagctgctttgctcaggaagacattgccatttgtagaccacaccttgccatcaagatgccagagaaagcagagcagtatcaacccctcacagcctcagtcagcctccagaactccctagatgcccccatggaggactgtgtgatctccatcctgggaagggggctcattcacagagagaggagctacagattccgttcagtgtggcctgaaaacaccatgtgtgccaagttccagttcacgccaacacatgtggggctccagagactcactgtggaagtggactgcaacatgttccagaacctaaccaactataaaagcgtcaccgtggtagcccctgaactatcagcttaaacttccagctctatcaccactctcctgccaacccttgttctacaatctaaaccaaacatgtgctaggaagag

SEQ ID NO: 130624 - DNA, 574 bp, Homo sapiens
  Payload ID: 5538
  Gene Symbol: EPB42
  Gene Name: erythrocyte membrane protein band 4.2
  ENST ID: ENST00000569204
  CDS Start-End: 1-574
gtcattggccactactcgcttctgctgcaggtctcaggcaggaagcaactcctcttgggtcagttcacactgctttttaacccctggaatagagaggatgctgtgttcctgaagaatgaggctcagcgcatggagtacttgttgaaccagaatggtctcatctacctgggtacagctgactgcatccaggcagagtcctgggactttggccagctgcattttctcaaggagcagagggtcctgcccaccccgcagacccaggccacccaggaaggggccttgctgaacaagcgccggggcagcgtgcccatcctgcggcagtggctcaccggccgaggccgacctgtgtatgatggccaggcctgggtgttggctgctgttgcttgcacagtgctgcgatgcctgggaatccctgcccgcgtggtgaccacgtttgcctcagcacagggcaccggtgggcgtcttctcatagatgaatactataatgaggagggacttcagaacggagaaggccagagaggcagaatctggatcttccagacttccacagagtgctggatgacgcggcctgcct

SEQ ID NO: 130625 - DNA, 1813 bp, Homo sapiens
  Payload ID: 5538
  Gene Symbol: EPB42
  Gene Name: erythrocyte membrane protein band 4.2
  ENST ID: ENST00000568508
  CDS Start-End: 1-1632
ccagtccgtgcatttctgcctgccctgaagaaggtggccctcactgcacaaactggagagcagccttccaagatcaacaggacccaagccacattcccaatttccagtctgggggaccgaaagtggtggagtgcagtggtggaggagagagatgcccagtcctggaccatctctgtgaccacacctgcggacgctgtcattggccactactcgcttctgctgcaggtctcaggcaggaagcaactcctcttgggtcagttcacactgctttttaacccctggaatagagaggatgctgtgttcctgaagaatgaggctcagcgcatggagtacttgttgaaccagaatggtctcatctacctgggtacagctgactgcatccaggcagagtcctgggactttggccagttcgagggggatgtcattgacctcagcctgcgcttgctgagcaaggacaagcaggtagagaagtggagccagccggtgcacgtggcccgtgtgttgggtgccttgctgcattttctcaaggagcagagggtcctgcccaccccgcagacccaggccacccaggaaggggccttgctgaacaagcgccggggcagcgtgcccatcctgcggcagtggctcaccggccgaggccgacctgtgtatgatggccaggcctgggtgttggctgctgttgcttgcacagtgctgcgatgcctgggaatccctgcccgcgtggtgaccacgtttgcctcagcacagggcaccggtgggcgtcttctcatagatgaatactataatgaggagggacttcagaacggagaaggccagagaggcagaatctggatcttccagacttccacagagtgctggatgacgcggcctgccttgccccagggttatgatggatggcagattctgcacccaagtgctcctaatggaggtggagtcctggggtcctgtgatctggtgccggtcagagcagtcaaggaggggacgctggggctgaccccagcagtgtcagacctttttgctgccataaatgcctcatgtgtggtctggaagtgctgtgaggatgggacactggagttgactgactccaacacaaagtatgttggcaacaacatcagcaccaagggtgtgggcagtgaccgctgcgaggacatcactcagaactacaagtatcctgaagggtctcttcaggaaaaagaggtgctggagagagtcgagaaagagaaaatggaacgtgagaaagacaacggcatccgtcctcccagtctcgagactgccagtcctctgtacctgctcttgaaagcacccagctccctacccctgagaggggatgcccagatctcagtgacgctggttaatcacagtgagcaggagaaggcagtgcagctggcaattggggtccaggctgtacactacaacggtgtccttgctgccaagctctggaggaagaagctgcacctcacgctcagtgccaacctggatgccagagaaagcagagcagtatcaacccctcacagcctcagtcagcctccagaactccctagatgcccccatggaggactgtgtgatctccatcctgggaagggggctcattcacagagagaggagctacagattccgttcagtgtggcctgaaaacaccatgtgtgccaagttccagttcacgccaacacatgtggggctccagagactcactgtggaagtggactgcaacatgttccagaacctaaccaactataaaagcgtcaccgtggtagcccctgaactatcagcttaaacttccagctctatcaccactctcctgccaacccttgtt

SEQ ID NO: 130626 - DNA, 679 bp, Homo sapiens
  Payload ID: 5538
  Gene Symbol: EPB42
  Gene Name: erythrocyte membrane protein band 4.2
  ENST ID: ENST00000565459
  CDS Start-End: 1-442
ccgctgcgaggacatcactcagaactacaagtatcctgaagggtctcttcaggaaaaagaggtgctggagagagtcgagaaagagaaaatggaacgtgagaaagacaacggcatccgtcctcccagtctcgagactgccagtcctctgtacctgctcttgaaagcacccagctccctacccctgagaggggatgcccagatctcagtgacgctggttaatcacagtgagcaggagaaggcagtgcagctggcaattggggtccaggctgtacactacaacggtgtccttgctgccaagctctggaggaagaagctgcacctcacgctcagtgccaacctgggtaatgctctatggccccaccagacaccccccgacacacacacacacatggcccctgccttgggcaggcagcagccacagggcaccccctgcagtctctagagatggctttgagcccctgctgctcactctcatgttctctctcattcattcattcaacacatatttattgggcctgaagcaggaaaaaaacacgatgccaactgcagtcagataagtaaacagacccttcgtagcagtgtgagaagtgtttgctgagtttaacagagtacagtggcaggagagcacctccccccaggctggaataagctgcccccaaataaattgtactgcatggaa

SEQ ID NO: 130627 - DNA, 2227 bp, Homo sapiens
  Payload ID: 5538
  Gene Symbol: EPB42
  Gene Name: erythrocyte membrane protein band 4.2
  Uniprot ID: P16452
  ENST ID: ENST00000622454
  CDS Start-End: 301-2160
ccccagggctgccaggcgtattcctgcctgggcctcctggcacaagagataaaatgaacagggttactcccagtaactggtccaggagataccagcagagagggagtaggagagaagaaacatgtcagggtgctcacaggagtagtggggggaggttttgctatttccagattcttaagccaacaaaagtgccttcatattttctgtctggaagacagaaagcccagaaggagcccagaagcaacagtttgagagaggcgctttctgcggccaagtggataagaggagcggcctgcaaccatgggacaggccctgggtatcaagagctgtgactttcaggcagcaagaaacaatgaggagcaccacaccaaggccctcagctcccggcgcctctttgtgaggagggggcagcccttcaccatcatcctgtacttccgcgctccagtccgtgcatttctgcctgccctgaagaaggtggccctcactgcacaaactggagagcagccttccaagatcaacaggacccaagccacattcccaatttccagtctgggggaccgaaagtggtggagtgcagtggtggaggagagagatgcccagtcctggaccatctctgtgaccacacctgcggacgctgtcattggccactactcgcttctgctgcaggtctcaggcaggaagcaactcctcttgggtcagttcacactgctttttaacccctggaatagagaggatgctgtgttcctgaagaatgaggctcagcgcatggagtacttgttgaaccagaatggtctcatctacctgggtacagctgactgcatccaggcagagtcctgggactttggccagttcgagggggatgtcattgacctcagcctgcgcttgctgagcaaggacaagcaggtagagaagtggagccagccggtgcacgtggcccgtgtgttgggtgccttgctgcattttctcaaggagcagagggtcctgcccaccccgcagacccaggccacccaggaaggggccttgctgaacaagcgccggggcagcgtgcccatcctgcggcagtggctcaccggccgaggccgacctgtgtatgatggccaggcctgggtgttggctgctgttgcttgcacagtgctgcgatgcctgggaatccctgcccgcgtggtgaccacgtttgcctcagcacagggcaccggtgggcgtcttctcatagatgaatactataatgaggagggacttcagaacggagaaggccagagaggcagaatctggaagtgctgtgaggatgggacactggagttgactgactccaacacaaagtatgttggcaacaacatcagcaccaagggtgtgggcagtgaccgctgcgaggacatcactcagaactacaagtatcctgaagggtctcttcaggaaaaagaggtgctggagagagtcgagaaagagaaaatggaacgtgagaaagacaacggcatccgtcctcccagtctcgagactgccagtcctctgtacctgctcttgaaagcacccagctccctacccctgagaggggatgcccagatctcagtgacgctggttaatcacagtgagcaggagaaggcagtgcagctggcaattggggtccaggctgtacactacaacggtgtccttgctgccaagctctggaggaagaagctgcacctcacgctcagtgccaacctggaaaagataataaccatcggcctgttcttctccaattttgagcgaaacccacccgagaacaccttccttagactcaccgccatggcaacacactctgaatccaaccttagctgctttgctcaggaagacattgccatttgtagaccacaccttgccatcaagatgccagagaaagcagagcagtatcaacccctcacagcctcagtcagcctccagaactccctagatgcccccatggaggactgtgtgatctccatcctgggaagggggctcattcacagagagaggagctacagattccgttcagtgtggcctgaaaacaccatgtgtgccaagttccagttcacgccaacacatgtggggctccagagactcactgtggaagtggactgcaacatgttccagaacctaaccaactataaaagcgtcaccgtggtagcccctgaactatcagcttaaacttccagctctatcaccactctcctgccaacccttgttctacaatctaaaccaaacatgtgctagg

SEQ ID NO: 130628 - DNA, 4387 bp, Homo sapiens
  Payload ID: 5539
  Gene Symbol: EDRF1
  Gene Name: erythroid differentiation regulatory factor 1
  Uniprot ID: Q3B7T1
  ENST ID: ENST00000337623
  CDS Start-End: 106-3720
aagtgcggtccgcggagcgtctctggcgcttaccctgctttgggcctgcgttgctgctgctgctcctccgctcccccgtcgtatcgcctgccctggatcgaagtgatgggggatgccaaggaggccggagccgagggtccgccggccggggccgccgctcgaggagggctcagcctcctgtcccagggagaatccgaggaatcttctgcacagggatcagctttatttcttggaggcaatgaagtgaagagccgagctgtggtgaaatactcttctgcccctcctcgaacagcatttgcacgccttgaagagaaaacagacttgaaactcccacctgccaactggttacgagagagtgccaaactagggccagcaggaactaccattcttggcaacagcaagaaaagcaagccattttcaagctttggcatggcatatgactttattgattcagtgggaaatgatgtggatgttgtctctgactctgaaaacataaaaaaactcctgaaaattccctacagcaagtcgcacgtgagcatggcagtacaccgcataggaaggactctcttactagatgagctagatattcaagaactctttatgagatcgtctcagactggtgactggacatggttgaaagagttttatcaaagactcattgatcagaagtggcagaggaagaaaaagagcaaagagcactggtatcaaaaggcaattctttccaagtttttatattacagtatcaatggtgatggagccgctcagcctgtctcatccaccgcagaacagcaggaatcgtccagttcagatcagacaaatgattcggaaggggcttcatggcctgctcccttcgaaatgccttcttcagtttctgaagatcccagtgcttccagtcagggtcttaaaaatgattttgttcggaatattctatggacatttgaagatatccatatgttggtcggctccaacatgcccatatttggaggaggcagatacccagcagtcagcttacgtctcagggataacaacaaaccaattaatgtgctaactggaattgactattggttggacaacttgatatgcaatgtgccagagcttgtgatgtgttttcatgtaaatggaattgtacagaaatatgaaatgataaagacagaagaaattcccaatttggaaaattctaatttttctactaaagtcataaaagacattgcacagaatattttatcatttttgaaatctaattgtaccaaagaaggacatacctattggctctttaaagcaagtggcagcgatatagtgaagctctatgacctcactactctttgtgaagaaactgaagacaaataccaaaatccattcacaatgccggtagccattctcttgtacaaggttgcttgcaacatgatgatgaagaagaatcaaaataagaaacactatggaactattagaacattgcttcttaattgtctgaaattactggacaaaagtaggcatcctcaaattattgcttccgccaattacatgctttcagaactttttcaattggatgaacctaaaaaggaagaaaattcagaatctcctttaaatgagaattctgatgaaagttatagtgaagaggaggaagagatgcccgacagtgatgaaaatggatcctatagcaccagctctgatccatcagatgatagcaaagcagtagctataatcaagtctgttggagaactatcagtaccagaaaaatacaaatctattcatcaaatcagacccagttgtgcatttccagtttgccatgacacagaagagcgctgtagacttgtgcttagctatgttctagagggtttaaaatctgtcgatagcagcatcaaaaaagaaagcgaccttccagcagctgaccccagcactccaatcccgttaaaatatgaagatgaatcctcaagagggggtcccgaggggctagagaagcagatggccttgtttttggacaaaatgggctcccttcagaagggcaattattccagtcaatctggaatgatccctggctcttggcaacataaaatgaaacttcagctgattctcaagtcatcaaaggcctattatgttttgtccgatgctgccatgagtcttcagaaatacggaagagcattacgatacattaaattagctttgcaaagccatgatacttattgctgcctctgcaccaatatgctttccgaagtgctgttgtttctctctcaatatttgacactttgtggtgatatccaactaatgctggcccagaatgcaaataatagagcagcacaccttgaagagtttcattaccaaacaaaagaagaccaggagatcctgcatagccttcacagagagtccagttgccaaggatttgcatgggcaactgatttgtctacagacttagaaagtcaactctctgttagttgtaaatgttatgaggctgctaatgaaatcttgcagtttagtgacttgaaaagccaaaatccagaacactatgtacaagtattaaagagaatgggtaacattagaaatgaaattggtgtgttttacatgaatcaggctgctgcattacagagtgagagactagtgagcaaatctgtgtctgctgccgagcaacagttgtggaaaaaaagcttttcttgttttgaaaagggaattcacaactttgaatcaattgaggatgccaccaatgccgcccttttattatgtaacacgggaaggctcatgcggatttgtgcgcaggcccactgtggtgcaggggatgaactgaaacgtgaattttcaccagaagaaggcttgtattataataaggctattgattactatttgaaagcgctaaggtcattgggaacacgagacatacacccagctgtttgggattcagtgaactgggaattgtccactacttactttactatggcaactctacagcaagattatgctccgttatctagaaaagctcaggagcagattgagaaagaagtcagtgaggccatgatgaagtccctaaaatactgcgatgtggattcagtgtctgctcgacagcccctttgtcagtatcgagctgcaaccatccatcacaggctggcctccatgtaccacagctgtctgaggaatcaggttggtgatgaacaccttaggaaacaacaccgggtgctggcagatcttcattacagcaaggccgcaaagctgtttcagctgctgaaagatgctccctgcgaactgcttagagtacagctagagagagtagcatttgctgaatttcagatgaccagtcagaatagcaatgttggaaagttgaaaacactatctggggctcttgatataatggtgagaactgagcacgcattccagcttatccagaaggagcttatagaagaatttggccagcctaagagtggtgacgccgctgcagctgctgatgcttctcctagtctcaatcgagaagaagtgatgaaactcctcagtatatttgagtctcggttgtcatttcttctccttcagtccattaaactgctatcttcaactaaaaagaaaacaagcaataacatcgaagatgacacaattctcaaaaccaacaagcacatttactcccagcttttgagagcaactgcaaataaaaccgcgactcttctggaaagaatcaacgttatcgtccacctgctgggccagcttgccgccggcagtgcagcgagcagcaatgccgttcagtgactgcacagagccgtgtcccagacacgctgtcagtgccttcaacacggagccggtttgttcattcggtgctttgtttcattaaataatagggaaatatccatttaaaacaggtatatcagtggaaacacagagttattttaagtgacagacaaattacggttgagttctgtggcttcttcacttgaagtgctaacatcagaatcaaacttaaagcttccactatttatgtctttgagaagtatgtagtacctcggtattaacagacctgctgtgatgcagttacactttcacgtatttttgaagtatgtcaagctacacgggtctaagatatgattattttggataaaatgttactttggtcaagagaacttttatccagatgacattacaggttcaagtgggttaaggagacctcctgtacatctacagtgtttccttttaaattgtccagaaaaaaggtgtgttcttcataagcttcagtgcaggatttttcaaagacgagctgttgtgcaatttgctgtatttaatgcatgttctgaaaggattcacttttgactttatatgacagttgatcaagaacaggtactacccctttttttcatttcaaacttgaaactgtgaataaggtaagaaaactattttgaataaataaactatttatttaaaa

SEQ ID NO: 130629 - DNA, 4128 bp, Homo sapiens
  Payload ID: 5539
  Gene Symbol: EDRF1
  Gene Name: erythroid differentiation regulatory factor 1
  Uniprot ID: Q3B7T1
  ENST ID: ENST00000356792
  CDS Start-End: 233-3949
ggcgcactacaattcccgccctggccgcgaaggtggcacccgcagcgggaggcggggccgggccttcgggacaaagatcgcgagatttaatggcgagtcacagctacttcttcctggcagagaccggaagtgcggtccgcggagcgtctctggcgcttaccctgctttgggcctgcgttgctgctgctgctcctccgctcccccgtcgtatcgcctgccctggatcgaagtgatgggggatgccaaggaggccggagccgagggtccgccggccggggccgccgctcgaggagggctcagcctcctgtcccagggagaatccgaggaatcttctgcacagggatcagctttatttcttggaggcaatgaagtgaagagccgagctgtggtgaaatactcttctgcccctcctcgaacagcatttgcacgccttgaagagaaaacagacttgaaactcccacctgccaactggttacgagagagtgccaaactagggccagcaggaactaccattcttggcaacagcaagaaaagcaagccattttcaagctttggcatggcatatgactttattgattcagtgggaaatgatgtggatgttgtctctgactctgaaaacataaaaaaactcctgaaaattccctacagcaagtcgcacgtgagcatggcagtacaccgcataggaaggactctcttactagatgagctagatattcaagaactctttatgagatcgtctcagactggtgactggacatggttgaaagagttttatcaaagactcattgatcagaagtggcagaggaagaaaaagagcaaagagcactggtatcaaaaggcaattctttccaagtttttatattacagtatcaatggtgatggagccgctcagcctgtctcatccaccgcagaacagcaggaatcgtccagttcagatcagacaaatgattcggaaggggcttcatggcctgctcccttcgaaatgccttcttcagtttctgaagatcccagtgcttccagtcagggaagtgagcctcttgaaccctcatacatagtggggcatgtggcctcagcccccaaagaacaaaacctgattactttattcaatgacggggagcacagtcagggtcttaaaaatgattttgttcggaatattctatggacatttgaagatatccatatgttggtcggctccaacatgcccatatttggaggaggcagatacccagcagtcagcttacgtctcagggataacaacaaaccaattaatgtgctaactggaattgactattggttggacaacttgatatgcaatgtgccagagcttgtgatgtgttttcatgtaaatggaattgtacagaaatatgaaatgataaagacagaagaaattcccaatttggaaaattctaatttttctactaaagtcataaaagacattgcacagaatattttatcatttttgaaatctaattgtaccaaagaaggacatacctattggctctttaaagcaagtggcagcgatatagtgaagctctatgacctcactactctttgtgaagaaactgaagacaaataccaaaatccattcacaatgccggtagccattctcttgtacaaggttgcttgcaacatgatgatgaagaagaatcaaaataagaaacactatggaactattagaacattgcttcttaattgtctgaaattactggacaaaagtaggcatcctcaaattattgcttccgccaattacatgctttcagaactttttcaattggatgaacctaaaaaggaagaaaattcagaatctcctttaaatgagaattctgatgaaagttatagtgaagaggaggaagagatgcccgacagtgatgaaaatggatcctatagcaccagctctgatccatcagatgatagcaaagcagtagctataatcaagtctgttggagaactatcagtaccagaaaaatacaaatctattcatcaaatcagacccagttgtgcatttccagtttgccatgacacagaagagcgctgtagacttgtgcttagctatgttctagagggtttaaaatctgtcgatagcagcatcaaaaaagaaagcgaccttccagcagctgaccccagcactccaatcccgttaaaatatgaagatgaatcctcaagagggggtcccgaggggctagagaagcagatggccttgtttttggacaaaatgggctcccttcagaagggcaattattccagtcaatctggaatgatccctggctcttggcaacataaaatgaaacttcagctgattctcaagtcatcaaaggcctattatgttttgtccgatgctgccatgagtcttcagaaatacggaagagcattacgatacattaaattagctttgcaaagccatgatacttattgctgcctctgcaccaatatgctttccgaagtgctgttgtttctctctcaatatttgacactttgtggtgatatccaactaatgctggcccagaatgcaaataatagagcagcacaccttgaagagtttcattaccaaacaaaagaagaccaggagatcctgcatagccttcacagagagtccagttgccaaggatttgcatgggcaactgatttgtctacagacttagaaagtcaactctctgttagttgtaaatgttatgaggctgctaatgaaatcttgcagtttagtgacttgaaaagccaaaatccagaacactatgtacaagtattaaagagaatgggtaacattagaaatgaaattggtgtgttttacatgaatcaggctgctgcattacagagtgagagactagtgagcaaatctgtgtctgctgccgagcaacagttgtggaaaaaaagcttttcttgttttgaaaagggaattcacaactttgaatcaattgaggatgccaccaatgccgcccttttattatgtaacacgggaaggctcatgcggatttgtgcgcaggcccactgtggtgcaggggatgaactgaaacgtgaattttcaccagaagaaggcttgtattataataaggctattgattactatttgaaagcgctaaggtcattgggaacacgagacatacacccagctgtttgggattcagtgaactgggaattgtccactacttactttactatggcaactctacagcaagattatgctccgttatctagaaaagctcaggagcagattgagaaagaagtcagtgaggccatgatgaagtccctaaaatactgcgatgtggattcagtgtctgctcgacagcccctttgtcagtatcgagctgcaaccatccatcacaggctggcctccatgtaccacagctgtctgaggaatcaggttggtgatgaacaccttaggaaacaacaccgggtgctggcagatcttcattacagcaaggccgcaaagctgtttcagctgctgaaagatgctccctgcgaactgcttagagtacagctagagagagtagcatttgctgaatttcagatgaccagtcagaatagcaatgttggaaagttgaaaacactatctggggctcttgatataatggtgagaactgagcacgcattccagcttatccagaaggagcttatagaagaatttggccagcctaagagtggtgacgccgctgcagctgctgatgcttctcctagtctcaatcgagaagaagtgatgaaactcctcagtatatttgagtctcggttgtcatttcttctccttcagtccattaaactgctatcttcaactaaaaagaaaacaagcaataacatcgaagatgacacaattctcaaaaccaacaagcacatttactcccagcttttgagagcaactgcaaataaaaccgcgactcttctggaaagaatcaacgttatcgtccacctgctgggccagcttgccgccggcagtgcagcgagcagcaatgccgttcagtgactgcacagagccgtgtcccagacacgctgtcagtgccttcaacacggagccggtttgttcattcggtgctttgtttcattaaataatagggaaatatccatttaaaacaggtatatcagtggaaacacagagttattttaagtgacagacaaattacggttgagttctgtggcttcttc

SEQ ID NO: 130630 - DNA, 1095 bp, Homo sapiens
  Payload ID: 5539
  Gene Symbol: EDRF1
  Gene Name: erythroid differentiation regulatory factor 1
  ENST ID: ENST00000368813
  CDS Start-End: 1-954
tctattcatcaaatcagacccagttgtgcatttccagtttgccatgacacagaagagcgctgtagacttgtgcttagctatgttctagagggtttaaaatctgtcgatagcagcatcaaaaaagaaagcgaccttccagcagctgaccccagcactccaatcccgttaaaatatgaagatgaatcctcaagagggggtcccgaggggctagagaagcagatggccttgtttttggacaaaatgggctcccttcagaagggcaattattccagtcaatctggaatgatccctggctcttggcaacataaaatgaaacttcagctgattctcaagtcatcaaaggcctattatgttttgtccgatgctgccatgagtcttcagaaatacggaagagcattacgatacattaaattagctttgcaaagccatgatacttattgctgcctctgcaccaatatgctttccgaagtgctgttgtttctctctcaatatttgacactttgtggtgatatccaactaatgctggcccagaatgcaaataatagagcagcacaccttgaagagtttcattaccaaacaaaagaagaccaggagatcctgcatagccttcacagagagtccagttgccaaggtgtgccacaggcttggaccacgtggttcacagtgggactgtgcagtctagctcatgcttatttgagtattcagaaaaggggtagaaatattagagttttgatatttgctctgtatttatttatttattttttgagacggagtttcgctcttgttgcccaagctggagtgcaatggtgcaatcttggctcactgaaacctccgcctcccgggttcaagcaattctcctgcctcagcctcccaagtagctggaattacaggcatgcgccaccatgcccggctagcccaccttggcctcccaaggtgctgggattacaggtgtgagccaccacgcctggcctgctgttttattcatttcctaattttaagattaagcatgatcttgtgtatttgtataaaatggtttttaagtattttataattactgtttatataactagaactaaatataaagtaagatatgaa

SEQ ID NO: 130631 - DNA, 4123 bp, Homo sapiens
  Payload ID: 5539
  Gene Symbol: EDRF1
  Gene Name: erythroid differentiation regulatory factor 1
  Uniprot ID: Q3B7T1
  ENST ID: ENST00000368815
  CDS Start-End: 233-2014
ggcgcactacaattcccgccctggccgcgaaggtggcacccgcagcgggaggcggggccgggccttcgggacaaagatcgcgagatttaatggcgagtcacagctacttcttcctggcagagaccggaagtgcggtccgcggagcgtctctggcgcttaccctgctttgggcctgcgttgctgctgctgctcctccgctcccccgtcgtatcgcctgccctggatcgaagtgatgggggatgccaaggaggccggagccgagggtccgccggccggggccgccgctcgaggagggctcagcctcctgtcccagggagaatccgaggaatcttctgcacagggatcagctttatttcttggaggcaatgaagtgaagagccgagctgtggtgaaatactcttctgcccctcctcgaacagcatttgcacgccttgaagagaaaacagacttgaaactcccacctgccaactggttacgagagagtgccaaactagggccagcaggaactaccattcttggcaacagcaagaaaagcaagccattttcaagctttggcatggcatatgactttattgattcagtgggaaatgatgtggatgttgtctctgactctgaaaacataaaaaaactcctgaaaattccctacagcaagtcgcacgtgagcatggcagtacaccgcataggaaggactctcttactagatgagctagatattcaagaactctttatgagatcgtctcagactggtgactggacatggttgaaagagttttatcaaagactcattgatcagaagtggcagaggaagaaaaagagcaaagagcactggtatcaaaaggcaattctttccaagtttttatattacagtatcaatggtgatggagccgctcagcctgtctcatccaccgcagaacagcaggaatcgtccagttcagatcagacaaatgattcggaaggggcttcatggcctgctcccttcgaaatgccttcttcagtttctgaagatcccagtgcttccagtcagggaagtgagcctcttgaaccctcatacatagtggggcatgtggcctcagcccccaaagaacaaaacctgattactttattcaatgacggggagcacagtcagggtcttaaaaatgattttgttcggaatattctatggacatttgaagatatccatatgttggtcggctccaacatgcccatatttggaggaggcagatacccagcagtcagcttacgtctcagggataacaacaaaccaattaatgtgctaactggaattgactattggttggacaacttgatatgcaatgtgccagagcttgtgatgtgttttcatgtaaatggaattgtacagaaatatgaaatgataaagacagaagaaattcccaatttggaaaattctaatttttctactaaagtcataaaagacattgcacagaatattttatcatttttgaaatctaattgtaccaaagaaggacatacctattggctctttaaagcaagtggcagcgatatagtgaagctctatgacctcactactctttgtgaagaaactgaagacaaataccaaaatccattcacaatgccggtagccattctcttgtacaaggttgcttgcaacatgatgatgaagaagaatcaaaataagaaacactatggaactattagaacattgcttcttaattgtctgaaattactggacaaaagtaggcatcctcaaattattgcttccgccaattacatgctttcagaactttttcaattggatgaacctaaaaaggaagaaaattcagaatctcctttaaatgagaattctgatgaaagttatagtgaagaggaggaagagatgcccgacagtgatgaaaatggatcctatagcaccagctctgatccatcagatgatagcaaagcagtagctataatcaagtctgttggagaactatcagtaccagaaaaatacaaatctattcatcaaatcagattgtgcatttccagtttgccatgacacagaagagcgctgtagacttgtgcttagctatgttctagagggtttaaaatctgtcgatagcagcatcaaaaaagaaagcgaccttccagcagctgaccccagcactccaatcccgttaaaatatgaagatgaatcctcaagagggggtcccgaggggctagagaagcagatggccttgtttttggacaaaatgggctcccttcagaagggcaattattccagtcaatctggaatgatccctggctcttggcaacataaaatgaaacttcagctgattctcaagtcatcaaaggcctattatgttttgtccgatgctgccatgagtcttcagaaatacggaagagcattacgatacattaaattagctttgcaaagccatgatacttattgctgcctctgcaccaatatgctttccgaagtgctgttgtttctctctcaatatttgacactttgtggtgatatccaactaatgctggcccagaatgcaaataatagagcagcacaccttgaagagtttcattaccaaacaaaagaagaccaggagatcctgcatagccttcacagagagtccagttgccaaggatttgcatgggcaactgatttgtctacagacttagaaagtcaactctctgttagttgtaaatgttatgaggctgctaatgaaatcttgcagtttagtgacttgaaaagccaaaatccagaacactatgtacaagtattaaagagaatgggtaacattagaaatgaaattggtgtgttttacatgaatcaggctgctgcattacagagtgagagactagtgagcaaatctgtgtctgctgccgagcaacagttgtggaaaaaaagcttttcttgttttgaaaagggaattcacaactttgaatcaattgaggatgccaccaatgccgcccttttattatgtaacacgggaaggctcatgcggatttgtgcgcaggcccactgtggtgcaggggatgaactgaaacgtgaattttcaccagaagaaggcttgtattataataaggctattgattactatttgaaagcgctaaggtcattgggaacacgagacatacacccagctgtttgggattcagtgaactgggaattgtccactacttactttactatggcaactctacagcaagattatgctccgttatctagaaaagctcaggagcagattgagaaagaagtcagtgaggccatgatgaagtccctaaaatactgcgatgtggattcagtgtctgctcgacagcccctttgtcagtatcgagctgcaaccatccatcacaggctggcctccatgtaccacagctgtctgaggaatcaggttggtgatgaacaccttaggaaacaacaccgggtgctggcagatcttcattacagcaaggccgcaaagctgtttcagctgctgaaagatgctccctgcgaactgcttagagtacagctagagagagtagcatttgctgaatttcagatgaccagtcagaatagcaatgttggaaagttgaaaacactatctggggctcttgatataatggtgagaactgagcacgcattccagcttatccagaaggagcttatagaagaatttggccagcctaagagtggtgacgccgctgcagctgctgatgcttctcctagtctcaatcgagaagaagtgatgaaactcctcagtatatttgagtctcggttgtcatttcttctccttcagtccattaaactgctatcttcaactaaaaagaaaacaagcaataacatcgaagatgacacaattctcaaaaccaacaagcacatttactcccagcttttgagagcaactgcaaataaaaccgcgactcttctggaaagaatcaacgttatcgtccacctgctgggccagcttgccgccggcagtgcagcgagcagcaatgccgttcagtgactgcacagagccgtgtcccagacacgctgtcagtgccttcaacacggagccggtttgttcattcggtgctttgtttcattaaataatagggaaatatccatttaaaacaggtatatcagtggaaacacagagttattttaagtgacagacaaattacggttgagttctgtggcttcttc

SEQ ID NO: 130632 - DNA, 4243 bp, Homo sapiens
  Payload ID: 5539
  Gene Symbol: EDRF1
  Gene Name: erythroid differentiation regulatory factor 1
  Uniprot ID: Q3B7T1
  ENST ID: ENST00000419769
  CDS Start-End: 294-2684
gcggagcctaggagtcagataccgcgagaagtagtctcccgaagaggttcggacaagcgcaggcgcactacaattcccgccctggccgcgaaggtggcacccgcagcgggaggcggggccgggccttcgggacaaagatcgcgagatttaatggcgagtcacagctacttcttcctggcagagaccggaagtgcggtccgcggagcgtctctggcgcttaccctgctttgggcctgcgttgctgctgctgctcctccgctcccccgtcgtatcgcctgccctggatcgaagtgatgggggatgccaaggaggccggagccgagggtccgccggccggggccgccgctcgaggagggctcagcctcctgtcccagggagaatccgaggaatcttctgcacagggatcagctttatttcttggaggcaatgaagtgaagagccgagctgtggtgaaatactcttctgcccctcctcgaacagcatttgcacgccttgaagagaaaacagacttgaaactcccacctgccaactggttacgagagagtgccaaactagggccagcaggaactaccattcttggcaacagcaagaaaagcaagccattttcaagctttggcatggcatatgactttattgattcagtgggaaatgatgtggatgttgtctctgactctgaaaacataaaaaaactcctgaaaattccctacagcaagtcgcacgtgagcatggcagtacaccgcataggaaggactctcttactagatgagctagatattcaagaactctttatgagatcgtctcagactggtgactggacatggttgaaagagttttatcaaagactcattgatcagaagtggcagaggaagaaaaagagcaaagagcactggtatcaaaaggcaattctttccaagtttttatattacagtatcaatggtgatggagccgctcagcctgtctcatccaccgcagaacagcaggaatcgtccagttcagatcagacaaatgattcggaaggggcttcatggcctgctcccttcgaaatgccttcttcagtttctgaagatcccagtgcttccagtcagggaagtgagcctcttgaaccctcatacatagtggggcatgtggcctcagcccccaaagaacaaaacctgattactttattcaatgacggggagcacagtcagggtcttaaaaatgattttgttcggaatattctatggacatttgaagatatccatatgttggtcggctccaacatgcccatatttggaggaggcagatacccagcagtcagcttacgtctcagggataacaacaaaccaattaatgtgctaactggaattgactattggttggacaacttgatatgcaatgtgccagagcttgtgatgtgttttcatgtaaatggaattgtacagaaatatgaaatgataaagacagaagaaattcccaatttggaaaattctaatttttctactaaagtcataaaagacattgcacagaatattttatcatttttgaaatctaattgtaccaaagaaggacatacctattggctctttaaagcaagtggcagcgatatagtgaagctctatgacctcactactctttgtgaagaaactgaagacaaataccaaaatccattcacaatgccggtagccattctcttgtacaaggttgcttgcaacatgatgatgaagaagaatcaaaataagaaacactatggaactattagaacattgcttcttaattgtctgaaattactggacaaaagtaggcatcctcaaattattgcttccgccaattacatgctttcagaactttttcaattggatgaacctaaaaaggaagaaaattcagaatctcctttaaatgagaattctgatgaaagttatagtgaagaggaggaagagatgcccgacagtgatgaaaatggatcctatagcaccagctctgatccatcagatgatagcaaagcagtagctataatcaagtctgttggagaactatcagtaccagaaaaatacaaatctattcatcaaatcagacccagttgtgcatttccagtttgccatgacacagaagagcgctgtagacttgtgcttagctatgttctagagggtttaaaatctgtcgatagcagcatcaaaaaagaaagcgaccttccagcagctgaccccagcactccaatcccgttaaaatatgaagatgaatcctcaagagggggtcccgaggggctagagaagcagatggccttgtttttggacaaaatgggctcccttcagaagggcaattattccagtcaatctggaatgatccctggctcttggcaacataaaatgaaacttcagctgattctcaagtcatcaaaggcctattatgttttgtccgatgctgccatgagtcttcagaaatacggaagagcattacgatacattaaattagctttgcaaagccatgatacttattgctgcctctgcaccaatatgctttccgaagtgctgttgtttctctctcaatatttgacactttgtggtgatatccaactaatgctggcccagaatgcaaataatagagcagcacaccttgaagagtttcattaccaaacaaaagaagaccaggagatcctgcatagccttcacagagagtccagttgccaaggctttaaaactgggaagtagaataatctgatccgcagcagcgatatccctccctcttacctcagcacagtgtgtaaccacgctgccattaacacagtgaatgaagtaaaagatgagtcttctgaaggatttgcatgggcaactgatttgtctacagacttagaaagtcaactctctgttagttgtaaatgttatgaggctgctaatgaaatcttgcagtttagtgacttgaaaagccaaaatccagaacactatgtacaagtattaaagagaatgggtaacattagaaatgaaattggtgtgttttacatgaatcaggctgctgcattacagagtgagagactagtgagcaaatctgtgtctgctgccgagcaacagttgtggaaaaaaagcttttcttgttttgaaaagggaattcacaactttgaatcaattgaggatgccaccaatgccgcccttttattatgtaacacgggaaggctcatgcggatttgtgcgcaggcccactgtggtgcaggggatgaactgaaacgtgaattttcaccagaagaaggcttgtattataataaggctattgattactatttgaaagcgctaaggtcattgggaacacgagacatacacccagctgtttgggattcagtgaactgggaattgtccactacttactttactatggcaactctacagcaagattatgctccgttatctagaaaagctcaggagcagattgagaaagaagtcagtgaggccatgatgaagtccctaaaatactgcgatgtggattcagtgtctgctcgacagcccctttgtcagtatcgagctgcaaccatccatcacaggctggcctccatgtaccacagctgtctgaggaatcaggttggtgatgaacaccttaggaaacaacaccgggtgctggcagatcttcattacagcaaggccgcaaagctgtttcagctgctgaaagatgctccctgcgaactgcttagagtacagctagagagagtagcatttgctgaatttcagatgaccagtcagaatagcaatgttggaaagttgaaaacactatctggggctcttgatataatggtgagaactgagcacgcattccagcttatccagaaggagcttatagaagaatttggccagcctaagagtggtgacgccgctgcagctgctgatgcttctcctagtctcaatcgagaagaagtgatgaaactcctcagtatatttgagtctcggttgtcatttcttctccttcagtccattaaactgctatcttcaactaaaaagaaaacaagcaataacatcgaagatgacacaattctcaaaaccaacaagcacatttactcccagcttttgagagcaactgcaaataaaaccgcgactcttctggaaagaatcaacgttatcgtccacctgctgggccagcttgccgccggcagtgcagcgagcagcaatgccgttcagtgactgcacagagccgtgtcccagacacgctgtcagtgccttcaacacggagccggtttgttcattcggtgctttgtttcattaaataatagggaaatatccatttaaaa

SEQ ID NO: 130633 - DNA, 4181 bp, Homo sapiens
  Payload ID: 5539
  Gene Symbol: EDRF1
  Gene Name: erythroid differentiation regulatory factor 1
  ENST ID: ENST00000481600
  CDS Start-End: 294-1325
gcggagcctaggagtcagataccgcgagaagtagtctcccgaagaggttcggacaagcgcaggcgcactacaattcccgccctggccgcgaaggtggcacccgcagcgggaggcggggccgggccttcgggacaaagatcgcgagatttaatggcgagtcacagctacttcttcctggcagagaccggaagtgcggtccgcggagcgtctctggcgcttaccctgctttgggcctgcgttgctgctgctgctcctccgctcccccgtcgtatcgcctgccctggatcgaagtgatgggggatgccaaggaggccggagccgagggtccgccggccggggccgccgctcgaggagggctcagcctcctgtcccagggagaatccgaggaatcttctgcacagggatcagctttatttcttggaggcaatgaagtgaagagccgagctgtggtgaaatactcttctgcccctcctcgaacagcatttgcacgccttgaagagaaaacagacttgaaactcccacctgccaactggttacgagagagtgccaaactagggccagcaggaactaccattcttggcaacagcaagaaaagcaagccattttcaagctttggcatggcatatgactttattgattcagtgggaaatgatgtggatgttgtctctgactctgaaaacataaaaaaactcctgaaaattccctacagcaagtcgcacgtgagcatggcagtacaccgcataggaaggactctcttactagatgagctagatattcaagaactctttatgagatcgtctcagactggtgactggacatggttgaaagagttttatcaaagactcattgatcagaagtggcagaggaagaaaaagagcaaagagcactggtatcaaaaggcaattctttccaagtttttatattacagtatcaatggtgatggagccgctcagcctgtctcatccaccgcagaacagcaggaatcgtccagttcagatcagacaaatgattcggaaggggcttcatggcctgctcccttcgaaatgccttcttcagtttctgaagatcccagtgcttccagtcagggaagtgagcctcttgaaccctcatacatagtggggcatgtggcctcagcccccaaagaacaaaacctgattactttattcaatgacggggagcacagtcagggtcttaaaaatgattttgttcggaatattctatggacatttgaagatatccatatgttggtcggctccaacatgcccatatttggaggaggcagatacccagcagtcagcttacgtctcagaaatgtatatttttagggataacaacaaaccaattaatgtgctaactggaattgactattggttggacaacttgatatgcaatgtgccagagcttgtgatgtgttttcatgtaaatggaattgtacagaaatatgaaatgataaagacagaagaaattcccaatttggaaaattctaatttttctactaaagtcataaaagacattgcacagaatattttatcatttttgaaatctaattgtaccaaagaaggacatacctattggctctttaaagcaagtggcagcgatatagtgaagctctatgacctcactactctttgtgaagaaactgaagacaaataccaaaatccattcacaatgccggtagccattctcttgtacaaggttgcttgcaacatgatgatgaagaagaatcaaaataagaaacactatggaactattagaacattgcttcttaattgtctgaaattactggacaaaagtaggcatcctcaaattattgcttccgccaattacatgctttcagaactttttcaattggatgaacctaaaaaggaagaaaattcagaatctcctttaaatgagaattctgatgaaagttatagtgaagaggaggaagagatgcccgacagtgatgaaaatggatcctatagcaccagctctgatccatcagatgatagcaaagcagtagctataatcaagtctgttggagaactatcagtaccagaaaaatacaaatctattcatcaaatcagacccagttgtgcatttccagtttgccatgacacagaagagcgctgtagacttgtgcttagctatgttctagagggtttaaaatctgtcgatagcagcatcaaaaaagaaagcgaccttccagcagctgaccccagcactccaatcccgttaaaatatgaagatgaatcctcaagagggggtcccgaggggctagagaagcagatggccttgtttttggacaaaatgggctcccttcagaagggcaattattccagtcaatctggaatgatccctggctcttggcaacataaaatgaaacttcagctgattctcaagtcatcaaaggcctattatgttttgtccgatgctgccatgagtcttcagaaatacggaagagcattacgatacattaaattagctttgcaaagccatgatacttattgctgcctctgcaccaatatgctttccgaagtgctgttgtttctctctcaatatttgacactttgtggtgatatccaactaatgctggcccagaatgcaaataatagagcagcacaccttgaagagtttcattaccaaacaaaagaagaccaggagatcctgcatagccttcacagagagtccagttgccaaggatttgcatgggcaactgatttgtctacagacttagaaagtcaactctctgttagttgtaaatgttatgaggctgctaatgaaatcttgcagtttagtgacttgaaaagccaaaatccagaacactatgtacaagtattaaagagaatgggtaacattagaaatgaaattggtgtgttttacatgaatcaggctgctgcattacagagtgagagactagtgagcaaatctgtgtctgctgccgagcaacagttgtggaaaaaaagcttttcttgttttgaaaagggaattcacaactttgaatcaattgaggatgccaccaatgccgcccttttattatgtaacacgggaaggctcatgcggatttgtgcgcaggcccactgtggtgcaggggatgaactgaaacgtgaattttcaccagaagaaggcttgtattataataaggctattgattactatttgaaagcgctaaggtcattgggaacacgagacatacacccagctgtttgggattcagtgaactgggaattgtccactacttactttactatggcaactctacagcaagattatgctccgttatctagaaaagctcaggagcagattgagaaagaagtcagtgaggccatgatgaagtccctaaaatactgcgatgtggattcagtgtctgctcgacagcccctttgtcagtatcgagctgcaaccatccatcacaggctggcctccatgtaccacagctgtctgaggaatcaggttggtgatgaacaccttaggaaacaacaccgggtgctggcagatcttcattacagcaaggccgcaaagctgtttcagctgctgaaagatgctccctgcgaactgcttagagtacagctagagagagtagcatttgctgaatttcagatgaccagtcagaatagcaatgttggaaagttgaaaacactatctggggctcttgatataatggtgagaactgagcacgcattccagcttatccagaaggagcttatagaagaatttggccagcctaagagtggtgacgccgctgcagctgctgatgcttctcctagtctcaatcgagaagaagtgatgaaactcctcagtatatttgagtctcggttgtcatttcttctccttcagtccattaaactgctatcttcaactaaaaagaaaacaagcaataacatcgaagatgacacaattctcaaaaccaacaagcacatttactcccagcttttgagagcaactgcaaataaaaccgcgactcttctggaaagaatcaacgttatcgtccacctgctgggccagcttgccgccggcagtgcagcgagcagcaatgccgttcagtgactgcacagagccgtgtcccagacacgctgtcagtgccttcaacacggagccgttgatcaagaacaggtactacccctttttttcatttcaaacttgaaactgtgaataaggtaagaaaactattttgaataaataaactatttatttaaaatgtc

SEQ ID NO: 130634 - DNA, 436 bp, Homo sapiens
  Payload ID: 5539
  Gene Symbol: EDRF1
  Gene Name: erythroid differentiation regulatory factor 1
  ENST ID: ENST00000525358
  CDS Start-End: 1-71
agtctcggttgtcatttcttctccttcagtccattaaactgctatcttcaactaaaaagaaaacaaggtgatgcaggcatttcatcatcatatgacaactgcattggcattgacctgctagaaattctagcagtagcagtttgttaggccaaagcaataacatcgaagatgacacaattctcaaaaccaacaagcacatttactcccagcttttgagagcaactgcaaataaaaccgcgactcttctggaaagaatcaacgttatcgtccacctgctgggccagcttgccgccggcagtgcagcgagcagcaatgccgttcagtgactgcacagagccgtgtcccagacacgctgtcagtgccttcaacacggagccggtttgttcattcggtgctttgtttcattaaataatagggaaatatccatttaaaacag

SEQ ID NO: 130635 - DNA, 945 bp, Homo sapiens
  Payload ID: 5539
  Gene Symbol: EDRF1
  Gene Name: erythroid differentiation regulatory factor 1
  ENST ID: ENST00000530795
  CDS Start-End: 1-454
ggaaggggcttcatggcctgctcccttcgaaatgccttcttcagtttctgaagatcccagtgcttccagtcagggaagtgagcctcttgaaccctcatacatagtggggcatgtggcctcagcccccaaagaacaaaacctgattactttattcaatgacggggagcacagtcagggtcttaaaaatgattttgttcggaatattctatggacatttgaagatatccatatgttggtcggctccaacatgcccatatttggaggaggcagatacccagcagtcagcttacgtctcagggataacaacaaaccaattaatgtgctaactggaattgactattggttggacaacttgatatgcaatgtgccagagcttgtgatgtgttttcatgtaaatggaattgtacagctacctcacatgctgttattcctatttgatggaaagagagactgaggatcaaggagctcaaaaatatgaaatgataaagacagaagaaattcccaatttggaaaattctaatttttctactaaagtcataaaagacattgcacagaatattttatcatttttgaaatctaattgtaccaaagaaggacatacctattggctctttaaagcaagtggcagcgatatagtgaagctctatgacctcactactctttgtgaagaaactgaagacaaataccaaaatccattcacaatgccggtagccattctcttgtacaaggttgcttgcaacatgatgatgaagaagaatcaaaataagaaacactatggaactattagaacattgcttcttaattgtctgaaattactggacaaaagtaggcatcctcaaattattgcttccgccaattacatgctttcagaactttttcaattggatgaacctaaaaaggaagaaaattcagaatctcctttaaatgagaattctgatgaaagtt

SEQ ID NO: 130636 - DNA, 1330 bp, Homo sapiens
  Payload ID: 5540
  Gene Symbol: EPO
  Gene Name: erythropoietin
  Uniprot ID: P01588
  ENST ID: ENST00000252723
  CDS Start-End: 182-763
cccggagccggaccggggccaccgcgcccgctctgctccgacaccgcgccccctggacagccgccctctcctccaggcccgtggggctggccctgcaccgccgagcttcccgggatgagggcccccggtgtggtcacccggcgcgccccaggtcgctgagggaccccggccaggcgcggagatgggggtgcacgaatgtcctgcctggctgtggcttctcctgtccctgctgtcgctccctctgggcctcccagtcctgggcgccccaccacgcctcatctgtgacagccgagtcctggagaggtacctcttggaggccaaggaggccgagaatatcacgacgggctgtgctgaacactgcagcttgaatgagaatatcactgtcccagacaccaaagttaatttctatgcctggaagaggatggaggtcgggcagcaggccgtagaagtctggcagggcctggccctgctgtcggaagctgtcctgcggggccaggccctgttggtcaactcttcccagccgtgggagcccctgcagctgcatgtggataaagccgtcagtggccttcgcagcctcaccactctgcttcgggctctgggagcccagaaggaagccatctcccctccagatgcggcctcagctgctccactccgaacaatcactgctgacactttccgcaaactcttccgagtctactccaatttcctccggggaaagctgaagctgtacacaggggaggcctgcaggacaggggacagatgaccaggtgtgtccacctgggcatatccaccacctccctcaccaacattgcttgtgccacaccctcccccgccactcctgaaccccgtcgaggggctctcagctcagcgccagcctgtcccatggacactccagtgccagcaatgacatctcaggggccagaggaactgtccagagagcaactctgagatctaaggatgtcacagggccaacttgagggcccagagcaggaagcattcagagagcagctttaaactcagggacagagccatgctgggaagacgcctgagctcactcggcaccctgcaaaatttgatgccaggacacgctttggaggcgatttacctgttttcgcacctaccatcagggacaggatgacctggataacttaggtggcaagctgtgacttctccaggtctcacgggcatgggcactcccttggtggcaagagcccccttgacaccggggtggtgggaaccatgaagacaggatgggggctggcctctggctctcatggggtccaagttttgtgtattcttcaacctcattgacaagaactgaaaccaccaa

SEQ ID NO: 130637 - DNA, 2411 bp, Homo sapiens
  Payload ID: 5541
  Gene Symbol: EPOR
  Gene Name: erythropoietin receptor
  Uniprot ID: P19235
  ENST ID: ENST00000222139
  CDS Start-End: 106-1632
tcagctgcgtccggcggaggcagctgctgacccagctgtggactgtgccgggggcgggggacggaggggcaggagccctgggctccccgtggcgggggctgtatcatggaccacctcggggcgtccctctggccccaggtcggctccctttgtctcctgctcgctggggccgcctgggcgcccccgcctaacctcccggaccccaagttcgagagcaaagcggccttgctggcggcccgggggcccgaagagcttctgtgcttcaccgagcggttggaggacttggtgtgtttctgggaggaagcggcgagcgctggggtgggcccgggcaactacagcttctcctaccagctcgaggatgagccatggaagctgtgtcgcctgcaccaggctcccacggctcgtggtgcggtgcgcttctggtgttcgctgcctacagccgacacgtcgagcttcgtgcccctagagttgcgcgtcacagcagcctccggcgctccgcgatatcaccgtgtcatccacatcaatgaagtagtgctcctagacgcccccgtggggctggtggcgcggttggctgacgagagcggccacgtagtgttgcgctggctcccgccgcctgagacacccatgacgtctcacatccgctacgaggtggacgtctcggccggcaacggcgcagggagcgtacagagggtggagatcctggagggccgcaccgagtgtgtgctgagcaacctgcggggccggacgcgctacaccttcgccgtccgcgcgcgtatggctgagccgagcttcggcggcttctggagcgcctggtcggagcctgtgtcgctgctgacgcctagcgacctggaccccctcatcctgacgctctccctcatcctcgtggtcatcctggtgctgctgaccgtgctcgcgctgctctcccaccgccgggctctgaagcagaagatctggcctggcatcccgagcccagagagcgagtttgaaggcctcttcaccacccacaagggtaacttccagctgtggctgtaccagaatgatggctgcctgtggtggagcccctgcacccccttcacggaggacccacctgcttccctggaagtcctctcagagcgctgctgggggacgatgcaggcagtggagccggggacagatgatgagggccccctgctggagccagtgggcagtgagcatgcccaggatacctatctggtgctggacaaatggttgctgccccggaacccgcccagtgaggacctcccagggcctggtggcagtgtggacatagtggccatggatgaaggctcagaagcatcctcctgctcatctgctttggcctcgaagcccagcccagagggagcctctgctgccagctttgagtacactatcctggaccccagctcccagctcttgcgtccatggacactgtgccctgagctgccccctaccccaccccacctaaagtacctgtaccttgtggtatctgactctggcatctcaactgactacagctcaggggactcccagggagcccaagggggcttatccgatggcccctactccaacccttatgagaacagccttatcccagccgctgagcctctgccccccagctatgtggcttgctcttaggacaccaggctgcagatgatcagggatccaatatgactcagagaaccagtgcagactcaagacttatggaacagggatggcgaggcctctctcaggagcaggggcattgctgattttgtctgcccaatccatcctgctcaggaaaccacaaccttgcagtatttttaaatatgtatagtttttttttgtatctatatatatatatacacatatgtatgtaagtttttctaccatgatttctacaaacaccctttaagtcccatcttcccctgggcataggccatagggatagaagttaaagttcttgagcttattcagaagctggatctgcaatctgaatgctactcataacataacaaaatagtatgttaaacagctcttaaatcttactggcttaccacattaaatgatttctctctcctaactcagctcaaatgggcagccatccatgggatgagtcagaggttcagactcttccagtctgtagctctaccttctcttagggtacttagatggatcccctgttctacaaactgccagtcagcaagggaagaaaaagggcagcaatgaccctcaatgggccatttgagggatctggcctggaaatgggcttcctctcttcttctcacacctcactggctggaaacagtcacatgaccccagtcacatgaaaggccaggaaacttagtttagctgtacacccaggaagggcaaagctgtttaagggccactagctagtctctgccactaataataataaaagtaattctgaatcaggc

SEQ ID NO: 130638 - DNA, 1825 bp, Homo sapiens
  Payload ID: 5541
  Gene Symbol: EPOR
  Gene Name: erythropoietin receptor
  ENST ID: ENST00000588859
  CDS Start-End: 78-437
gacccagctgtggactgtgccgggggcgggggacggaggggcaggagccctgggctccccgtggcgggggctgtatcatggaccacctcggggcgtccctctggccccaggtcggctccctttgtctcctgctcgctggggccgcctgggcgcccccgcctaacctcccggaccccaagttcgagagcaaagcggccttgctggcggcccgggggcccgaagagcttctgtgcttcaccgagcggttggaggacttggtgtgtttctgggaggaagcggcgagcgctggggtgggcccgggcaactacagcttctcctaccagctcgaggctggcacgccctctatgggccggggcgcgaacactcccgcgatcaccgctggaacgcgaccccaaacatcaggctgggataacaacgcctccaaatcgaggggatgagccatggaagctgtgtcgcctgcaccaggctcccacggctcgtggtgcggtgcgcttctggtgttcgctgcctacagccgacacgtcgagcttcgtgcccctagagttgcgcgtcacagcagcctccggcgctccgcgatatcaccgtgtcatccacatcaatgaagtagtgctcctagacgcccccgtggggctggtggcgcggttggctgacgagagcggccacgtagtgttgcgctggctcccgccgcctgagacacccatgacgtctcacatccgctacgaggtggacgtctcggccggcaacggcgcagggagcgtacagagggtggagatcctggagggccgcaccgagtgtgtgctgagcaacctgcggggccggacgcgctacaccttcgccgtccgcgcgcgtatggctgagccgagcttcggcggcttctggagcgcctggtcggagcctgtgtcgctgctgacgcctagcgacctggaccccctcatcctgacgctctccctcatcctcgtggtcatcctggtgctgctgaccgtgctcgcgctgctctcccaccgccgggctctgaagcagaagatctggcctggcatcccgagcccagagagcgagtttgaaggcctcttcaccacccacaagggtaacttccagctgtggctgtaccagaatgatggctgcctgtggtggagcccctgcacccccttcacggaggacccacctgcttccctggaagtcctctcagagcgctgctgggggacgatgcaggcagtggagccggggacagatgatgagggccccctgctggagccagtgggcagtgagcatgcccaggatacctatctggtgctggacaaatggttgctgccccggaacccgcccagtgaggacctcccagggcctggtggcagtgtggacatagtggccatggatgaaggctcagaagcatcctcctgctcatctgctttggcctcgaagcccagcccagagggagcctctgctgccagctttgagtacactatcctggaccccagctcccagctcttgcgtccatggacactgtgccctgagctgccccctaccccaccccacctaaagtacctgtaccttgtggtatctgactctggcatctcaactgactacagctcaggggactcccagggagcccaagggggcttatccgatggcccctactccaacccttatgagaacagccttatcccagccgctgagcctctgccccccagctatgtggcttgctcttaggacaccaggctgcagatgatcagggatccaatatgactcagagaaccagtgcagactcaagacttatggaacagggatggcgaggcctctctcaggagcaggggcattgctgattttg

SEQ ID NO: 130639 - DNA, 1850 bp, Homo sapiens
  Payload ID: 5541
  Gene Symbol: EPOR
  Gene Name: erythropoietin receptor
  ENST ID: ENST00000586890
  CDS Start-End: 78-470
gacccagctgtggactgtgccgggggcgggggacggaggggcaggagccctgggctccccgtggcgggggctgtatcatggaccacctcggggcgtccctctggccccaggtcggctccctttgtctcctgctcgctggggccgcctgggcgcccccgcctaacctcccggaccccaagttcgagagcaaagcggccttgctggcggcccgggggcccgaagagcttctgtgcttcaccgagcggttggaggacttggtgtgtttctgggaggaagcggcgagcgctggggtgggcccgggcaactacagcttctcctaccagctcgatcgtggtcactggagggaaacctgcgggtccagggctggcacgccctctatgggccggggcgcgaacactcccgcgatcaccgctggaacgcgaccccaaacatcaggctgggataacaacgcctccaaatcgaggggatgagccatggaagctgtgtcgcctgcaccaggctcccacggctcgtggtgcggtgcgcttctggtgttcgctgcctacagccgacacgtcgagcttcgtgcccctagagttgcgcgtcacagcagcctccggcgctccgcgatatcaccgtgtcatccacatcaatgaagtagtgctcctagacgcccccgtggggctggtggcgcggttggctgacgagagcggccacgtagtgttgcgctggctcccgccgcctgagacacccatgacgtctcacatccgctacgaggtggacgtctcggccggcaacggcgcagggagcgtacagagggtggagatcctggagggccgcaccgagtgtgtgctgagcaacctgcggggccggacgcgctacaccttcgccgtccgcgcgcgtatggctgagccgagcttcggcggcttctggagcgcctggtcggagcctgtgtcgctgctgacgcctagcgacctggaccccctcatcctgacgctctccctcatcctcgtggtcatcctggtgctgctgaccgtgctcgcgctgctctcccaccgccgggctctgaagcagaagatctggcctggcatcccgagcccagagagcgagtttgaaggcctcttcaccacccacaagggtaacttccagctgtggctgtaccagaatgatggctgcctgtggtggagcccctgcacccccttcacggaggacccacctgcttccctggaagtcctctcagagcgctgctgggggacgatgcaggcagtggagccggggacagatgatgagggccccctgctggagccagtgggcagtgagcatgcccaggatacctatctggtgctggacaaatggttgctgccccggaacccgcccagtgaggacctcccagggcctggtggcagtgtggacatagtggccatggatgaaggctcagaagcatcctcctgctcatctgctttggcctcgaagcccagcccagagggagcctctgctgccagctttgagtacactatcctggaccccagctcccagctcttgcgtccatggacactgtgccctgagctgccccctaccccaccccacctaaagtacctgtaccttgtggtatctgactctggcatctcaactgactacagctcaggggactcccagggagcccaagggggcttatccgatggcccctactccaacccttatgagaacagccttatcccagccgctgagcctctgccccccagctatgtggcttgctcttaggacaccaggctgcagatgatcagggatccaatatgactcagagaaccagtgcagactcaagacttatggaacagggatggcgaggcctctctcaggagcaggggcattgc

SEQ ID NO: 130640 - DNA, 2086 bp, Homo sapiens
  Payload ID: 5541
  Gene Symbol: EPOR
  Gene Name: erythropoietin receptor
  Uniprot ID: P19235
  ENST ID: ENST00000592375
  CDS Start-End: 106-1092
tcagctgcgtccggcggaggcagctgctgacccagctgtggactgtgccgggggcgggggacggaggggcaggagccctgggctccccgtggcgggggctgtatcatggaccacctcggggcgtccctctggccccaggtcggctccctttgtctcctgctcgctggggccgcctgggcgcccccgcctaacctcccggaccccaagttcgagagcaaagcggccttgctggcggcccgggggcccgaagagcttctgtgcttcaccgagcggttggaggacttggtgtgtttctgggaggaagcggcgagcgctggggtgggcccgggcaactacagcttctcctaccagctcgaggatgagccatggaagctgtgtcgcctgcaccaggctcccacggctcgtggtgcggtgcgcttctggtgttcgctgcctacagccgacacgtcgagcttcgtgcccctagagttgcgcgtcacagcagcctccggcgctccgcgatatcaccgtgtcatccacatcaatgaagtagtgctcctagacgcccccgtggggctggtggcgcggttggctgacgagagcggccacgtagtgttgcgctggctcccgccgcctgagacacccatgacgtctcacatccgctacgaggtggacgtctcggccggcaacggcgcagggagcgtacagagggtggagatcctggagggccgcaccgagtgtgtgctgagcaacctgcggggccggacgcgctacaccttcgccgtccgcgcgcgtatggctgagccgagcttcggcggcttctggagcgcctggtcggagcctgtgtcgctgctgacgcctagcgacctggaccccctcatcctgacgctctccctcatcctcgtggtcatcctggtgctgctgaccgtgctcgcgctgctctcccaccgccgggctctgaagcagaagatctggcctggcatcccgagcccagagagcgagtttgaaggcctcttcaccacccacaagggtaacttccaggtaggtggcctggttgtcccctcagtgcctgggcttccctgcttcttgcagccaaactgcaggcctctctgagcaggttggtgctatttcttcagctgtggctgtaccagaatgatggctgcctgtggtggagcccctgcacccccttcacggaggacccacctgcttccctggaagtcctctcagagcgctgctgggggacgatgcaggcagtggagccggggacagatgatgagggccccctgctggagccagtgggcagtgagcatgcccaggatacctatctggtgctggacaaatggttgctgccccggaacccgcccagtgaggacctcccagggcctggtggcagtgtggacatagtggccatggatgaaggctcagaagcatcctcctgctcatctgctttggcctcgaagcccagcccagagggagcctctgctgccagctttgagtacactatcctggaccccagctcccagctcttgcgtccatggacactgtgccctgagctgccccctaccccaccccacctaaagtacctgtaccttgtggtatctgactctggcatctcaactgactacagctcaggggactcccagggagcccaagggggcttatccgatggcccctactccaacccttatgagaacagccttatcccagccgctgagcctctgccccccagctatgtggcttgctcttaggacaccaggctgcagatgatcagggatccaatatgactcagagaaccagtgcagactcaagacttatggaacagggatggcgaggcctctctcaggagcaggggcattgctgattttgtctgcccaatccatcctgctcaggaaaccacaaccttgcagtatttttaaatatgtatagtttttttttgtatctatatatatatatacacatatgtatgtaagtttttctaccatgatttctacaaacaccctttaagtcccatcttcccctgggcataggccatagggatagaagttaaagttcttgagcttattcagaagctggatctgcaatctgaatgctactcataacataacaa

SEQ ID NO: 130641 - DNA, 1931 bp, Homo sapiens
  Payload ID: 5541
  Gene Symbol: EPOR
  Gene Name: erythropoietin receptor
  ENST ID: ENST00000591958
  CDS Start-End: 78-908
gacccagctgtggactgtgccgggggcgggggacggaggggcaggagccctgggctccccgtggcgggggctgtatcatggaccacctcggggcgtccctctggccccaggtcggctccctttgtctcctgctcgctggggccgcctgggcgcccccgcctaacctcccggaccccaagttcgagagcaaaggctggggcggggctggcagtcccgagctcgaggtcttgaacgccgcgcccagctcagctggccgctgggtgggcaggtgtgcgccagtggtgacggcgggggacacggccttgctggcggcccgggggcccgaagagcttctgtgcttcaccgagcggttggaggacttggtgtgtttctgggaggaagcggcgagcgctggggtgggcccgggcaactacagcttctcctaccagctcgaggatgagccatggaagctgtgtcgcctgcaccaggctcccacggctcgtggtgcggtgcgcttctggtgttcgctgcctacagccgacacgtcgagcttcgtgcccctagagttgcgcgtcacagcagcctccggcgctccgcgatatcaccgtgtcatccacatcaatgaagtagtgctcctagacgcccccgtggggctggtggcgcggttggctgacgagagcggccacgtagtgttgcgctggctcccgccgcctgagacacccatgacgtctcacatccgctacgaggtggacgtctcggccggcaacggcgcagggagcgtacagaggggcaccgttttcctttcccctgattggctcagttccaccagggcccgcccccacgtcatctatttttgtctgctacgcgtccctcgccctgattccgcccccaggtggagatcctggagggccgcaccgagtgtgtgctgagcaacctgcggggccggacgcgctacaccttcgccgtccgcgcgcgtatggctgagccgagcttcggcggcttctggagcgcctggtcggagcctgtgtcgctgctgacgcctagcgacctggaccccctcatcctgacgctctccctcatcctcgtggtcatcctggtgctgctgaccgtgctcgcgctgctctcccaccgccgggctctgaagcagaagatctggcctggcatcccgagcccagagagcgagtttgaaggcctcttcaccacccacaagggtaacttccagctgtggctgtaccagaatgatggctgcctgtggtggagcccctgcacccccttcacggaggacccacctgcttccctggaagtcctctcagagcgctgctgggggacgatgcaggcagtggagccggggacagatgatgagggccccctgctggagccagtgggcagtgagcatgcccaggatacctatctggtgctggacaaatggttgctgccccggaacccgcccagtgaggacctcccagggcctggtggcagtgtggacatagtggccatggatgaaggctcagaagcatcctcctgctcatctgctttggcctcgaagcccagcccagagggagcctctgctgccagctttgagtacactatcctggaccccagctcccagctcttgcgtccatggacactgtgccctgagctgccccctaccccaccccacctaaagtacctgtaccttgtggtatctgactctggcatctcaactgactacagctcaggggactcccagggagcccaagggggcttatccgatggcccctactccaacccttatgagaacagccttatcccagccgctgagcctctgccccccagctatgtggcttgctcttaggacaccaggctgcagatgatcagggatccaatatgactcagagaaccagtgcagactcaagacttatggaacagggatggcgaggcctctctcaggagcaggggcattgctgattttg

SEQ ID NO: 130642 - DNA, 1266 bp, Homo sapiens
  Payload ID: 5542
  Gene Symbol: ERAS
  Gene Name: ES cell expressed Ras
  Uniprot ID: Q7Z444
  ENST ID: ENST00000338270
  CDS Start-End: 252-953
cgtgaggagggaaggagagatggggggacgtgggacagggagaaaacaacataaatcatatatatatagcatgcaaattggaaggtgatcagcacacaataggcattcaataaatgttgaaataatgacaccccactgtctccttgccctcaaatggtctcccctaacgtatcccctgttgtcttgcttcttctcttcccacttgcagagcctgctgcccacgtctcttccctgagctgcctgctggggtcatggagctgccaacaaagcctggcaccttcgacctgggcctggccacatggagcccttccttccagggggaaacccaccgggctcaggcacgccgcagggatgttggcaggcagctgcctgagtacaaggctgtggtggtgggcgccagtggcgtgggcaagagtgcgctgaccatccagctgaaccaccagtgcttcgtggaggaccacgaccccaccatccaggattcctactggaaggagttgaccctggacagtggggactgcattctgaatgtgctggacacagcagggcaggccatccatagggccctgcgtgaccagtgcctggctgtctgtgatggtgtgctgggcgtcttcgctctcgatgacccctcgtctctgatccagctgcagcagatatgggccacctggggccctcaccccgcccagccccttgtcctcgtgggcaacaagtgtgaccttgtgaccactgctggagatgctcatgccgctgctgcagccctcgcacacagctggggggcccacttcgtggagacctcggccaaaacacggcaaggcgtggaggaggccttttccctgctggtccatgagatccagagggtccaggaggccatggcgaaggagcccatggcaaggtcctgtagggagaagacccggcaccagaaggccacctgccactgtggctgctctgtggcctgaaggtcttggccaagaaatgtagacctttccccaggccagggtgattgttcatttgacatgagacccctgaggcaactagctttgagggacacatcaggtatactagggaaagatggacatctctcttgttttcacttggtgaggggctttttggtaacatgggagtgcctaatgttgcttttgttatgtcaagttgaaagattttgtgcaaaattaaataaatggtgttttgggtttcaaagctgcctccatgccgagtgttgtgtgggtgggagtgagactgggtagaatgttacttgagttgtgagaattc

SEQ ID NO: 130643 - DNA, 3216 bp, Homo sapiens
  Payload ID: 5543
  Gene Symbol: ESF1
  Gene Name: ESF1 nucleolar pre-rRNA processing protein homolog
  Uniprot ID: Q9H501
  ENST ID: ENST00000202816
  CDS Start-End: 109-2664
gcggacggtgagtggggatggactggagttgaagagctcgagatgaagggcttgagggcgtgtgttatttgttttcttcaagcatttggtcgagattaagaattaaaaatgtcatccaaacaagaaataatgagtgaccagcggtttagacgggttgcaaaggacccgagattttgggaaatgccagaaaaggatcgaaaagtcaaaattgacaagagatttcgagccatgtttcatgacaagaagttcaagttgaactatgccgtggataaaagagggcgccccattagccatagcactacagaggatttgaagcgtttttacgacctttcagattctgattccaatctctctggtgaagatagcaaagcattgagtcaaaagaaaataaagaagaaaaaaacccagactaaaaaagaaatcgattcaaaaaatctagttgagaaaaagaaagaaaccaagaaggctaatcacaagggttctgaaaataaaactgatttagataattctataggaattaaaaaaatgaaaacctcatgtaaatttaagatagattcaaacataagtccgaagaaggatagcaaagaatttacacaaaaaaataagaaagagaaaaaaaacattgttcaacatactacagactcttctctcgaagaaaaacaaaggacattagactcaggcacctctgaaattgtgaaatctcccagaatcgagtgttctaagacaagaagagaaatgcaatcagtggttcaactcataatgacaagagacagtgatggttatgaaaactcaacagatggtgaaatgtgtgacaaagatgctctggaggaagattcagaaagcgttagtgaaataggaagtgatgaggaatctgaaaatgaaattacaagtgttggtagagcttcaggtgatgacgatggaagtgaagatgatgaagaggaggatgaagatgaagaggaggatgaagatgaggatagtgaggatgatgataaaagtgacagtggccctgatcttgcaaggggtaaaggaaatatagaaactagttctgaagatgaagatgatacggcagatttgtttccagaagaatctggttttgagcatgcttggagagaattagataaagatgctcctcgtgctgatgagattacacgtcgattagcagtttgtaacatggactgggatagattaaaggcaaaagatttgctggctctgttcaattcatttaaacccaaaggaggtgtaatattttccgtcaagatatatccttcagaatttggaaaggagaggatgaaggaagagcaagttcaaggaccagtagagctattaagtattcctgaagatgccccagaaaaagactggacgtctagagaaaaattgagagattatcaattcaaacgactgaagtactattatgcagtagtagactgtgattctccggaaacagctagtaaaatttatgaggattgtgatggcctggaatttgaaagtagttgttctttcatagatctaaggtttataccagatgatattacttttgatgatgagcctaaggatgtagcctcagaagtgaatttaacagcatataaaccaaaatatttcacttctgctgcaatgggaacatcaacggtggaaatcacttgggatgagactgatcatgaaagaattacaatgctcaacaggaagtttaaaaaggaagagcttttggacatggattttcaagcctacttagcttcctctagtgaagatgaagaggagatagaagaggagctacaaggtgatgatggagtcaatgtagaagaagatgggaaaacaaagaaaagtcagaaggatgatgaagaacaaattgctaaatacaggcagctcttgcaggttattcaagaaaaagaaaagaaaggcaaagaaaatgatatggaaatggaaattaaatgggttccaggtcttaaagaaagtgcagaagagatggtcaaaaacaaattggaaggaaaggataaactgaccccttgggaacaatttttagagaagaagaaagagaaaaaaagactgaaaaggaaacagaaggctcttgctgaagaggccagtgaagaggaacttccctctgatgttgatttgaatgacccatactttgctgaagaagttaaacaaataggtataaataaaaaatcggtaaaatctgcaaaagatggcacatctccagaagaagaaattgaaatagaaagacaaaaggctgaaatggctttgcttatgatggatgaggacgaggacagtaagaaacacttcaattacaacaagattgtggagcaccagaatctgagcaaaaagaagaaaaagcagctcatgaaaaagaaggaattaatagaggatgactttgaggtaaatgttaacgatgcacggtttcaggcaatgtacacttcccacttgttcaatttggacccctcagatcccaatttcaagaaaacaaaagctatggaaaaaatccttgaggagaaggcccggcaaagagaacggaaagaacaagaacttactcaggcaataaagaaaaaagagagtgagattgaaaaggaatcacaaaggaagtccattgatcctgctttgtcaatgttgattaaatctataaaaaccaaaacagagcagtttcaagcaagaaaaaagcaaaaagtcaaataactggatgttacttatttttgaactgaatacatcttttcctaaaatgtacaaaaataataggagggaatatttattgggaacaaagctatctttcaagaacatgaataaaatctttttctggacatagtaaaatttttctccataaataattgtacttaattgtggatgactgacaaatttttattgtatattcctacagatcagtcataattaaattacctgcattatagggtttataaaatttttatattttacaatgttcagttctaactagtggaaagttactctagctttttaaaaggctgtttacaattctgtgtaaaaatagagcagtatctactcaagtttgtgtaaatgttagggataatttgaaaaatatatatatttaatacattaatttctctggaagcaggaggcatgtttaaataactattaaaataatttatttttctagccataaaggatggaagtcaagaactttttgttgtttagtcatgttaagtatagtttatgaaattaacttgtaaataaaagtgtaaaatattttcatta

SEQ ID NO: 130644 - DNA, 1470 bp, Homo sapiens
  Payload ID: 5543
  Gene Symbol: ESF1
  Gene Name: ESF1 nucleolar pre-rRNA processing protein homolog
  ENST ID: ENST00000617257
  CDS Start-End: 85-1455
gaagaaaaacaaaggacattagactcaggcacctctgaaattgtgaaatctcccagaatcgagtgttctaagacaagaagagaaatgcaatcagtggttcaactcataatgacaagagacagtgatggttatgaaaactcaacagatggtgaaatgtgtgacaaagatgctctggaggaagattcagaaagcgttagtgaaataggaagtgatgaggaatctgaaaatgaaattacaagtgttggtagagcttcaggtgatgacgatggaagtgaagatgatgaagaggaggatgaagatgaagaggaggatgaagatgaggatagtgaggatgatgataaaagtgacagtggccctgatcttgcaaggggtaaaggaaatatagaaactagttctgaagatgaagatgatacggcagatttgtttccagaagaatctggttttgagcatgcttggagagaattagataaagatgctcctcgtgctgatgagattacacgtcgattagcagtttgtaacatggactgggatagattaaaggcaaaagatttgctggctctgttcaattcatttaaacccaaaggaggtgtaatattttccgtcaagatatatccttcagaatttggaaaggagaggatgaaggaagagcaagttcaaggaccagtagagctattaagtattcctgaagatgccccagaaaaagactggacgtctagagaaaaattgagagattatcaattcaaacgactgaagtactattatgcagtagtagactgtgattctccggaaacagctagtaaaatttatgaggattgtgatggcctggaatttgaaagtagttgttctttcatagatctaaggtttataccagatgatattacttttgatgatgagcctaaggatgtagcctcagaagtgaatttaacagcatataaaccaaaatatttcacttctgctgcaatgggaacatcaacggtggaaatcacttgggatgagactgatcatgaaagaattacaatgctcaacaggaagtttaaaaaggaagagcttttggacatggattttcaagcctacttagcttcctctagtgaagatgaagaggagatagaagaggagctacaaggtgatgatggagtcaatgtagaagaagatgggaaaacaaagaaaagtcagaaggatgatgaagaacaaattgctaaatacaggcagctcttgcaggttattcaagaaaaagaaaagaaaggcaaagaaaatgatatggaaatggaaattaaatgggttccaggtcttaaagaaagtgcagaagagatggtcaaaaacaaattggaaggaaaggataaactgaccccttgggaacaatttttagagaagaagaaagagaaaaaaagactgaaaaggaaacagaaggctcttgctgaagaggccagtgaagaggaacttccctctttgatttgaatgacccatactttg

SEQ ID NO: 130645 - DNA, 3531 bp, Homo sapiens
  Payload ID: 5544
  Gene Symbol: ESPN
  Gene Name: espin
  Uniprot ID: B1AK53
  ENST ID: ENST00000377828
  CDS Start-End: 169-2733
agcggagcgccaggcagcgcggagcggaggccaggcccacagccgctccgcctcccggcccgcagatccccgacggccgcaccgcgggctcctctggcccgcaagaacacgtgcatggcgtcctggggaaggcgctgagtgcggagtcgcggcgccgcacgcggcaccatggccctggagcaggcgctgcaggcggcgcggcagggcgagctggacgtgctgaggtcgctgcacgccgcaggcctcctggggccctcgctgcgcgacccgctggacgcgctgcccgtgcaccacgcggcccgcgctgggaagctgcactgtctgcgcttcctggtggaggaagccgccctccccgccgcggcccgcgcccgcaacggcgccacaccggcccacgacgcctccgccaccggccacctcgcctgcctgcagtggctgctgtcgcagggcggctgcagagtgcaggacaaagacaattctggtgccacagtcttgcatctggctgcccgcttcggccaccccgaggtggtgaactggctcttgcatcatggcggtggggaccccaccgcggccacagacatgggcgccctgcctatccactacgctgccgccaaaggagacttcccctccctgaggcttctcgtcgagcactaccctgagggagtgaatgcccaaaccaagaacggtgccacgcccctgtacctggcgtgccaggagggccacctggaggtgacccagtacctggtgcaggaatgcggcgcagacccgcacgcgcgcgcccacgacggcatgaccccgctgcacgccgcggcgcagatgggccacagcccagtcatcgtgtggttggtgagctgcaccgacgtgagcctgtccgagcaggacaaagacggcgccaccgccatgcacttcgcggcgagccgcggccacaccaaggtgctcagctggctgctgctgcacggcggggagatctcggctgacctgtggggcgggaccccgctgcacgacgccgccgagaacggggagctagagtgctgccagatcctggtagtgaacggcgcggagctggacgtccgcgaccgcgacgggtacacggccgccgacctgtcggacttcaacggccacagccactgcacccgctacctgcgcacggtggagaacctgagcgtggagcaccgcgtgctttcccgggatccatccgcagagctggaggctaagcagccggattcaggcatgtcctcacccaataccacggtgtcggtccagccgctgaactttgacctcagctcgcctaccagcaccctctccaactacgactcctgctcctccagccactccagcatcaagggccagcaccctccatgtgggctttccagcgctagagctgcagacatacagagctacatggacatgctgaacccggagctgggcctgcctcggggcacgattgggaagcccacacccccaccacccccacccagcttccccccgccacccccgcccccaggcacccaactgcccccacccccacctggctacccagctcccaagcctcctgtaggaccacaggcagctgacatctacatgcagaccaagaacaaactccgccacgtggagacagaggccctcaagaaggagctgagctcctgtgacggccacgacgggctgcggaggcaggactccagccgcaagccccgcgccttcagcaagcagcccagcacgggggactactaccggcagctgggccgctgccccggcgagacgctggccgcacgcccgggcatggcgcacagcgaggaggtgcgtgcccgccagcccgcgcgcgccggctgcccgcgcctcggccctgccgcccgcggctcactcgaaggcccctccgctcccccgcaggcggcgctgcttcctgggaaccatgttcctaacggctgcgccgcggaccccaaggcgtccagggagctgccaccgccgcccccaccgccgccgccgcccctgccggaggccgcgagttcgccaccgccggccccgcctctgcccctcgagagcgctggccctggctgcgggcagcgccgctcctcctcgtccaccggcagcaccaagtctttcaacatgatgtccccgacgggcgacaactcggagctactggctgagattaaggcaggcaagagcctgaagccgacgccccagagcaaggggctgaccacagtgttctcaggcatcgggcagccggccttccagcccgattcgccgctgccttctgtgtcacctgcactgtcaccagtccggagccccacaccgccagctgcggggtttcagccgctgctcaatggaagcttggttcccgtgccgcccactactcctgcgccgggagtgcagctggacgtggaggctctcatccccacgcacgatgagcagggccggcccatccccgagtggaagcgccaggtgatggtgcgcaagatgcagctgaagatgcaggaggaggaggagcagaggcggaaggaggaggaggaggaggcccggctggccagcatgcccgcctggaggcgggacctcctgcggaagaagctggaagaagagagggagcagaagcggaaagaggaggagcgacagaagcaggaggagctgcggcgggagaaggaacagtcagagaagctgcggacgctgggctacgatgagagcaagctggcgccctggcagcgacaggtcatcctgaagaagggggacatcgctaagtactagaggccgcagactcctgtccgcagcctcgcagctccgtggggccctccgccccagccccagccagccaggccctggtggaaaggctgggagccgcacagccctcccctcctgcgctggaaaccctccctgacccccaccctggccccccgtatccccagcccttggcaacactggagtgcacacgccgccacggttgcccagaaaaagtgcccaagctgctgacgcaaacaacaacaaatgctgcttatttgcatgccgacttacatatatttgcatgttcgttgactatcaaagagtgcagagctctccccagccccgtgggtggtgactttgttttcctgcggggctcagccccctccaggatgcagccccctcccccgcaccccggaaccggcgtcgctggcgcatcctgggtggaggcaggccccgagctcggggaaggggttttcccttcctctctgacccagatctgcgcgcggcctagcccgggcctcatttcttatccccgccaagggtttcctctcagtcatttgtttaccagaaacatgaaaactgcctgtctggccgggccgcacttgtggcccccgggaccccacctctggccccacctccctcaagtctgcgccccgtccccagccagacccactcgctgccgggaccctttcactgccccggtggagtgaatagaggatgaggggccctgaccctgtgtctccaactgctgcaccccatcccgaccctgtctccgccacctcgcagccccattaaagcgctctcatctgggctccggttcactca

SEQ ID NO: 130646 - DNA, 1338 bp, Homo sapiens
  Payload ID: 5544
  Gene Symbol: ESPN
  Gene Name: espin
  ENST ID: ENST00000416731
  CDS Start-End: 220-1086
atcaggtaacgcaggtgtcgggtcctgccgcccccacagccaggtgcacagcgggggccaccagcaccgtggcagctgagctcctgtgacggccacgacgggctgcggaggcaggactccagccgcaagccccgcgccttcagcaagcagcccagcacgggggactactaccggcagctgggccgctgccccggcgagacgctggccgcacgcccgggcatggcgcacagcgaggaggcggcgctgcttcctgggaaccatgttcctaacggctgcgccgcggaccccaaggcgtccagggagctgccaccgccgcccccaccgccgccgccgcccctgccggaggccgcgagttcgccaccgccggccccgcctctgcccctcgagagcgctggccctggctgcgggcagcgccgctcctcctcgtccaccggcagcaccaagtctttcaacatgatgtccccgacgggcgacaactcggagctactggctgagattaaggcaggcaagagcctgaagccgacgccccagagcaaggggctgaccacagtgttctcaggcatcgggcagccggccttccagcccgattcgccgctgccttctgtgtcacctgcactgtcaccagtccggagccccacaccgccagctgcggggtttcagccgctgctcaatggaagcttggttcccgtgccgcccactactcctgcgccgggagtgcagctggacgtggaggctctcatccccacgcacgatgagcagggccggcccatccccgagtggaagcgccaggtgatggtgcgcaagatgcagctgaagatgcaggaggaggaggagcagaggcggaaggaggaggaggaggaggcccggctggccagcatgcccgcctggaggcgggacctcctgcggaagaagctggaagaagagagggagctggggaggaaagaggaggagcgacagaagcaggaggagctgcggcgggagaaggaacagtcagagaagctgcggacgctgggctacgatgagagcaagctggcgccctggcagcgacaggtcatcctgaagaagggggacatcgctaagtactagaggccgcagactcctgtccgcagcctcgcagctccgtggggccctccgccccagccccagccagccaggccctggtggaaaggctgggagccgcacagccctcccctcctgcgctggaaaccctccctgacccccaccctggccccccgtatccccagcccttggcaacactggagtgcacacgccgccacggttgcccagaaaaagtgcccaagctgctgacgcaaacaacaacaaatgctgcttatttgc

SEQ ID NO: 130647 - DNA, 641 bp, Homo sapiens
  Payload ID: 5544
  Gene Symbol: ESPN
  Gene Name: espin
  ENST ID: ENST00000418286
  CDS Start-End: 1-641
gacggcatgaccccgctgcacgccgcggcgcagatgggccacagcccagtcatcgtgtggttggacaaagacggcgccaccgccatgcacttcgcggcgagccgcggccacaccaaggtgctcagctggctgctgctgcacggcggggagatctcggctgacctgtggggcgggaccccgctgcacgacgccgccgagaacggggagctagagtgctgccagatcctggtagtgaacggcgcggagctggacgtccgcgaccgcgacgggtacacggccgccgacctgtcggacttcaacggccacagccactgcacccgctacctgcgcacggtggagaacctgagcgtggagcaccgcgtgctttcccgggatccatccgcagagctggaggctaagcagccggattcaggcatgtcctcacccaataccacggtgtcggtccagccgctgaactttgacctcagctcgcctaccagcaccctctccaactacgactcctgctcctccagccactccagcatcaagggccagcaccctccatgtgggctttccagcgctagagctgcagacatacagagctacatggacatgctgaacccggagctgggcctgcctcggggcacgattgggaagcccac

SEQ ID NO: 130648 - DNA, 750 bp, Homo sapiens
  Payload ID: 5544
  Gene Symbol: ESPN
  Gene Name: espin
  ENST ID: ENST00000434576
  CDS Start-End: 1-565
tgagattaaggcaggcaagagcctgaagccgacgccccagagcaaggggctgaccacagtgttctcaggcatcgggcagccggccttccagcccgattcgccgctgccttctgtgtcacctgcactgtcaccagtccggagccccacaccgccagctgcggggtttcagccgctgctcaatggaagcttggttcccgtgccgcccactactcctgcgccgggagtgcagctggacgtggaggctctcatccccacgcacgatgagcagggccggcccatccccgagtggaagcgccaggtgatggtgcgcaagatgcagctgaagatgcaggaggaggaggagcagaggcggaaggaggaggaggaggaggcccggctggccagcatgcccgcctggaggcgggacctcctgcggaagaagctggaagaagagagggagcagaagcggaaagaggaggagcgacagaagcaggaggagctgcggcgggagaaggaacagtcagagaagctgcggacgctgggctacgatgagagcaagctggcgccctggcagcgacagatttaataccgcgatctcagccaaactccggccgagaagttgagaaatgtcttcaccccctctcgacattcgttcgtgcttcttcgccttggctggagcgataggggcgagcaggggtggggccggctggtgctgctacgcagggccgtgccagcggcttaataagtgacataaaatgtctacacgcataa

SEQ ID NO: 130649 - DNA, 1869 bp, Homo sapiens
  Payload ID: 5544
  Gene Symbol: ESPN
  Gene Name: espin
  Uniprot ID: B1AK53
  ENST ID: ENST00000461727
  CDS Start-End: 220-1086
atcaggtaacgcaggtgtcgggtcctgccgcccccacagccaggtgcacagcgggggccaccagcaccgtggcagctgagctcctgtgacggccacgacgggctgcggaggcaggactccagccgcaagccccgcgccttcagcaagcagcccagcacgggggactactaccggcagctgggccgctgccccggcgagacgctggccgcacgcccgggcatggcgcacagcgaggaggcggcgctgcttcctgggaaccatgttcctaacggctgcgccgcggaccccaaggcgtccagggagctgccaccgccgcccccaccgccgccgccgcccctgccggaggccgcgagttcgccaccgccggccccgcctctgcccctcgagagcgctggccctggctgcgggcagcgccgctcctcctcgtccaccggcagcaccaagtctttcaacatgatgtccccgacgggcgacaactcggagctactggctgagattaaggcaggcaagagcctgaagccgacgccccagagcaaggggctgaccacagtgttctcaggcatcgggcagccggccttccagcccgattcgccgctgccttctgtgtcacctgcactgtcaccagtccggagccccacaccgccagctgcggggtttcagccgctgctcaatggaagcttggttcccgtgccgcccactactcctgcgccgggagtgcagctggacgtggaggctctcatccccacgcacgatgagcagggccggcccatccccgagtggaagcgccaggtgatggtgcgcaagatgcagctgaagatgcaggaggaggaggagcagaggcggaaggaggaggaggaggaggcccggctggccagcatgcccgcctggaggcgggacctcctgcggaagaagctggaagaagagagggagcagaagcggaaagaggaggagcgacagaagcaggaggagctgcggcgggagaaggaacagtcagagaagctgcggacgctgggctacgatgagagcaagctggcgccctggcagcgacaggtcatcctgaagaagggggacatcgctaagtactagaggccgcagactcctgtccgcagcctcgcagctccgtggggccctccgccccagccccagccagccaggccctggtggaaaggctgggagccgcacagccctcccctcctgcgctggaaaccctccctgacccccaccctggccccccgtatccccagcccttggcaacactggagtgcacacgccgccacggttgcccagaaaaagtgcccaagctgctgacgcaaacaacaacaaatgctgcttatttgcatgccgacttacatatatttgcatgttcgttgactatcaaagagtgcagagctctccccagccccgtgggtggtgactttgttttcctgcggggctcagccccctccaggatgcagccccctcccccgcaccccggaaccggcgtcgctggcgcatcctgggtggaggcaggccccgagctcggggaaggggttttcccttcctctctgacccagatctgcgcgcggcctagcccgggcctcatttcttatccccgccaagggtttcctctcagtcatttgtttaccagaaacatgaaaactgcctgtctggccgggccgcacttgtggcccccgggaccccacctctggccccacctccctcaagtctgcgccccgtccccagccagacccactcgctgccgggaccctttcactgccccggtggagtgaatagaggatgaggggccctgaccctgtgtctccaactgctgcaccccatcccgaccctgtctccgccacctcgcagccccattaaagcgctctcatctgg

SEQ ID NO: 130650 - DNA, 270 bp, Homo sapiens
  Payload ID: 5544
  Gene Symbol: ESPN
  Gene Name: espin
  ENST ID: ENST00000478323
  CDS Start-End: 187-270
tgctgcacccctcgacggccgctggccgcgagtccccaggagctgagctcctgtgacggccacgacgggctgcggaggcaggactccagccgcaagccccgcgccttcagcaagcagcccagcacgggggactactaccggcagctgggccgctgccccggcgagacgctggccgcacgcccgggcatggcgcacagcgaggaggcggcgctgcttcctgggaaccatgttcctaacggctgcgccgcggaccccaaggcgtccagggag

SEQ ID NO: 130651 - DNA, 455 bp, Homo sapiens
  Payload ID: 5544
  Gene Symbol: ESPN
  Gene Name: espin
  ENST ID: ENST00000632803
  CDS Start-End: 274-455
gcgggtgcctgaccgggggcgggagcagggtcgtggcgtccgaacctccgggctgcagggggcgcggagcgggcgggctggcccagaaaacaaatcctgcggtgtcgcatttcctgcaacgtgagccagctgagctcctgtgacggccacgacgggctgcggaggcaggactccagccgcaagccccgcgccttcagcaagcagcccagcacgggggactactaccggcagctgggccgctgccccggcgagacgctggccgcacgcccgggcatggcgcacagcgaggaggcggcgctgcttcctgggaaccatgttcctaacggctgcgccgcggaccccaaggcgtccagggagctgccaccgccgcccccaccgccgccgccgcccctgccggaggccgcgagttcgccaccgccggccccgcctctgcccctcgagagcgctggccctgg

SEQ ID NO: 130652 - DNA, 1494 bp, Homo sapiens
  Payload ID: 5544
  Gene Symbol: ESPN
  Gene Name: espin
  ENST ID: ENST00000633239
  CDS Start-End: 1-714
ggctgcgggcagcgccgctcctcctcgtccaccggcaaagtgagagtcctgaggcacaggaagagcaccaagtctttcaacatgatgtccccgacgggcgacaactcggagctactggctgagattaaggcaggcaagagcctgaagccgacgccccagagcaaggggctgaccacagtgttctcaggcatcgggcagccggccttccagcccgattcgccgctgccttctgtgtcacctgcactgtcaccagtccggagccccacaccgccagctgcggggtttcagccgctgctcaatggaagcttggttcccgtgccgcccactactcctgcgccgggagtgcagctggacgtggaggctctcatccccacgcacgatgagcagggccggcccatccccgagtggaagcgccaggtgatggtgcgcaagatgcagctgaagatgcaggaggaggaggagcagaggcggaaggaggaggaggaggaggcccggctggccagcatgcccgcctggaggcgggacctcctgcggaagaagctggaagaagagagggagcagaagcggaaagaggaggagcgacagaagcaggaggagctgcggcgggagaaggaacagtcagagaagctgcggacgctgggctacgatgagagcaagctggcgccctggcagcgacaggtcatcctgaagaagggggacatcgctaagtactagaggccgcagactcctgtccgcagcctcgcagctccgtggggccctccgccccagccccagccagccaggccctggtggaaaggctgggagccgcacagccctcccctcctgcgctggaaaccctccctgacccccaccctggccccccgtatccccagcccttggcaacactggagtgcacacgccgccacggttgcccagaaaaagtgcccaagctgctgacgcaaacaacaacaaatgctgcttatttgcatgccgacttacatatatttgcatgttcgttgactatcaaagagtgcagagctctccccagccccgtgggtggtgactttgttttcctgcggggctcagccccctccaggatgcagccccctcccccgcaccccggaaccggcgtcgctggcgcatcctgggtggaggcaggccccgagctcggggaaggggttttcccttcctctctgacccagatctgcgcgcggcctagcccgggcctcatttcttatccccgccaagggtttcctctcagtcatttgtttaccagaaacatgaaaactgcctgtctggccgggccgcacttgtggcccccgggaccccacctctggccccacctccctcaagtctgcgccccgtccccagccagacccactcgctgccgggaccctttcactgccccggtggagtgaatagaggatgaggggccctgaccctgtgtctccaactgctgcaccccatcccgaccctgtctccgccacctcgcagccccattaaagcgctctcatc

SEQ ID NO: 130653 - DNA, 813 bp, Homo sapiens
  Payload ID: 5544
  Gene Symbol: ESPN
  Gene Name: espin
  ENST ID: ENST00000475228
  CDS Start-End: 278-813
catgaccctcgcccgctgcccactgtgagaaccagggggtctaggaagtcagctgctgcacccctcgacggccgctggccgcgagtccccaggagctgagctcctgtgacggccacgacgggctgcggaggcaggactccagccgcaagccccgcgccttcagcaagcagcccagcacgggggactactaccggcagctgggccgctgccccggcgagacgctggccgcacgcccgggcatggcgcacagcgaggaggcaccaagtctttcaacatgatgtccccgacgggcgacaactcggagctactggctgagattaaggcaggcaagagcctgaagccgacgccccagagcaaggggctgaccacagtgttctcaggcatcgggcagccggccttccagcccgattcgccgctgccttctgtgtcacctgcactgtcaccagtccggagccccacaccgccagctgcggggtttcagccgctgctcaatggaagcttggttcccgtgccgcccactactcctgcgccgggagtgcagctggacgtggaggctctcatccccacgcacgatgagcagggccggcccatccccgagtggaagcgccaggtgatggtgcgcaagatgcagctgaagatgcaggaggaggaggagcagaggcggaaggaggaggaggaggaggcccggctggccagcatgcccgcctggaggcgggacctcctgcggaagaagctggaagaagagagggagcagaagcggaaagaggaggagcgacagaagcaggaggagctgcggcgggagaaggaacagtc

SEQ ID NO: 130654 - DNA, 4836 bp, Homo sapiens
  Payload ID: 5545
  Gene Symbol: ESPNL
  Gene Name: espin-like
  Uniprot ID: Q6ZVH7
  ENST ID: ENST00000343063
  CDS Start-End: 264-3281
tacccagccctgacctagcctggtgtgggcctttccctgtgccctgtactccatcctcccagctccaggcacctggcaccctcacactgtgggagtggcttgggcaggtcctcaaggcctgtccccccacccgaccccaccccaccgcctcccatctgccctgtggcagcttatcgggtaaccagagccggcagcttcatccacgtctgaaacaggaagccccagcctgtgcatgagtcgccactgagagcccgggccagaggatggagaagcagcgggcactcgtggccgccaaggatggggatgtggcgacgttggagcggctgctggaggctggcgccctgggcccgggcatcaccgatgctctgggggccggcctggttcaccacgccacccgggctggccacctggactgcgtcaagttcttggtgcagcgggcccagctgcccggcaaccagcgggcccacaacggggccaccccagcgcatgacgccgctgccacgggcagcctggccgagctgtgctggctggtccgcgaggggggctgcggtctgcaggaccaagatgcctcgggcgtctccccgctgcacctggccgcccgttttggacacccagtgctggtggagtggctgctccacgagggccactcggccacgctagagacccgggagggagcccggccgctgcaccacgctgccgtcagtggggacctgacctgcctcaagctcctgacagccgcgcatggcagcagcgtgaaccggcggacacgcagtggcgcctccccactctacctggcctgccaggagggccacctgcacctggcccagttcctggtgaaggactgtggcgctgacgtgcaccttcgtgctctcgatggcatgagcgccctgcacgctgccgccgcccgtggccactactccctcgtcgtctggctggtcacattcaccgacatcggactcacggcacgggacaatgagggggccacggccctgcactttgcagcccgaggcggccacacgcccattctagaccgactcctgctcatgggtacccccatcctgagagactcctggggtgggacccccctccacgacgcagcagagaacgggcagatggagtgctgccagaccctagtctcccaccacgtggacccctccctgcgggatgaagatggttacacggcggcagacctggcggagtaccatggacaccgggactgcgcccagtacctgcgggaggtggcccagccggtgcccctgctgatgacgcccccaccaccaccgttccccccacctccactgttggccacgaggcgctccctggaggatggaagaagaggaggcccagggccagggaaccccagccccatgtccctcagcccggcctggcctggccatcctgaccagcctcttcccagggagcagatgaccagcccggcccctccgaggatcatcaccagtgccacggctgaccccgaggggacagagacggcgctggcgggggacacctcagatggcctggccgcactacagctggatgggctgccctcaggcgacatcgacgggctggtgcccacgcgggatgagcgcggccagcccatcccagagtggaagcggcaggtgatggtgcggaagctgcaggcgcgcctgggcgcagagagctccgcagaggcccaggacaatggtgggagctcaggccccacggagcaggcggcctggaggtactcacagactcatcaggccatcctggggccctttggggagctgctgacagaggatgacctggtctacctggagaagcagattgcagacctgcagcttcggcgccgctgtcaggagtatgagagtgagctgggccggttggcggctgagctgcaggccctgctgcccgagcccctggtcagcatcacggtcaacagccacttcctgccccgggcgcccggactggaggttgaggaggcctcaatcccagcggctgagcccgcagggtctgcggaggcctcagaggtggcccccggggtgcagcccctgcccttctggtgcagccacatctcccgcctggtacgcagcctgtccctgctgctgaagggcgtgcatgggctagtacagggggatgagaagccatccacccggcccctgcaggacacctgcagggaggcctcggccagcccccctcggagcgaggcccagcgccagatccaggagtggggggtgtctgtgcggacgctgcggggcaacttcgagtcggcctctggcccactctgtggcttcaaccctggcccctgcgagccgggggcccagcacaggcagtgcctgagtggctgctggccagccctgcctaagccccgcagtggcctggcttcaggggagcccaggcctggcgacacagaggaggccagcgactctggcatcagctgcgaggaggtgccatcagaggcgggtgccgcagccggcccagacctggccagcctgcgcaaggagcgcatcatcatgctcttcctcagccactggaggagatcggcctacacgccggccctcaagacagtggcctgcaggaccctaggagcccgccacgcggggttgcggggccaggaggccgccaggagccctgggccaccctccccgcccagcgagggcccccggctgggccacctgtggcagcagcgcagcaccatcacccacctgctgggcaactggaaggccatcatggctcacgtgcccgcccggcagctgcggcggctgagccggcagccccgcggggctttgtcccccgagcagttcctgccccacgtggacggggctccggtgccctacagcagcctctcactggatctcttcatgctgggttacttccagctgctggagtgcgacctgccggcggaggagcggaagctgcgccacctgctgtgcttcgaggtcttcgagcacctgggcacccacggctgggaggctgtgcgcgccttccacaaggccgtgaccgacgaggtggccgccggccgccgggcctggaccgacggcttcgaggacatcaaagcccgcttctttggctccagccagcgtcccgcctgggatacggagcctggccgcaagtcaggtctgaccctgctcgggcccctgcctcacgccgccgtcccctgcagcggccctgagcccacagcacagcggctggggtcccgctcccagcagggcagcttcaacggtgaggacatctgcggctacatcaaccgcagctttgccttctggaaggagaaggaagctgagatgttcaactttggagaatgaccctactggcagcctgctttccagaatgtggtttgggggtgacttggagtttctcttttcttttccttgctcacacccttggtgttcaggtgagccgggcaaggctgcctccagtcctaccagttatcggaggctgcgggactgttctgttgtggcatggttctcctccgagctgggactcagactccttctcaccactgcacccaggaagccccttggcaggtcctgaagtgaggcaatgggccaccccagtccagggcacctctgcccagccggcccccgagacctgggatgctgcctgtttctcacttgtccttccccagtgtcaccagttcccttggcgtcctgtccctcagtttctgtggtgctggtggcctcggccacatccatctttcatgtgagtctgaggtggccccaggccctggtcctgcccctgtttctcctgctgaccttgggtcacaccccttcacctcccatctgtgaatttgggggagctggagtgattccgaggacagattccatgggcaggaggccttcctgccaggccatccctgctggtcacacaccgatgcccgccaggccagtgccccagcccagggtgctccggaggccctgcttcctcaaaggaggctccccatggggcccctgtcctccagcctgaccagccctggcctagtcgtgggccccagcaaggctggagagcagggacgtgggagtagcagtggctgagagagtcctccaggcagggtggctggtgcccactctcaaaggctgctgcacacagaggagaatgccggcaggggtgggcagcagccagacctcaggggggcgtggatactccgtgagggcacctgggtgtcacccacagtgcacctcttcacaggggcctgggtactggagggagggatacaggaagggagatggattccgtcctcgggggctctgggtgctgcggagtattcctgggcatggtgctgggcatggctggcatagggtgtggcttgtccccagcttctgatggcagccaggagaatgggtcatcacccaggctctggggctgaggagggctgggcccaagcccacagggactttggaggtggggctctgcagctgtgagatggcccagcagggagtggcagggacgggaggcttcaggaatattcctcctggcatccaggccccctgggacagaggagggtgcagtcaggcgacaggcttatcaggactccctgcctcaatccctggggattgtccaggcaaaacctggagggcagcgggcaagctgttggatggaacagagagaccctcgcagctgactagggcccaaggggacggacactcaagaagatgtaaaattgggaggggtggtattggccattggggcaggcagggccgggaagggaagtagcaccggccgcagccccaagccagtggcttttccacaagggcctatcctgcagccggcccgctccggcttcctccactgctgaagaccctgctgtagagctgaagctgaacatgtgtttgctaaataaagattcccattcctagcgca

SEQ ID NO: 130655 - DNA, 4441 bp, Homo sapiens
  Payload ID: 5545
  Gene Symbol: ESPNL
  Gene Name: espin-like
  Uniprot ID: Q6ZVH7
  ENST ID: ENST00000409169
  CDS Start-End: 1-2886
atggagaagcagcgggcactcgtggccgccaaggatggggatgtggcgacgttggagcggctgctggaggctggcgccctgggcccgggcatcaccgatgctctgggggccggcctggttcaccacgccacccgggctggccacctggactgcgtcaagttcttggtgcagcgggcccagctgcccggcaaccagcgggcccacaacggggccaccccagcgcatgacgccgctgccacgggcagcctggccgagctgtgctggctggtccgcgaggggggctgcggtctgcaggaccaagatgcctcgggcgtctccccgctgcacctggccgcccgttttggacacccagtgctggtggagtggctgctccacgagggccactcggccacgctagagacccgggagggagcccggccgctgcaccacgctgccgtcagtggggacctgacctgcctcaagctcctgacagccgcgcatggcagcagcgtgaaccggcggacacgcagtggcgcctccccactctacctggcctgccaggagggccacctgcacctggcccagttcctggtgaaggactgtggcgctgacgtgcaccttcgtgctctcgatggcatgagcgccctgcacgctgccgccgcccgtggccactactccctcgtcgtctggctggtcacattcaccgacatcggactcacggcacgggacaatgagggggccacggccctgcactttgcagcccgaggcggccacacgcccattctagaccgactcctgctcatgggtacccccatcctgagagactcctggggtgggacccccctccacgacgcagcagagaacgggcagatggaggtgcccctgctgatgacgcccccaccaccaccgttccccccacctccactgttggccacgaggcgctccctggaggatggaagaagaggaggcccagggccagggaaccccagccccatgtccctcagcccggcctggcctggccatcctgaccagcctcttcccagggagcagatgaccagcccggcccctccgaggatcatcaccagtgccacggctgaccccgaggggacagagacggcgctggcgggggacacctcagatggcctggccgcactacagctggatgggctgccctcaggcgacatcgacgggctggtgcccacgcgggatgagcgcggccagcccatcccagagtggaagcggcaggtgatggtgcggaagctgcaggcgcgcctgggcgcagagagctccgcagaggcccaggacaatggtgggagctcaggccccacggagcaggcggcctggaggtactcacagactcatcaggccatcctggggccctttggggagctgctgacagaggatgacctggtctacctggagaagcagattgcagacctgcagcttcggcgccgctgtcaggagtatgagagtgagctgggccggttggcggctgagctgcaggccctgctgcccgagcccctggtcagcatcacggtcaacagccacttcctgccccgggcgcccggactggaggttgaggaggcctcaatcccagcggctgagcccgcagggtctgcggaggcctcagaggtggcccccggggtgcagcccctgcccttctggtgcagccacatctcccgcctggtacgcagcctgtccctgctgctgaagggcgtgcatgggctagtacagggggatgagaagccatccacccggcccctgcaggacacctgcagggaggcctcggccagcccccctcggagcgaggcccagcgccagatccaggagtggggggtgtctgtgcggacgctgcggggcaacttcgagtcggcctctggcccactctgtggcttcaaccctggcccctgcgagccgggggcccagcacaggcagtgcctgagtggctgctggccagccctgcctaagccccgcagtggcctggcttcaggggagcccaggcctggcgacacagaggaggccagcgactctggcatcagctgcgaggaggtgccatcagaggcgggtgccgcagccggcccagacctggccagcctgcgcaaggagcgcatcatcatgctcttcctcagccactggaggagatcggcctacacgccggccctcaagacagtggcctgcaggaccctaggagcccgccacgcggggttgcggggccaggaggccgccaggagccctgggccaccctccccgcccagcgagggcccccggctgggccacctgtggcagcagcgcagcaccatcacccacctgctgggcaactggaaggccatcatggctcacgtgcccgcccggcagctgcggcggctgagccggcagccccgcggggctttgtcccccgagcagttcctgccccacgtggacggggctccggtgccctacagcagcctctcactggatctcttcatgctgggttacttccagctgctggagtgcgacctgccggcggaggagcggaagctgcgccacctgctgtgcttcgaggtcttcgagcacctgggcacccacggctgggaggctgtgcgcgccttccacaaggccgtgaccgacgaggtggccgccggccgccgggcctggaccgacggcttcgaggacatcaaagcccgcttctttggctccagccagcgtcccgcctgggatacggagcctggccgcaagtcaggtctgaccctgctcgggcccctgcctcacgccgccgtcccctgcagcggccctgagcccacagcacagcggctggggtcccgctcccagcagggcagcttcaacggtgaggacatctgcggctacatcaaccgcagctttgccttctggaaggagaaggaagctgagatgttcaactttggagaatgaccctactggcagcctgctttccagaatgtggtttgggggtgacttggagtttctcttttcttttccttgctcacacccttggtgttcaggtgagccgggcaaggctgcctccagtcctaccagttatcggaggctgcgggactgttctgttgtggcatggttctcctccgagctgggactcagactccttctcaccactgcacccaggaagccccttggcaggtcctgaagtgaggcaatgggccaccccagtccagggcacctctgcccagccggcccccgagacctgggatgctgcctgtttctcacttgtccttccccagtgtcaccagttcccttggcgtcctgtccctcagtttctgtggtgctggtggcctcggccacatccatctttcatgtgagtctgaggtggccccaggccctggtcctgcccctgtttctcctgctgaccttgggtcacaccccttcacctcccatctgtgaatttgggggagctggagtgattccgaggacagattccatgggcaggaggccttcctgccaggccatccctgctggtcacacaccgatgcccgccaggccagtgccccagcccagggtgctccggaggccctgcttcctcaaaggaggctccccatggggcccctgtcctccagcctgaccagccctggcctagtcgtgggccccagcaaggctggagagcagggacgtgggagtagcagtggctgagagagtcctccaggcagggtggctggtgcccactctcaaaggctgctgcacacagaggagaatgccggcaggggtgggcagcagccagacctcaggggggcgtggatactccgtgagggcacctgggtgtcacccacagtgcacctcttcacaggggcctgggtactggagggagggatacaggaagggagatggattccgtcctcgggggctctgggtgctgcggagtattcctgggcatggtgctgggcatggctggcatagggtgtggcttgtccccagcttctgatggcagccaggagaatgggtcatcacccaggctctggggctgaggagggctgggcccaagcccacagggactttggaggtggggctctgcagctgtgagatggcccagcagggagtggcagggacgggaggcttcaggaatattcctcctggcatccaggccccctgggacagaggagggtgcagtcaggcgacaggcttatcaggactccctgcctcaatccctggggattgtccaggcaaaacctggagggcagcgggcaagctgttggatggaacagagagaccctcgcagctgactagggcccaaggggacggacactcaagaagatgtaaaattgggaggggtggtattggccattggggcaggcagggccgggaagggaagtagcaccggccgcagccccaagccagtggcttttccacaagggcctatcctgcagccggcccgctccggcttcctccactgctgaagaccctgctgtagagctgaagctgaacatgtgtttgctaaataaagattcccattcctagcgca

SEQ ID NO: 130656 - DNA, 3610 bp, Homo sapiens
  Payload ID: 5545
  Gene Symbol: ESPNL
  Gene Name: espin-like
  Uniprot ID: Q6ZVH7
  ENST ID: ENST00000409506
  CDS Start-End: 142-2055
gcggtgtgccgcaggctctcccatcgaccaggcgggggcgggccccactgactccccagagaaggtccagtggggcccccgaggtgttctggggcagggtgggctggggtcagctcccagctcgcagatcgttcaggagccatgtccctcagcccggcctggcctggccatcctgaccagcctcttcccagggagcagatgaccagcccggcccctccgaggatcatcaccagtgccacggctgaccccgaggggacagagacggcgctggcgggggacacctcagatggcctggccgcactacagctggatgggctgccctcaggcgacatcgacgggctggtgcccacgcgggatgagcgcggccagcccatcccagagtggaagcggcaggtgatggtgcggaagctgcaggcgcgcctgggcgcagagagctccgcagaggcccaggacaatggtgggagctcaggccccacggagcaggcggcctggaggtactcacagactcatcaggccatcctggggccctttggggagctgctgacagaggatgacctggtctacctggagaagcagattgcagacctgcagcttcggcgccgctgtcaggagtatgagagtgagctgggccggttggcggctgagctgcaggccctgctgcccgagcccctggtcagcatcacggtcaacagccacttcctgccccgggcgcccggactggaggttgaggaggcctcaatcccagcggctgagcccgcagggtctgcggaggcctcagaggtggcccccggggtgcagcccctgcccttctggtgcagccacatctcccgcctggtacgcagcctgtccctgctgctgaagggcgtgcatgggctagtacagggggatgagaagccatccacccggcccctgcaggacacctgcagggaggcctcggccagcccccctcggagcgaggcccagcgccagatccaggagtggggggtgtctgtgcggacgctgcggggcaacttcgagtcggcctctggcccactctgtggcttcaaccctggcccctgcgagccgggggcccagcacaggcagtgcctgagtggctgctggccagccctgcctaagccccgcagtggcctggcttcaggggagcccaggcctggcgacacagaggaggccagcgactctggcatcagctgcgaggaggtgccatcagaggcgggtgccgcagccggcccagacctggccagcctgcgcaaggagcgcatcatcatgctcttcctcagccactggaggagatcggcctacacgccggccctcaagacagtggcctgcaggaccctaggagcccgccacgcggggttgcggggccaggaggccgccaggagccctgggccaccctccccgcccagcgagggcccccggctgggccacctgtggcagcagcgcagcaccatcacccacctgctgggcaactggaaggccatcatggctcacgtgcccgcccggcagctgcggcggctgagccggcagccccgcggggctttgtcccccgagcagttcctgccccacgtggacggggctccggtgccctacagcagcctctcactggatctcttcatgctgggttacttccagctgctggagtgcgacctgccggcggaggagcggaagctgcgccacctgctgtgcttcgaggtcttcgagcacctgggcacccacggctgggaggctgtgcgcgccttccacaaggccgtgaccgacgaggtggccgccggccgccgggcctggaccgacggcttcgaggacatcaaagcccgcttctttggctccagccagcgtcccgcctgggatacggagcctggccgcaagtcaggtctgaccctgctcgggcccctgcctcacgccgccgtcccctgcagcggccctgagcccacagcacagcggctggggtcccgctcccagcagggcagcttcaacggtgaggacatctgcggctacatcaaccgcagctttgccttctggaaggagaaggaagctgagatgttcaactttggagaatgaccctactggcagcctgctttccagaatgtggtttgggggtgacttggagtttctcttttcttttccttgctcacacccttggtgttcaggtgagccgggcaaggctgcctccagtcctaccagttatcggaggctgcgggactgttctgttgtggcatggttctcctccgagctgggactcagactccttctcaccactgcacccaggaagccccttggcaggtcctgaagtgaggcaatgggccaccccagtccagggcacctctgcccagccggcccccgagacctgggatgctgcctgtttctcacttgtccttccccagtgtcaccagttcccttggcgtcctgtccctcagtttctgtggtgctggtggcctcggccacatccatctttcatgtgagtctgaggtggccccaggccctggtcctgcccctgtttctcctgctgaccttgggtcacaccccttcacctcccatctgtgaatttgggggagctggagtgattccgaggacagattccatgggcaggaggccttcctgccaggccatccctgctggtcacacaccgatgcccgccaggccagtgccccagcccagggtgctccggaggccctgcttcctcaaaggaggctccccatggggcccctgtcctccagcctgaccagccctggcctagtcgtgggccccagcaaggctggagagcagggacgtgggagtagcagtggctgagagagtcctccaggcagggtggctggtgcccactctcaaaggctgctgcacacagaggagaatgccggcaggggtgggcagcagccagacctcaggggggcgtggatactccgtgagggcacctgggtgtcacccacagtgcacctcttcacaggggcctgggtactggagggagggatacaggaagggagatggattccgtcctcgggggctctgggtgctgcggagtattcctgggcatggtgctgggcatggctggcatagggtgtggcttgtccccagcttctgatggcagccaggagaatgggtcatcacccaggctctggggctgaggagggctgggcccaagcccacagggactttggaggtggggctctgcagctgtgagatggcccagcagggagtggcagggacgggaggcttcaggaatattcctcctggcatccaggccccctgggacagaggagggtgcagtcaggcgacaggcttatcaggactccctgcctcaatccctggggattgtccaggcaaaacctggagggcagcgggcaagctgttggatggaacagagagaccctcgcagctgactagggcccaaggggacggacactcaagaagatgtaaaattgggaggggtggtattggccattggggcaggcagggccgggaagggaagtagcaccggccgcagccccaagccagtggcttttccacaagggcctatcctgcagccggcccgctccggcttcctccactgctgaagaccctgctgtagagctgaagctgaacatgtgtttgctaaataaagattcccattcctagcgca

SEQ ID NO: 130657 - DNA, 476 bp, Homo sapiens
  Payload ID: 5545
  Gene Symbol: ESPNL
  Gene Name: espin-like
  ENST ID: ENST00000423032
  CDS Start-End: 230-476
gtgccgcaggctctcccatcgaccaggcgggggcgggccccactgactccccagagaaggtccagtggggcccccgaggtgttctggggcagggtgggctggggtcagctcccagctcgcagatcgttcaggaggtcagctctgcccccagggccggatccccgaggctctgggtctctgctccccagcccttgccctttctgcaacacccttcttcttcttggcagccatgtccctcagcccggcctggcctggccatcctgaccagcctcttcccagggagcagatgaccagcccggcccctccgaggatcatcaccagtgccacggctgaccccgaggggacagagacggcgctggcgggggacacctcagatggcctggccgcactacagctggatgggctgccctcaggcgacatcgacgggctggtgcccacgcgggatgagcgcggccagcccatcccagagtggaagc

SEQ ID NO: 130658 - DNA, 3673 bp, Homo sapiens
  Payload ID: 5545
  Gene Symbol: ESPNL
  Gene Name: espin-like
  ENST ID: ENST00000612395
  CDS Start-End: 2358-2780
ccgactcctgctcatgggtacccccatcctgagagactcctggggtgggacccccctccacgacgcagcagagaacgggcagatggaggtgcccctgctgatgacgcccccaccaccaccgttccccccacctccactgttggccacgaggcgctccctggaggatggaagaagaggaggcccagggccagggaaccccagccccatgtccctcagcccggcctggcctggccatcctgaccagcctcttcccagggagcagatgaccagcccggcccctccgaggatcatcaccagtgccacggctgaccccgaggggacagagacggcgctggcgggggacacctcagatggcctggccgcactacagctggatgggctgccctcaggcgacatcgacgggctggtgcccacgcgggatgagcgcggccagcccatcccagagtggaagcggcaggtgatggtgcggaagctgcaggcgcgcctgggcgcagagagctccgcagaggcccaggacaatggtgggagctcaggccccacggagcaggcggcctggaggtactcacagactcatcaggccatcctggggccctttggggagctgctgacagaggatgacctggtctacctggagaagcagattgcagacctgcagcttcggcgccgctgtcaggagtatgagagtgagctgggccggttggcggctgagctgcaggccctgctgcccgagcccctggtcagcatcacggtcaacagccacttcctgccccgggcgcccggactggaggttgaggaggcctcaatcccagcggctgagcccgcagggtctgcggaggcctcagaggtggcccccggggtgcagcccctgcccttctggtgcagccacatctcccgcctggtacgcagcctgtccctgctgctgaagggcgtgcatgggctagtacagggggatgagaagccatccacccggcccctgcaggacacctgcagggaggcctcggccagcccccctcggagcgaggcccagcgccagatccaggagtggggggtgtctgtgcggacgctgcggggcaacttcgagtcggcctctggcccactctgtggcttcaaccctggcccctgcgagccgggggcccagcacaggcagtgcctgagtggctgctggccagccctgcctaagccccgcagtggcctggcttcaggggagcccaggcctggcgacacagaggaggccagcgactctggcatcagctgcgaggaggtgccatcagaggcgggtgccgcagccggcccagacctggccagcctgcgcaaggagcgcatcatcatgctcttcctcagccactggaggagatcggcctacacgccggccctcaagacagtggcctgcaggaccctaggagcccgccacgcggggttgcggggccaggaggccgccaggagccctgggccaccctccccgcccagcgagggcccccggctgggccacctgtggcagcagcgcagcaccatcacccacctgctgggcaactggaaggccatcatggctcacgtgcccgcccggcagctgcggcggctgagccggcagccccgcggggctttgtcccccgagcagttcctgccccacgtggacggggctccggtgccctacagcagcctctcactggatctcttcatgctgggttacttccagctgctggagtgcgacctgccggcggaggagcggaagctgcgccacctgctgtgcttcgaggtcttcgagcacctgggcacccacggctgggaggctgtgcgcgccttccacaaggccgtgaccgacgaggtggccgccggccgccgggcctggaccgacggcttcgaggacatcaaagcccgcttctttggctccagccagcgtcccgcctgggatacggagcctggccgcaagtcaggtctgaccctgctcgggcccctgcctcacgccgccgtcccctgcagcggccctgagcccacagcacagcggctggggtcccgctcccagcagggcagcttcaacggtgaggacatctgcggctacatcaaccgcagctttgccttctggaaggagaaggaagctgagatgttcaactttggagaatgaccctactggcagcctgctttccagaatgtggtttgggggtgacttggagtttctcttttcttttccttgctcacacccttggtgttcaggtgagccgggcaaggctgcctccagtcctaccagttatcggaggctgcgggactgttctgttgtggcatggttctcctccgagctgggactcagactccttctcaccactgcacccaggaagccccttggcaggtcctgaagtgaggcaatgggccaccccagtccagggcacctctgcccagccggcccccgagacctgggatgctgcctgtttctcacttgtccttccccagtgtcaccagttcccttggcgtcctgtccctcagtttctgtggtgctggtggcctcggccacatccatctttcatgtgagtctgaggtggccccaggccctggtcctgcccctgtttctcctgctgaccttgggtcacaccccttcacctcccatctgtgaatttgggggagctggagtgattccgaggacagattccatgggcaggaggccttcctgccaggccatccctgctggtcacacaccgatgcccgccaggccagtgccccagcccagggtgctccggaggccctgcttcctcaaaggaggctccccatggggcccctgtcctccagcctgaccagccctggcctagtcgtgggccccagcaaggctggagagcagggacgtgggagtagcagtggctgagagagtcctccaggcagggtggctggtgcccactctcaaaggctgctgcacacagaggagaatgccggcaggggtgggcagcagccagacctcaggggggcgtggatactccgtgagggcacctgggtgtcacccacagtgcacctcttcacaggggcctgggtactggagggagggatacaggaagggagatggattccgtcctcgggggctctgggtgctgcggagtattcctgggcatggtgctgggcatggctggcatagggtgtggcttgtccccagcttctgatggcagccaggagaatgggtcatcacccaggctctggggctgaggagggctgggcccaagcccacagggactttggaggtggggctctgcagctgtgagatggcccagcagggagtggcagggacgggaggcttcaggaatattcctcctggcatccaggccccctgggacagaggagggtgcagtcaggcgacaggcttatcaggactccctgcctcaatccctggggattgtccaggcaaaacctggagggcagcgggcaagctgttggatggaacagagagaccctcgcagctgactagggcccaaggggacggacactcaagaagatgtaaaattgggaggggtggtattggccattggggcaggcagggccgggaagggaagtagcaccggccgcagccccaagccagtggcttttccacaagggcctatcctgcagccggcccgctccggcttcctccactgctgaagaccctgctgtagagctgaagctgaacatgtgtttgctaaataaagattcccattcctagcgc

SEQ ID NO: 130659 - DNA, 2339 bp, Homo sapiens
  Payload ID: 5546
  Gene Symbol: EME1
  Gene Name: essential meiotic structure-specific endonuclease 1
  Uniprot ID: Q96AY2
  ENST ID: ENST00000338165
  CDS Start-End: 83-1795
aggagatctacttccgggccctgcgtggcagttgaaagagtggcgggagaagttgcagggaattatttgatagcacatactgatggctctaaagaagtcatcaccctcactggattctggtgatagtgactctgaggagttgccaacatttgcctttctgaagaaggaaccatcttcaacaaagaggagacagcctgaaagggaagagaagattgtagtggttgacatctcagattgtgaagcctcctgtcctccagcaccagagttattttcaccacctgtcccagaaatagctgaaactgtcacacaaacacagccagtcaggttgctaagcagtgaaagtgaagatgaagaagaatttattcctctggctcaaaggcttacatgtaagtttctgacccacaagcaactgagccctgaggactctagctccccagttaaaagtgttttggatcatcaaaataatgaaggtgcatcatgtgactggaaaaagccctttccaaagatccctgaagttcccctccatgataccccagagaggagtgcagcagataacaaggacctgatcttagatccatgctgtcagcttccagcctacctgtctacctgccctggccagagcagcagcttggcagtaaccaaaacaaattctgacatccttccaccccagaagaaaaccaagccgagtcagaaggtccagggaagaggctcacacggatgccggcagcagagacaagcaaggcagaaggaaagcaccctgagaagacaggaaagaaagaatgcagcactggttaccaggatgaaagcccagaggccagaggaatgcttaaaacacatcattgtagtgctggatccagtgctcttacagatggaaggtgggggccagctcctaggagcactgcagaccatggagtgccgctgtgtgattgaggcgcaggctgtgccttgcagtgtcacttggaggagaagggctgggccgtctgaggacagagaggactgggtggaggagccaacagtactggtgttgctccgggcagaggcatttgtgtccatgatcgacaatggaaagcagggaagcctggacagcactatgaaagggaaggaaacgcttcagggctttgtaactgacatcacagcaaagacagcagggaaagctctgtcactggtgattgtggatcaggagaaatgcttcagtgctcagaatcctccaagaagagggaaacagggagcaaataaacagaccaagaagcagcagcagagacaaccagaggccagcatagggtccatggtatccagggtagacgctgaagaggcattggtggatctgcagctacacacagaagcccaggctcaaattgtgcagagctggaaagagctggccgacttcacatgcgcattcacaaaggctgtggctgaggcgcccttcaagaagctccgagatgaaactaccttctccttctgtctggagagtgactgggctggaggggtgaaggtggaccttgctggcaggggactcgcactagtctggaggagacagattcagcagctgaaccgagtcagcctggaaatggccagtgcagttgtgaatgcctatccctccccacagctcctggtacaggcttatcagcagtgtttttcggataaagaacgccagaatttgctcgcagacatacaggtgcgccgtggggaaggtgtgacatccacttctcgccgcattggaccagaactatccaggcgtatctaccttcagatgaccactttacagccacatctctctttagatagtgctgactgattctagccctcagggatgaggatgaaaagctggaaacttccacttccccaacctcagagcctgactgtaatgaagagactggcagcacctcctggaacacaagcctaggtgaggcccagtctttcttgggtcttattatttgtgaaggtctctctgcctgtcggctggggcagagactgaaatactgccacctacctttggcatttaatgttcctctcctggcaaaaattcactgccacagacaaaccacccccactcctacccagccagccctcaaaacacaaaggaacaaagacagtccactcagacacttatttaataactgtagaaatccaaaagaattagcatcaaatcttgaagtcgtgagtgaagctgcgggttggcttgactgggctcagccactgagctgcctcaaccggccaaggaacgggattatgatgactatgcggacttctatattgtcttcatctcattgtgtgtattatgtatttagtttcaataaagcatttgtaccaatggctctggagcttggaggaagactaaa

SEQ ID NO: 130660 - DNA, 2354 bp, Homo sapiens
  Payload ID: 5546
  Gene Symbol: EME1
  Gene Name: essential meiotic structure-specific endonuclease 1
  Uniprot ID: Q96AY2
  ENST ID: ENST00000393271
  CDS Start-End: 83-1834
aggagatctacttccgggccctgcgtggcagttgaaagagtggcgggagaagttgcagggaattatttgatagcacatactgatggctctaaagaagtcatcaccctcactggattctggtgatagtgactctgaggagttgccaacatttgcctttctgaagaaggaaccatcttcaacaaagaggagacagcctgaaagggaagagaagattgtagtggttgacatctcagattgtgaagcctcctgtcctccagcaccagagttattttcaccacctgtcccagaaatagctgaaactgtcacacaaacacagccagtcaggttgctaagcagtgaaagtgaagatgaagaagaatttattcctctggctcaaaggcttacatgtaagtttctgacccacaagcaactgagccctgaggactctagctccccagttaaaagtgttttggatcatcaaaataatgaaggtgcatcatgtgactggaaaaagccctttccaaagatccctgaagttcccctccatgataccccagagaggagtgcagcagataacaaggacctgatcttagatccatgctgtcagcttccagcctacctgtctacctgccctggccagagcagcagcttggcagtaaccaaaacaaattctgacatccttccaccccagaagaaaaccaagccgagtcagaaggtccagggaagaggctcacacggatgccggcagcagagacaagcaaggcagaaggaaagcaccctgagaagacaggaaagaaagaatgcagcactggttaccaggatgaaagcccagaggccagaggaatgcttaaaacacatcattgtagtgctggatccagtgctcttacagatggaaggtgggggccagctcctaggagcactgcagaccatggagtgccgctgtgtgattgaggcgcaggctgtgccttgcagtgtcacttggaggagaagggctgggccgtctgaggacagagaggactgggtggaggagccaacagtactggtgttgctccgggcagaggcatttgtgtccatgatcgacaatggaaagcagggaagcctggacagcactatgaaagggaaggaaacgcttcagggctttgtaactgacatcacagcaaagacagcagggaaagctctgtcactggtgattgtggatcaggagaaatgcttcagcctggagctgctgttctttgatttcctcccctgcaccagtgctcagaatcctccaagaagagggaaacagggagcaaataaacagaccaagaagcagcagcagagacaaccagaggccagcatagggtccatggtatccagggtagacgctgaagaggcattggtggatctgcagctacacacagaagcccaggctcaaattgtgcagagctggaaagagctggccgacttcacatgcgcattcacaaaggctgtggctgaggcgcccttcaagaagctccgagatgaaactaccttctccttctgtctggagagtgactgggctggaggggtgaaggtggaccttgctggcaggggactcgcactagtctggaggagacagattcagcagctgaaccgagtcagcctggaaatggccagtgcagttgtgaatgcctatccctccccacagctcctggtacaggcttatcagcagtgtttttcggataaagaacgccagaatttgctcgcagacatacaggtgcgccgtggggaaggtgtgacatccacttctcgccgcattggaccagaactatccaggcgtatctaccttcagatgaccactttacagccacatctctctttagatagtgctgactgattctagccctcagggatgaggatgaaaagctggaaacttccacttccccaacctcagagcctgactgtaatgaagagactggcagcacctcctggaacacaagcctaggtgaggcccagtctttcttgggtcttattatttgtgaaggtctctctgcctgtcggctggggcagagactgaaatactgccacctacctttggcatttaatgttcctctcctggcaaaaattcactgccacagacaaaccacccccactcctacccagccagccctcaaaacacaaaggaacaaagacagtccactcagacacttatttaataactgtagaaatccaaaagaattagcatcaaatcttgaagtcgtgagtgaagctgcgggttggcttgactgggctcagccactgagctgcctcaaccggccaaggaacgggattatgatgactatgcggacttctatattgtcttcatctcattgtgtgtattatgtatttagtttcaataaagcatttgtaccaatggc

SEQ ID NO: 130661 - DNA, 2296 bp, Homo sapiens
  Payload ID: 5546
  Gene Symbol: EME1
  Gene Name: essential meiotic structure-specific endonuclease 1
  Uniprot ID: Q96AY2
  ENST ID: ENST00000511648
  CDS Start-End: 25-1776
ggaattatttgatagcacatactgatggctctaaagaagtcatcaccctcactggattctggtgatagtgactctgaggagttgccaacatttgcctttctgaagaaggaaccatcttcaacaaagaggagacagcctgaaagggaagagaagattgtagtggttgacatctcagattgtgaagcctcctgtcctccagcaccagagttattttcaccacctgtcccagaaatagctgaaactgtcacacaaacacagccagtcaggttgctaagcagtgaaagtgaagatgaagaagaatttattcctctggctcaaaggcttacatgtaagtttctgacccacaagcaactgagccctgaggactctagctccccagttaaaagtgttttggatcatcaaaataatgaaggtgcatcatgtgactggaaaaagccctttccaaagatccctgaagttcccctccatgataccccagagaggagtgcagcagataacaaggacctgatcttagatccatgctgtcagcttccagcctacctgtctacctgccctggccagagcagcagcttggcagtaaccaaaacaaattctgacatccttccaccccagaagaaaaccaagccgagtcagaaggtccagggaagaggctcacacggatgccggcagcagagacaagcaaggcagaaggaaagcaccctgagaagacaggaaagaaagaatgcagcactggttaccaggatgaaagcccagaggccagaggaatgcttaaaacacatcattgtagtgctggatccagtgctcttacagatggaaggtgggggccagctcctaggagcactgcagaccatggagtgccgctgtgtgattgaggcgcaggctgtgccttgcagtgtcacttggaggagaagggctgggccgtctgaggacagagaggactgggtggaggagccaacagtactggtgttgctccgggcagaggcatttgtgtccatgatcgacaatggaaagcagggaagcctggacagcactatgaaagggaaggaaacgcttcagggctttgtaactgacatcacagcaaagacagcagggaaagctctgtcactggtgattgtggatcaggagaaatgcttcagcctggagctgctgttctttgatttcctcccctgcaccagtgctcagaatcctccaagaagagggaaacagggagcaaataaacagaccaagaagcagcagcagagacaaccagaggccagcatagggtccatggtatccagggtagacgctgaagaggcattggtggatctgcagctacacacagaagcccaggctcaaattgtgcagagctggaaagagctggccgacttcacatgcgcattcacaaaggctgtggctgaggcgcccttcaagaagctccgagatgaaactaccttctccttctgtctggagagtgactgggctggaggggtgaaggtggaccttgctggcaggggactcgcactagtctggaggagacagattcagcagctgaaccgagtcagcctggaaatggccagtgcagttgtgaatgcctatccctccccacagctcctggtacaggcttatcagcagtgtttttcggataaagaacgccagaatttgctcgcagacatacaggtgcgccgtggggaaggtgtgacatccacttctcgccgcattggaccagaactatccaggcgtatctaccttcagatgaccactttacagccacatctctctttagatagtgctgactgattctagccctcagggatgaggatgaaaagctggaaacttccacttccccaacctcagagcctgactgtaatgaagagactggcagcacctcctggaacacaagcctaggtgaggcccagtctttcttgggtcttattatttgtgaaggtctctctgcctgtcggctggggcagagactgaaatactgccacctacctttggcatttaatgttcctctcctggcaaaaattcactgccacagacaaaccacccccactcctacccagccagccctcaaaacacaaaggaacaaagacagtccactcagacacttatttaataactgtagaaatccaaaagaattagcatcaaatcttgaagtcgtgagtgaagctgcgggttggcttgactgggctcagccactgagctgcctcaaccggccaaggaacgggattatgatgactatgcggacttctatattgtcttcatctcattgtgtgtattatgtatttagtttcaataaagcatttgtaccaatggc

SEQ ID NO: 130662 - DNA, 562 bp, Homo sapiens
  Payload ID: 5546
  Gene Symbol: EME1
  Gene Name: essential meiotic structure-specific endonuclease 1
  ENST ID: ENST00000511519
  CDS Start-End: 49-562
aaagagtggcgggagaagttgcagggaattatttgatagcacatactgatggctctaaagaagtcatcaccctcactggattctggtgatagtgactctgaggagttgccaacatttgcctttctgaagaaggaaccatcttcaacaaagaggagacagcctgaaagggaagagaagattgtagtggttgacatctcagattgtgaagcctcctgtcctccagcaccagagttattttcaccacctgtcccagaaatagctgaaactgtcacacaaacacagccagtcaggttgctaagcagtgaaagtgaagatgaagaagaatttattcctctggctcaaaggcttacattgctcttacagatggaaggtgggggccagctcctaggagcactgcagaccatggagtgccgctgtgtgattgaggcgcaggctgtgccttgcagtgtcacttggaggagaagggctgggccgtctgagagaggactgggtggaggagccaacagtactggtgttgctccgggcagaggcatttgtgtccatgatcgacaatggaaagcag

SEQ ID NO: 130663 - DNA, 1010 bp, Homo sapiens
  Payload ID: 5546
  Gene Symbol: EME1
  Gene Name: essential meiotic structure-specific endonuclease 1
  ENST ID: ENST00000510246
  CDS Start-End: 1-1010
cctgatcttagatccatgctgtcagcttccagcctacctgtctacctgccctggccagagcagcagcttggcagtaaccaaaacaaattctgacatccttccaccccagaagaaaaccaagccgagtcagaaggtccagggaagaggctcacacggatgccggcagcagagacaagcaaggcagaaggaaagcaccctgagaagacaggaaagaaagaatgcagcactggttaccaggatgaaagcccagaggccagaggaatgcttaaaacacatcattgtagtgctggatccagtgctcttacagatggaaggtgggggccagctcctaggagcactgcagaccatggagtgccgctgtgtgattgaggcgcaggctgtgccttgcagtgtcacttggaggagaagggctgggccgtctgagggaagcctggacagcactatgaaagggaaggaaacgcttcagggctttgtaactgacatcacagcaaagacagcagggaaagctctgtcactggtgattgtggatcaggagaaatgcttcagtgctcagaatcctccaagaagagggaaacagggagcaaataaacagaccaagaagcagcagcagagacaaccagaggccagcatagggtccatggtatccagggtagacgctgaagaggcattggtggatctgcagctacacacagaagcccaggctcaaattgtgcagagctggaaagagctggccgacttcacatgcgcattcacaaaggctgtggctgaggcgcccttcaagaagctccgagatgaaactaccttctccttctgtctggagagtgactgggctggaggggtgaaggtggaccttgctggcaggggactcgcactagtctggaggagacagattcagcagctgaaccgagtcagcctggaaatggccagtgcagttgtgaatgcctatccctccccacagctcctggtacaggcttatcagcagtgtttttcggataaagaacgccagaatt

SEQ ID NO: 130664 - DNA, 679 bp, Homo sapiens
  Payload ID: 5546
  Gene Symbol: EME1
  Gene Name: essential meiotic structure-specific endonuclease 1
  ENST ID: ENST00000511711
  CDS Start-End: 61-366
gcgtggcagttgaaagagtggcgggagaagttgcagggaattatttgatagcacatactgatggctctaaagaagtcatcaccctcactggattctggtgatagtgactctgaggagttgccaacatttgcctttctgaagaaggaaccatcttcaacaaagaggagacagcctgaaagggaagagaagattgtagtggttgacatctcagattgtgaagcctcctgtcctccagcaccagagttattttcaccacctgtcccagaaatagctgaaactgtcacacaaacacagccagtcaggttgctaagcagtgaaagtgaagatgaagaagaatttattcctctggctcaaaggcttacataagaaaaccaagccgagtcagaaggtccagggaagaggctcacacggatgccggcagcagagacaagcaaggcagaaggaaagcaccctgagaagacaggaaagaaagaatgcagcactggttaccaggatgaaagcccagaggccagaggaatgcttaaaacacatcattgtagtgctggatccagtgctcttacagatggaaggtgggggccagctcctaggagcactgcagaccatggagtgccgctgtgtgattgaggcgcaggctgtgccttgcagtgtcacttggaggagaagggctgggccgtctgag

SEQ ID NO: 130665 - DNA, 549 bp, Homo sapiens
  Payload ID: 5547
  Gene Symbol: EME2
  Gene Name: essential meiotic structure-specific endonuclease subunit 2
  ENST ID: ENST00000564182
  CDS Start-End: 1-346
ccaggccttctccttctgcacagcagggcgctgggcagccggcgagccagtggcaagagacggcgcagggctgcaggcggcctggcggaggcagatcaggcagttcagtcgggtcagcccagccgtggctgatgcagttgtcacagccttcccctccccccgccttctgcagcaggcgctggaggcctgcagcacggagcgggagcgcatgggcctcctggccgaccttcctgtgccgcccagtgaaggcgggcgtccccgcagggtggggcctgacctctcccgccgcatctgcctcttcctgaccacagccaaccctgatctcctgctggacctgggctcctgaccacacgtgggaccaccaggacagcatgcagccttggggacagaccagacaccctgggcggtgggggaggacccccagccacatgtggaccctcagcctggcctcccacaagacctggggctcagggcagccgcttccccacccagcacagcagcagaggggccctagagcccccacagaaaggactgtcccagcctcgggag

SEQ ID NO: 130666 - DNA, 1234 bp, Homo sapiens
  Payload ID: 5547
  Gene Symbol: EME2
  Gene Name: essential meiotic structure-specific endonuclease subunit 2
  Uniprot ID: A4GXA9
  ENST ID: ENST00000568449
  CDS Start-End: 22-1161
gaggaagaggtcggtccggccatggcgcgggttggacccgggagggcgggggtctcttgccagggccggggccggggacggggcgggagcggtcagcggcgacctccaacctgggagatctcagactccgacgctgaggactccgccggctcggaggccgccgcgagagcccgggacccagcgggtgagcgcagggcggctgccgaggcgttgcggctgctgcggccggagcaggtcctgaagcgcctcgcggtgtgcgtggacacagccatcctggaagacgccggtgccgacgtcctgatggaggccctggaggccctgggctgcgagtgccgcatcgagccccagcgcccggcccgcagcctgcggtggacccgagcgagtcccgacccctgcccccgcagcctgcctcctgaagtgtgggctgcaggtgaacaggaattgctgctgctgctggagcccgaggagtttctgcagggcgtcgccacactgacccagatctctggcccaacccactgggtgccctggatctcccccgagaccaccgcccggccccacctggctgtcatcgggctggatgcctacctgtggtctcgccagcacgtttcccgggggacacagcagccagagagcccgaaggtggccggtgccgaggtggccgtcagctggccggaggtggaagaggccctggtactcctgcagctctgggcaaacctggacgtgctactggtggcctcttggcaggagctgagtcggcacgtgtgcgccgttaccaaggctctcgcccagtatcccctcaagcagtaccgggaatcccaggccttctccttctgcacagcagggcgctgggcagccggcgagccagtggcaagagacggcgcagggctgcaggcggcctggcggaggcagatcaggcagttcagtcgggtcagcccagccgtggctgatgcagttgtcacagccttcccctccccccgccttctgcagcaggcgctggaggcctgcagcacggagcgggagcgcatgggcctcctggccgaccttcctgtgccgcccagtgaaggcgggcgtccccgcagggtggggcctgacctctcccgccgcatctgcctcttcctgaccacagccaaccctgatctcctgctggacctgggctcctgaccacacgtgggaccaccaggacagcatgcagccttggggacagaccagacaccctgggcggtgggggaggacc

SEQ ID NO: 130667 - DNA, 4586 bp, Homo sapiens
  Payload ID: 5547
  Gene Symbol: EME2
  Gene Name: essential meiotic structure-specific endonuclease subunit 2
  ENST ID: ENST00000561903
  CDS Start-End: 1-571
gtctcgccagcacgtttcccgggggacacagcagccagagagcccgaaggtggccggtgccgaggtggccgtcagctggccggaggtggaagaggccctggtactcctgcagctctgggcaaacctggacgtgctactggtggcctcttggcaggagctgagtcggcacgtgtgcgccgttaccaaggctctcgcccagtatcccctcaagcagtaccgggaatcccaggccttctccttctgcacagcagggcgctgggcagccggcgagccagtggcaagagacggcgcagggctgcaggcggcctggcggaggcagatcaggcagttcagtcgggtcagcccagccgtggctgatgcagttgtcacagccttcccctccccccgccttctgcagcaggcgctggaggcctgcagcacggagcgggagcgcatgggcctcctggccgaccttcctgtgccgcccagtgaaggcgggcgtccccgcagggtggggcctgacctctcccgccgcatctgcctcttcctgaccacagccaaccctgatctcctgctggacctgggctcctgaccacacgtgggaccaccaggacagcatgcagccttggggacagaccagacaccctgggcggtgggggaggacccccagccacatgtggaccctcagcctggtcctttaagtctatgacggcggggcagccgctgacagcatgcagagcaagttaggaaaaaccgaggccctgtgggaacagcaacgcgggctccagccaggctctcgtcctcgcagcctcccacaagacctggggctcagggcagccgcttccccacccagcacagcagcagaggggccctagagcccccacagaaaggactgtcccagcctcgggagcaagagatggctccctccggacgggcctcatccaactccgccctggagtgtggctggaaggaagggacagagaaagaagggacagaggaaaggggctgtcccagcccaagaaggcagttccactgggaagtcagtcaggtccggcggcagcgcttcctctggcagggccgaggctcgcgactgctggggtgggcggaggtcgctgcctggggatcggacactggagccttgcggcggctgcaactcatgctcaggacccagcccagcttgttgtgtagcacctgcttgaggcccggcggcagcggcagaccctccagcgtgtctcccgagtctggccgcagctggcgcaggcggtggcagcacaggtactggagggaagtggcgctggcacaggagcgggtgaccttcatgctgctccgggccgccgtggagcacaccatcggcggcagtccctgccccggtgggccgagtgcaggctgctacagaaggaggcctcgctctgcccagcacagtcacagaaggactcgccggtcacgggcaccgcactggggatggatggcggcagcgtggagtactcggggtcggagtccgagtcgctgtgctgggagagaagggccggctgttactacctgttgcccgctctctaccctctcacccttgccctctgtccctgtcccaccctgtccctgacccacccaggaaaggatgggggtccaggcctccagggacttcacagtaccccgagcgcacagcccaggctccctcccaacgggctccggctctgccccattctgcatgaccaggagggccctggaggcccagccacagagcagtagccaaggctgcctggcctccaagtggtttctagacggtggataagccccaggtccaccccacctgcccagagctgagatggtgtggacaccttccctgctaggccagccctgcaggggcccccaggcaaggccaccacccccacaccaggcccagctgcagccacccggcctcagggcagtccccaccacactgtggcccaacgaccttcctgttacctgagcagacctggctcaccacagggtcctactgcccagtgcccactacaggccccgcccctcctggtgcaggtttcagctgtcacctccctgaggcttctccagccccttcacccctgttccatttttcttcttttgcttcactgaagttctccttggtcctgattcttggcctcctcccaccagaacgtgagctccttgtgggaggcagtgcccctcccagcctcctccctgtcacagactgtgtgggggccacccaggggctgaatggaccagggggtcagcagggagagtgctaagtggtggcggggggcctgtggcagaggccttgtgacagtgagggttgagggctggtccagagagatgatgtgatccccaggagaagccacaggggaccatgacatgggcgccaccagcttccaggtgaacgtggacctatcgaaagccagcttcagggcaggacactgtcctttctggaggggatggccccaccccacagacaaggcaggcccagacaactctaccccactgcctagaagtgcgggtccccagagccagggtagaccccctgagtcaggagcccgggcacagaactgagcacctgcactgcaggcccagggccgggttccctggagaaggagaaagactgaagccactgcctacctcctgcccacaacagactgcaggcccatttggtgacacaggacaagcagcacatgtgtcgaacactgccgagcccgcaggcacgcctgcatcccacagccacgagcctgtgaggctcaggcatgtgacctgcaggagctggaggcgggcgggaaggcaggtgggggcctctccctggctggagcagggagctccaggagacctcaggacggcccccacccggtgggtaaggaccctgtttcccaatttgcccccaaggcctaatggacccaccgggcttagggagtcctcactcagaggagaggagcccacccctcccaggacacctggctgagccggaacagcagcgcaggggagctgtgacagcagagagcagcaccaggtcacacaagcagccgccccggaaggacacggcccatggtgacagaggacaagcagcatgcgtgtgtcagacactggcctggcctgtggacacgcccgcgtcccacagccatgaccctgcgaggccaggagagactgctccagggcacatgacctgtggtagctggaagtggggcagggaggcgcagccacactcctgctctggtccgagggagatctcaggaaaccgactgggaaatcaccccccacagggacccccacccctcccagcctcactgcgcccgtcaggccaggcagctgccctcagggtctgccaaggtgggggtcaggggccatgggggcaggtagctctgcctgcaaagcccacaagcatgtcagatcacctgggctgcagacagacaaacacctgagctgttctgaataccttcaggttcctggcctccctgagcaagtgcagaaatttttaccttcaaggatcagggtttttctgtttgtttgttttttaacacacatatatgtgaacaaagagtatgcgtttgtactggcagaagaagcgtctggtaagacaaccagcaagttaacaatggtcacctccagaaatgggctgggtaaaccaaagaatttttttgtttttgttttttttgagtcagggtctagctctgtcacccaggctggaacgcactggtgtgatcacggctcactgcagccttgacctccctggctcaagcaatcctcccagctcagcctcctgagtcgttgggactacaggcacgtgccaccacgcctgacacattttttaaatttttgtagagacagtgtttcaccatgttgcccaggcaggtctcaaactcctgggctcaagtggtcctccagcttcagcctcccaaagtgctaggattataggtgtgagccacagtgcccagccccgtagtggagaatttctgttgaatgaaccaaaagcaactgccaacctctccatgcaccatgtgtttcagaggagaaagcacagtgaagaatgcagtgtgttctgaggtcctgtcacccctgaggctgtgtgtgtcctttgccaaattaaagagtcttactgaatgcggtgcatccaggagacaggcccaggtttggactggtcctctagcctcagaagcatctttttctccgactgattccgtgttcaggtaatgtctgcctgcctgcctagggcatctccacaccttaggccagccacgtccgcctcgcccgctggaacctacctgcccatcagagtcgtagccccagttagtggagcctgctagagccacggcccgggcatctgcgtctcggcgggctgcactcaggacgaagtgccaggccctgctgttccgggggcgtctggccatggtggaaagaatctagaagaaaacacaggctctgggcaaaggaagactcacagcactcccagccctgagcttccaggctgggccacggacccactcaaagtggggactgcaggggccgcaccggtgcccagccagggctccagaacgcttcaggagcccgtacctcactccaggatctgagcagctcaataaaacccaggtagatcctgtgaaacgccacccaga

SEQ ID NO: 130668 - DNA, 4523 bp, Homo sapiens
  Payload ID: 5548
  Gene Symbol: ESCO1
  Gene Name: establishment of sister chromatid cohesion N-acetyltransferase 1
  Uniprot ID: Q5FWF5
  ENST ID: ENST00000269214
  CDS Start-End: 939-3461
gtttgcgccgcgggggaggcggcggccgcagcagaagcagctgagtgtctcctgatacccggatgtgaggcgatccgctggcgctagtctgaccctccgccaggcaaaaggaagattgtctttggctatagagtttttttttttaaagattactaaacatacaggaagtgataagaagtatcattcatcagaagcatcattcatcaatcaacttgaagaaaaaggtgatatattatttctttaaggtgctgtgtgatgtgttaagagcatattagaaggaatggttttgtctaattttcttcatgagttatggtggctgagacatcgagtctatattttggggcaaaaactaaacggcagcacaaaaggaaatctatattaatagaatattttgttgaacaaaggaggttagataagaactgcaaaccaacagactcagcaaacaaggaaagaaacgtgttagccataagacatgtttcaagtgaatcgaagtccaataactgtagacttcagaagaaaaaagttttcaaaaattttatcaaaacaggtcactgataaataactcctccagtaatagagctaggcctgaaaccaaaattaattaaaaaattaacaaaacagattgaacctgaattaaatttcttttgataaaaaaacttattaaaaataatcaaaattttcctcaaatttttattaccttgtccaaagtaaagcaagtgtcttttagcattcatgccagcttttctcatgttctaggaatgacagaaaccttacttgaagcaaactagtatttttgttgaaaatgtatatcagcatcagttaaagttgatttttcagacctgctcctcagtaataatactagctagtcagcattcacgcctaccaggacacaaaaatcctcttcaaaactactcagaaaagaaagtcattactcaggaatgatgtccattcaggagaaatcaaaagagaattcctccaaagttactaaaaaaagtgacgataagaattcagaaacagaaattcaggattctcaaaagaatctagcaaaaaaatcaggtccaaaggagactataaaatcacaggctaaatcttccagtgaaagtaaaataaatcagccagaattggaaacacgcatgagtacaaggtcatcaaaggcagcatctaatgataaagctactaaatccattaataaaaatacggtgactgtgaggggatattcacaagaatctacaaaaaagaaattatctcagaaaaaattagtacatgaaaaccctaaagcaaatgaacagcttaaccggagatcacaaaggctacaacaattaacagaggtttcaagaaggtcgttacgcagtagagaaattcagggtcaagttcaagcagttaaacagagtttgccaccaactaaaaaagagcagtgtagcagtactcagagtaaatctaataaaacaagtcaaaaacatgtgaagagaaaagtactggaagtaaagtctgactctaaagaagatgaaaatctagtaattaatgaagtaataaattctcccaaagggaaaaaacgcaaggtagaacatcagacagcttgtgcttgtagttctcaatgcacgcaaggatctgaaaagtgtcctcagaagactactagaagagacgaaacgaaacctgtgcctgtaacttctgaggtgaaaagatcaaaaatggctacttcagtggtcccgaaaaagaatgagatgaagaagtcggttcatacacaagtgaatactaacacaacactcccaaaaagtccacagccatcagtgcctgaacaaagtgataatgagctggagcaagcaggaaagagcaaacgaggtagtattctccagctctgtgaagaaattgctggtgaaattgagtcagataatgtagaggtaaaaaaggaatcttcacaaatggaaagtgtaaaggaagaaaagcccacagaaataaaattggaagagaccagtgttgaaagacaaatacttcatcagaaggaaacaaatcaggatgtgcaatgtaatcgttttttcccaagtagaaaaacaaagcctgtgaaatgtatactaaatggaataaacagctcagccaagaagaactccaactggactaaaattaaactctcaaaatttaactctgtgcagcacaataagttggactctcaagtttcccctaaattaggcttattacgaaccagtttttcaccaccagctttagaaatgcatcatccagtgactcaaagtacgtttttagggacaaagctacatgatagaaatataacttgccagcaggaaaaaatgaaagaaattaattctgaagaagtgaaaattaatgatattacagtagaaattaataaaaccacagaaagggctcctgaaaattgtcatttggccaatgagataaaaccttctgacccaccattggataatcagatgaaacattcttttgattcagcatcaaataagaatttcagccaatgtttggaatccaagctagaaaacagtccagtggaaaatgttactgctgcttcgactctgctcagtcaagcaaaaattgatacaggagagaataaatttccaggttcagctccccaacagcatagtattctcagtaaccagacatctaaaagcagtgataacagggagacaccacgaaatcattctttgcctaagtgtaattcccatttggagataacaattccaaaggacttgaaactaaaagaagcagagaaaactgatgaaaaacagttgattatagatgcaggacaaaaaagatttggagcagtttcttgtaatgtttgtggaatgctgtatacagcttcaaatccagaagatgaaacacagcatctgcttttccacaaccagtttataagtgctgttaaatatgtgggctggaagaaagaaagaattctggctgaataccctgatggcaggataataatggttcttcctgaagacccaaagtatgccctgaaaaaggttgacgagattagagagatggttgacaatgatttaggttttcaacaggctccactaatgtgctattccagaactaaaacacttctcttcatttccaatgacaaaaaagtagttggctgcctaattgcggaacatatccaatggggctacagagttatagaagagaaacttccagttatcaggtcagaagaagaaaaagtcagatttgaaaggcaaaaagcctggtgctgctcaacattaccagagcctgcaatctgcgggatcagtcgaatatgggtattcagcatgatgcgtcggaagaaaattgcttctcgcatgattgaatgcctaaggagtaactttatatatggctcatatttgagcaaagaagaaattgctttctcagatcccactcctgatggaaagctgtttgcaacacagtactgtggcactggtcaatttctggtatataattttattaatggacagaatagcacgtaaaacaaattcttgcctacaccactagaagacatctattgaagagaatggattggttgctgactttaaccaggaactagggccatttttattacaatgaactcaggactggcaacaaccatatggttgttccattttcataaaattggaaacaatgcagtaatagcttattgttttgttttttaaagaagatattttattatcttttacagaaatttatgattgatgtattttatctatagttatttagacatgtttacatgcagcagataattgttcatagtggactgaaaactaatgcaaggactatggtctcagtgataagtatattttgaagttcttaatatggaaatataccagtgtagcttggtactgtatttttttatattgatctgctgataccagtgataggcttaaagattgtattttcacagagtggaaaccaatttttttagttattgttcaaggagggtgcaatattaagtgttttggaatttgaagctaatttttaaaaggcctgaactatactttgaagaaacccctatagaaaaggaaagctccagctaaataggaagaattagaatattgagcttttttttcctgatttttctctttcctatctttgatggaaggaggaagtagaaagtggtaaagaattgaggctttccttcttggagagctgtaaatgacaagcattaggaaaggtaccctcctagattcattattctttcattctggtttcacttttaaaataaatggcaacttggcacacctaggctgttaacaaatctcaaagaggtttataaaaacgtatagaatacttggaagcaaagtatggatgactcggtatctgctttgttattcctcagaaatactgcactgagtatatgccctcattactggacttcattttgatacttgtctatccttcatagtgccctctacttttaaagggtttatatgttgaaaaactgctgtggccttttatgacctgtatataatgtagaataaaaataataaaatacttgatagctttttctaagtgaccaatgtactaactgagaa

SEQ ID NO: 130669 - DNA, 4773 bp, Homo sapiens
  Payload ID: 5548
  Gene Symbol: ESCO1
  Gene Name: establishment of sister chromatid cohesion N-acetyltransferase 1
  Uniprot ID: Q5FWF5
  ENST ID: ENST00000383276
  CDS Start-End: 1087-3192
agtgagcgtggcggccatcttcgtcttctgggcacgtcagctgagccggttagggctgaagaggagcgttgcgcaagcgcacccaagacggtcacaggtaactcccatctgacgagcgaggcgtcgccgtcgtcgccggaagtttggtgtttgcgccgcgggggaggcggcggccgcagcagaagcagctgagtgtctcctgatacccggatgtgaggcgatccgctggcgctagtctgaccctccgccaggcaaaaggaagattgtctttggctatagagtttttttttttaaagattactaaacatacaggaagtgataagaagtatcattcatcagaagcatcattcatcaatcaacttgaagaaaaaggtgatatattatttctttaaggtgctgtgtgatgtgttaagagcatattagaaggaatggttttgtctaattttcttcatgagttatggtggctgagacatcgagtctatattttggggcaaaaactaaacggcagcacaaaaggaaatctatattaatagaatattttgttgaacaaaggaggttagataagaactgcaaaccaacagactcagcaaacaaggaaagaaacgtgttagccataagacatgtttcaagtgaatcgaagtccaataactgtagacttcagaagaaaaaagttttcaaaaattttatcaaaacaggtcactgataaataactcctccagtaatagagctaggcctgaaaccaaaattaattaaaaaattaacaaaacagattgaacctgaattaaatttcttttgataaaaaaacttattaaaaataatcaaaattttcctcaaatttttattaccttgtccaaagtaaagcaagtgtcttttagcattcatgccagcttttctcatgttctaggaatgacagaaaccttacttgaagcaaactagtatttttgttgaaaatgtatatcagcatcagttaaagttgatttttcagacctgctcctcagtaataatactagctagtcagcattcacgcctaccaggacacaaaaatcctcttcaaaactactcagaaaagaaagtcattactcaggaatgatgtccattcaggagaaatcaaaagagaattcctccaaagttactaaaaaaagtgacgataagaattcagaaacagaaattcaggattctcaaaagaatctagcaaaaaaatcaggtccaaaggagactataaaatcacaggctaaatcttccagtgaaagtaaaataaatcagccagaattggaaacacgcatgagtacaaggtcatcaaaggcagcatctaatgataaagctactaaatccattaataaaaatacggtgactgtgaggggatattcacaagaatctacaaaaaagaaattatctcagaaaaaattagtacatgaaaaccctaaagcaaatgaacagcttaaccggagatcacaaaggctacaacaattaacagaggtttcaagaaggtcgttacgcagtagagaaattcagggtcaagttcaagcagttaaacagagtttgccaccaactaaaaaagagcagtgtagcagtactcagagtaaatctaataaaacaagtcaaaaacatgtgaagagaaaagtactggaagtaaagtctgactctaaagaagatgaaaatctagtaattaatgaagtaataaattctcccaaagggaaaaaacgcaaggtagaacatcagacagcttgtgcttgtagttctcaatgcacgcaaggatctgaaaagtgtcctcagaagactactagaagagacgaaacgaaacctgtgcctgtaacttctgaggtgaaaagatcaaaaatggctacttcagtggtcccgaaaaagaatgagatgaagaagtcggttcatacacaagtgaatactaacacaacactcccaaaaagtccacagccatcagtgcctgaacaaagtgataatgagctggagcaagcaggaaagagcaaacgaggtagtattctccagctctgtgaagaaattgctggtgaaattgagtcagataatgtagaggtaaaaaaggaatcttcacaaatggaaagtgtaaaggaagaaaagcccacagaaataaaattggaagagaccagtgttgaaagacaaatacttcatcagaaggaaacaaatcaggatgtgcaatgtaatcgttttttcccaagtagaaaaacaaagcctgtgaaatgtatactaaatggaataaacagctcagccaagaagaactccaactggactaaaattaaactctcaaaatttaactctgtgcagcacaataagttggactctcaagtttcccctaaattaggcttattacgaaccagtttttcaccaccagctttagaaatgcatcatccagtgactcaaagtacgtttttagggacaaagctacatgatagaaatataacttgccagcaggaaaaaatgaaagaaattaattctgaagaagtgaaaattaatgatattacagtagaaattaataaaaccacagaaagggctcctgaaaattgtcatttggccaatgagataaaaccttctgacccaccattggataatcagatgaaacattcttttgattcagcatcaaataagaatttcagccaatgtttggaatccaagctagaaaacagtccagtggaaaatgttactgctgcttcgactctgctcagtcaagcaaaaattgatacaggagagaataaatttccaggttcagctccccaacagcatagtattctcagtaaccagacatctaaaagcagtgataacagggagacaccacgaaatcattctttgcctaagtgtaattcccatttggagataacaattccaaaggacttgaaactaaaagaagcagagaaaactgatgaaaaacagttgattatagatgcaggacaaaaaagatttggagcagtttcttgtaatgtttgtggaatgctgtatacagcttcaaatccagaagatgaaacacagcatctgcttttccacaaccagtttataagtgctgttaaatatgtggttctgctcattaatcaccacgagtgtggatctgaagaagagtttattacctctctttttttgagtatgtttaacttcagatacacacaacgtagcttctccttccctattagattcttagaagggctggaagaaagaaagaattctggctgaataccctgatggcaggataataatggttcttcctgaagacccaaagtatgccctgaaaaaggttgacgagattagagagatggttgacaatgatttaggttttcaacaggctccactaatgtgctattccagaactaaaacacttctcttcatttccaatgacaaaaaagtagttggctgcctaattgcggaacatatccaatggggctacagagttatagaagagaaacttccagttatcaggtcagaagaagaaaaagtcagatttgaaaggcaaaaagcctggtgctgctcaacattaccagagcctgcaatctgcgggatcagtcgaatatgggtattcagcatgatgcgtcggaagaaaattgcttctcgcatgattgaatgcctaaggagtaactttatatatggctcatatttgagcaaagaagaaattgctttctcagatcccactcctgatggaaagctgtttgcaacacagtactgtggcactggtcaatttctggtatataattttattaatggacagaatagcacgtaaaacaaattcttgcctacaccactagaagacatctattgaagagaatggattggttgctgactttaaccaggaactagggccatttttattacaatgaactcaggactggcaacaaccatatggttgttccattttcataaaattggaaacaatgcagtaatagcttattgttttgttttttaaagaagatattttattatcttttacagaaatttatgattgatgtattttatctatagttatttagacatgtttacatgcagcagataattgttcatagtggactgaaaactaatgcaaggactatggtctcagtgataagtatattttgaagttcttaatatggaaatataccagtgtagcttggtactgtatttttttatattgatctgctgataccagtgataggcttaaagattgtattttcacagagtggaaaccaatttttttagttattgttcaaggagggtgcaatattaagtgttttggaatttgaagctaatttttaaaaggcctgaactatactttgaagaaacccctatagaaaaggaaagctccagctaaataggaagaattagaatattgagcttttttttcctgatttttctctttcctatctttgatggaaggaggaagtagaaagtggtaaagaattgaggctttccttcttggagagctgtaaatgacaagcattaggaaaggtaccctcctagattcattattctttcattctggtttcacttttaaaataaatggcaacttggcacacctaggctgttaacaaatctcaaagaggtttataaaaacgtatagaatacttggaagcaaagtatggatgactcggtatctgctttgttattcctcagaaatactgcactgagtatatgccctcattactggacttcattttgatacttgtctatccttcatagtgccctctacttttaaagggtttatatgttgaaaaactgctgtggccttttatgacctgtatataatgtagaataaaaataataaaatacttgatagctttttctaag

SEQ ID NO: 130670 - DNA, 1850 bp, Homo sapiens
  Payload ID: 5548
  Gene Symbol: ESCO1
  Gene Name: establishment of sister chromatid cohesion N-acetyltransferase 1
  ENST ID: ENST00000622333
  CDS Start-End: 299-817
caaaaaagatttggagcagtttcttgtaatgtttgtggaatgctgtatacagcttcaaatccagaagatgaaacacagcatctgcttttccacaaccagtttataagtgctgttaaatatgtggttctgctcattaatcaccacgagtgtggatctgaagaagagtttattacctctctttttttgagtatgtttaacttcagatacacacaacgtagcttctccttccctattagattcttagaagggctggaagaaagaaagaattctggctgaataccctgatggcaggataataatggttcttcctgaagacccaaagtatgccctgaaaaaggttgacgagattagagagatggttgacaatgatttaggttttcaacaggctccactaatgtgctattccagaactaaaacacttctcttcatttccaatgacaaaaaagtagttggctgcctaattgcggaacatatccaatggggctacagagttatagaagagaaacttccagttatcaggtcagaagaagaaaaagtcagatttgaaaggcaaaaagcctggtgctgctcaacattaccagagcctgcaatctgcgggatcagtcgaatatgggtattcagcatgatgcgtcggaagaaaattgcttctcgcatgattgaatgcctaaggagtaactttatatatggctcatatttgagcaaagaagaaattgctttctcagatcccactcctgatggaaagctgtttgcaacacagtactgtggcactggtcaatttctggtatataattttattaatggacagaatagcacgtaaaacaaattcttgcctacaccactagaagacatctattgaagagaatggattggttgctgactttaaccaggaactagggccatttttattacaatgaactcaggactggcaacaaccatatggttgttccattttcataaaattggaaacaatgcagtaatagcttattgttttgttttttaaagaagatattttattatcttttacagaaatttatgattgatgtattttatctatagttatttagacatgtttacatgcagcagataattgttcatagtggactgaaaactaatgcaaggactatggtctcagtgataagtatattttgaagttcttaatatggaaatataccagtgtagcttggtactgtatttttttatattgatctgctgataccagtgataggcttaaagattgtattttcacagagtggaaaccaatttttttagttattgttcaaggagggtgcaatattaagtgttttggaatttgaagctaatttttaaaaggcctgaactatactttgaagaaacccctatagaaaaggaaagctccagctaaataggaagaattagaatattgagcttttttttcctgatttttctctttcctatctttgatggaaggaggaagtagaaagtggtaaagaattgaggctttccttcttggagagctgtaaatgacaagcattaggaaaggtaccctcctagattcattattctttcattctggtttcacttttaaaataaatggcaacttggcacacctaggctgttaacaaatctcaaagaggtttataaaaacgtatagaatacttggaagcaaagtatggatgactcggtatctgctttgttattcctcagaaatactgcactgagtatatgccctcattactggacttcattttgatacttgtctatccttcatagtgccctctacttttaaagggtttatatgttgaaaaactgctgtggccttttatgacctgtatataatgtagaataaaaataataaaatacttgatagcttt

SEQ ID NO: 130671 - DNA, 3922 bp, Homo sapiens
  Payload ID: 5549
  Gene Symbol: ESCO2
  Gene Name: establishment of sister chromatid cohesion N-acetyltransferase 2
  Uniprot ID: Q56NI9
  ENST ID: ENST00000305188
  CDS Start-End: 239-2044
agatttttcacctcaccagggcgcgagaatcttggaaacagccaccagggtgggcggggcaagggctggtgctccaccaatcaccgagccagcccctggaagcgctgagccgtggccaatcggaacgcagcggcttcctcctagcctggcgcgcgattatttgaagacgctcacggagcggctggctaggctgaggagagctcgccgggctctgaggcgcaggaattcaataaagaaaatggcagctcttactccaaggaagaggaagcaggattctttgaagtgtgacagccttttacacttcactgaaaatctgtttccatcacctaataaaaagcactgtttttatcaaaacagtgataaaaatgaagaaaacctgcattgctctcaacaagagcattttgttttaagtgcgctcaaaacaactgaaataaatagactgccatcagcaaatcaaggctcaccatttaaatctgcgctctccactgtatctttttacaaccaaaataagtggtacctcaatccactggagagaaagctgataaaagagagtagatctacttgtctaaaaactaatgatgaagataaatcttttcccattgtgacagaaaaaatgcaaggaaaaccagtctgctccaagaagaacaacaaaaaaccacagaagagtttaactgctaagtatcaaccaaagtatagacacatcaagcctgtatcaaggaattctagaaattccaagcaaaatcgagtgatctataagccaattgtggagaaggaaaataattgtcattcagctgaaaataattccaatgctcctcgggttctgagccaaaaaataaaaccacaagttacactccagggtggagcagcattttttgttagaaaaaaatcttctcttagaaaatcgtccctggaaaatgagccgtcactgggacgcacccaaaagagtaaatcagaagtcattgaagattctgatgtagagactgtcagtgaaaaaaaaacttttgcgacaaggcaagtgccaaagtgcttggtcctagaagagaaattgaaaattggactactgagtgcaagcagtaaaaataaagagaaattaataaaggattcatcagatgacagagtttcttcaaaggaacataaagttgataaaaatgaggctttttcttcagaggattctcttggtgagaataagacaatttctcctaagtccactgtctatccaatcttcagtgcatcttcagtcaattcaaaaagatctttaggtgaagaacagttttctgtgggatctgtcaacttcatgaaacagaccaatatccagaaaaatactaataccagagatacaagtaaaaaaacaaaagaccagctcatcatcgacgctggtcagaaacattttggggctactgtgtgcaagtcttgtggtatgatatatactgcttccaaccctgaagatgaaatgcagcatgtacagcatcaccacaggtttctggaaggaatcaaatatgtgggttggaagaaagaacgtgtagtagcagagttttgggatgggaaaatcgtgttggttctgccacatgatccaagctttgctatcaaaaaggtagaagatgtccaagaacttgttgataatgaattgggcttccagcaagttgttcctaaatgtccaaacaaaataaaaacttttctttttatatctgatgaaaagagagtagttgggtgtttaattgcagaacccatcaaacaggcatttcgtgtcctgtctgaaccaattggtccagaatccccaagctctacggaatgtcctagggcttggcaatgttcagatgtaccagaacctgcagtctgtgggataagtagaatctgggttttcagactgaagagaagaaagcgcattgcaagacgactggttgataccctcaggaattgcttcatgtttggctgttttctcagcactgatgaaatagcattttctgacccaacaccagatggcaagttatttgcaaccaagtactgcaacacccctaatttcctcgtatataattttaatagttaaagctgatttcagttataaaggagttactatctggataagttcaaagagctccttattataaaatacaaactatttaatatcaaaataaaaaataccgagactcacactcatacacacacacacacacacgcacacacacatatcacagttttgttccttatgagttgaaaagtcaggaataaatttgttgaaaattatctggggattcaaaggaaaaatctttgggtgattccctgattagcactctgaatgtttaattatgaaactttgtagctataactggaaaattacctgactctttgtaagagtattaaatacaaagtgatttttctctagaaatgtgacctggtcttttataaagcccactcttagaccaggattatctaatgccacatcagaagcaaacaggcaaatttaaacttgggcaagtaatttctgtgcccaatttgtaaagggaattcctgaatttttttttttttttaatagaggcatgggtctcactgtgttgcccaggctggtctgaaacttttgggctcaagcgatcctcccaaaacgctgggattacagtcatgagccaccgtgcccagcctaattcctgacttctctatacagagtcttcacttgataggcactcgtctgtagtaactcagtttgaatatctttagaaaatgtttagaatttatttgtaacaagatggtaaggaataagattatcccatatgcatttctgtagagcagaatttgatagcttagtgttcaatctttttgaaaataaatgtttacctgtcatcagatttaattaaaattatacttagtaattgcactattacttagttaatttttgttgtatggaaatattggtagtactactttgggaacctgttactgacaattgatgtcattaacaaaatgcctagttggattagatgttttcattttctaattttttgcttgtttaaaatgcaccttacttgttctgagatacctggcaaaagtctttacaaaatgtatggtaatagaaccaaggttagtaaatatacataggctggtggatgagagaccatggaactgtgtaaatacacttaaatgttcacacatttttctagtgtaattcttggatactttaaaaagcaaaacattgttcaaattgttttgattctgaaaaatcattcaactgctaactggcaataagactctaggcaagtcgttttccagattgtaattatatgtagaaactattcatctgcattcattttatttgcctgtaagttaacatgtttccaaaatttaaaagcctgggtccccaaaagaatgtggaagtattaaaatgtatgtaattatgcaaacattttaatgctattttctgcacttatttcttttaaatattttatttaaaatttttaattaacattttgtttgcttaatgcttttgttatgaatcaattaaaattctttattttatacaactaaatctgattttaattattttattatgaaaatagtatatgttaaataaaattcagataatacagaaatagagattgccaaaagaagaggcttcccggccgggcgcggtggctcacgcctgtaatcccagcactttgggaggccgaggcgggtggatcatgaggtcaggagatcgagaccatcctggctaacaaggtgaaaccccgtctctactaaaaatacaaaaaattagccgggcgcggtggcgggcgcctgtagtcccagctactcgggaggctgaggcaggagaatggcgtgaacccgggaggcgagcttgcagtgagccgagattgcgccactgcagtccgcagtccggcctgggcgacagagcgagactccgtctcaaaaaaaaaaaaaaaaaaaaaaaaaaaaa

SEQ ID NO: 130672 - DNA, 720 bp, Homo sapiens
  Payload ID: 5549
  Gene Symbol: ESCO2
  Gene Name: establishment of sister chromatid cohesion N-acetyltransferase 2
  Uniprot ID: Q56NI9
  ENST ID: ENST00000397418
  CDS Start-End: 1-720
atgaaacagaccaatatccagaaaaatactaataccagagatacaagtaaaaaaacaaaagaccagctcatcatcgacgctggtcagaaacattttggggctactgtgtgcaagtcttgtggtatgatatatactgcttccaaccctgaagatgaaatgcagcatgtacagcatcaccacaggtttctggaaggaatcaaatatgtgggttggaagaaagaacgtgtagtagcagagttttgggatgggaaaatcgtgttggttctgccacatgatccaagctttgctatcaaaaaggtagaagatgtccaagaacttgttgataatgaattgggcttccagcaagttgttcctaaatgtccaaacaaaataaaaacttttctttttatatctgatgaaaagagagtagttgggtgtttaattgcagaacccatcaaacaggcatttcgtgtcctgtctgaaccaattggtccagaatccccaagctctacggaatgtcctagggcttggcaatgttcagatgtaccagaacctgcagtctgtgggataagtagaatctgggttttcagactgaagagaagaaagcgcattgcaagacgactggttgataccctcaggaattgcttcatgtttggctgttttctcagcactgatgaaatagcattttctgacccaacaccagatgattgtagaagattaaataggtaccaggagacatga

SEQ ID NO: 130673 - DNA, 574 bp, Homo sapiens
  Payload ID: 5549
  Gene Symbol: ESCO2
  Gene Name: establishment of sister chromatid cohesion N-acetyltransferase 2
  ENST ID: ENST00000519637
  CDS Start-End: 176-574
gtggaacgtgggggcgaatgtcacggggaaagagcttttgctcggcgctcggcaggtccgcaggcccgagaccgaagaagccactgactcgttctccgcgctcacaggcgccgggtttccctcttcccgacgccggcgtttccttgttttgggtttagggaattcaataaagaaaatggcagctcttactccaaggaagaggaagcaggattctttgaagtgtgacagccttttacacttcactgaaaatctgtttccatcacctaataaaaagcactgtttttatcaaaacagtgataaaaatgaagaaaacctgcattgctctcaacaagagcattttgttttaagtgcgctcaaaacaactgaaataaatagactgccatcagcaaatcaaggctcaccatttaaatctgcgctctccactgtatctttttacaaccaaaataagtggtacctcaatccactggagagaaagctgataaaagagagtagatctacttgtctaaaaactaatgatgaagataaatcttttcccattgtgacagaaaaaatgcaaggaaaaccagtctgctcc

SEQ ID NO: 130674 - DNA, 698 bp, Homo sapiens
  Payload ID: 5549
  Gene Symbol: ESCO2
  Gene Name: establishment of sister chromatid cohesion N-acetyltransferase 2
  ENST ID: ENST00000523566
  CDS Start-End: 137-698
accataggtcacttctgagatctgggacatcaactgcccggagagtggctgggtggacatcccagggtctttttattgttttctgttgcatcccagaccctacaaccccttcctgaaagggaattcaataaagaaaatggcagctcttactccaaggaagaggaagcaggattctttgaagtgtgacagccttttacacttcactgaaaatctgtttccatcacctaataaaaagcactgtttttatcaaaacagtgataaaaatgaagaaaacctgcattgctctcaacaagagcattttgttttaagtgcgctcaaaacaactgaaataaatagactgccatcagcaaatcaaggctcaccatttaaatctgcgctctccactgtatctttttacaaccaaaataagtggtacctcaatccactggagagaaagctgataaaagagagtagatctacttgtctaaaaactaatgatgaagataaatcttttcccattgtgacagaaaaaatgcaaggaaaaccagtctgctccaagaagaacaacaaaaaaccacagaagagtttaactgctaagtatcaaccaaagtatagacacatcaagcctgtatcaaggaattctagaaattccaagcaaaatcgagtgatctataagccaattgtggagaaggaaaataattgtcattcagctgaaaata

SEQ ID NO: 130675 - DNA, 2503 bp, Homo sapiens
  Payload ID: 5549
  Gene Symbol: ESCO2
  Gene Name: establishment of sister chromatid cohesion N-acetyltransferase 2
  ENST ID: ENST00000522378
  CDS Start-End: 71-943
gctcacggagcggctggctaggctgaggagagctcgccgggctctgaggcgcaggaattcaataaagaaaatggcagctcttactccaaggaagaggaagcaggattctttgaagtgtgacagccttttacacttcactgaaaatctgtttccatcacctaataaaaagcactgtttttatcaaaacagtgataaaaatgaagaaaacctgcattgctctcaacaagagcattttgttttaagtgcgctcaaaacaactgaaataaatagactgccatcagcaaatcaaggctcaccatttaaatctgcgctctccactgtatctttttacaaccaaaataagtggtacctcaatccactggagagaaagctgataaaagagagtagatctacttgtctaaaaactaatgatgaagataaatcttttcccattgtgacagaaaaaatgcaaggaaaaccagtctgctccaagaagaacaacaaaaaaccacagaagagtttaactgctaagtatcaaccaaagtatagacacatcaagcctgtatcaaggaattctagaaattccaagcaaaatcgagtgatctataagccaattgtggagaaggaaaataattgtcattcagctgaaaataattccaatgctcctcgggttctgagccaaaaaataaaaccacaagttacactccagggtggagcagcattttttgttagaaaaaaatcttctcttagaaaatcgtccctggaaaatgagccgtcactgggacgcacccaaaagagtaaatcagaagtcattgaagattctgatgtagagactgtcagtgaaaaaaaaacttttgcgacaaggcaagtgccaaagtgcttggtcctagaagagaaattgaaaattggactactgagtgcaagcagtaaaaataaagagaaattaataaagatctttaggtgaagaacagttttctgtgggatctgtcaacttcatgaaacagaccaatatccagaaaaatactaataccagagatacaagtaaaaaaacaaaagaccagctcatcatcgacgctggtcagaaacattttggggctactgtgtgcaagtcttgtggtatgatatatactgcttccaaccctgaagatgaaatgcagcatgtacagcatcaccacaggtttctggaaggaatcaaatatgtgggttggaagaaagaacgtgtagtagcagagttttgggatgggaaaatcgtgttggttctgccacatgatccaagctttgctatcaaaaaggtagaagatgtccaagaacttgttgataatgaattgggcttccagcaagttgttcctaaatgtccaaacaaaataaaaacttttctttttatatctgatgaaaagagagtagttgggtgtttaattgcagaacccatcaaacaggcatttcgtgtcctgtctgaaccaattggtccagaatccccaagctctacggaatgtcctagggcttggcaatgttcagatgtaccagaacctgcagtctgtgggataagtagaatctgggttttcagactgaagagaagaaagcgcattgcaagacgactggttgataccctcaggaattgcttcatgtttggctgttttctcagcactgatgaaatagcattttctgacccaacaccagatgattgtagaagattaaataggtaccaggagacatgaaagaatcatcttcaacatttctcaagtagctgctgattatctccttttatggaggcataacaagctcctggaggcttctacagattctaaagggaaagatttcctgggaggttggtaaatattcaagaagctggtcagttggcagctgttttatagattccttgggattttctacctaaacaacatatcaactgcaaacggggacagtttcgtctcctttccaattttgccttctccattttcttgccttattttagtggctagggctataggactgctaaataaaactggcaagagcaggcatcctggtcttgttccctacttcagtatgatacctgcaggtttttcttgtagacagcctttttcaagctaagatcccttctatttctagttagctgagaggttaactagattttaaactaacttttaaatcaagaatggatgttggattttgtcaaacactttttcggtatctattgagatatgtagttttcaaatttgattaaagacttaaatgttggacctaaaaccataaaaaccctagaagaaaacctaggcaataccattcaggacataggcatgggcaacgacttcatgattaaaacaccaaaagcaatggcagcaaaagccaaaacagacaaatgggatctaattaaagagcttctgcacagcaaaagaaagtaccatcaaagtgaacaggcaacctacagaatgggagaacatttttgcaatcgacctatctgacaaagggctaatatccagaatctacaaagaactcaaacaaatttacaagaaaaaaaaaaaaaaaa

SEQ ID NO: 130676 - DNA, 528 bp, Homo sapiens
  Payload ID: 5549
  Gene Symbol: ESCO2
  Gene Name: establishment of sister chromatid cohesion N-acetyltransferase 2
  ENST ID: ENST00000518262
  CDS Start-End: 1-528
caaaggaacataaagttgataaaaatgaggctttttcttcagaggattctcttggtgagaataagacaatttctcctaagtccactgtctatccaatcttcagtgcatcttcagtcaattcaaaaagatctttaggtgaagaacagttttctgtgggatctgtcaacttcatgaaacagaccaatatccagaaaaatactaataccagagatacaagtaaaaaaacaaaagaccagctcatcatcgacgctggtcagaaacattttggggctactgtgtgcaagtcttgtggtatgatatatactgcttccaaccctgaagatgaaatgcagcatgtacagcatcaccacaggtttctggaaggaatcaaatatgtgggttggaagaaagaacgtgtagtagcagagttttgggatgggaaaatcgtgttggttctgccacatgatccaagctttgctatcaaaaaggcatttcgtgtcctgtctgaaccaattggtccagaatccccaagctctacggaatgtccta

SEQ ID NO: 130677 - DNA, 1079 bp, Homo sapiens
  Payload ID: 5550
  Gene Symbol: ESD
  Gene Name: esterase D
  ENST ID: ENST00000378697
  CDS Start-End: 237-998
cgcttcttctggtcactccgccaccgtagaatcgcctaccatttggtgcaagcaaaaagcaatcagcaattggacaggaaaagaatggcattgaagcagatttccagcaacaagtgctttgggggattgcagaaagtttttgaacatgacaggagatagatctgagagtgtcccagctttatggactgcctcttcctaactctgggaaagattggagtgttgaactaaactgcaaaatgaaatttgctgtctacttaccaccaaaggcagaaacaggaaagtgccctgcactgtattggctctcaggtttaacttgcacagagcaaaattttatatcaaaatctggttatcatcagtctgcttcagaacatggtcttgttgtcattgctccagataccagccctcgtggctgcaatattaaaggtgaagatgagagctgggactttggcactggtgctggattttatgttgatgccactgaagatccttggaaaaccaactacagaatgtactcttatgtcacagaggagcttccccaactcataaatgccaattttccagtggatccccaaaggatgtctatttttggccactccatgggaggtcatggagctctgatctgtgctttgaaaaatcctggaaaatacaaatctgtgtcagcatttgctccaatttgcaaccctgtactctgtccctggggcaaaaaagcctttagtggatatttgggaacagatcaaagtaaatggaaggcttatgatgctacccaccttgtgaaatcctatccaggatctcagctggacatactaattgatcaagggaaagatgaccagtttcttttagatggacagttactccctgataacttcatagctgcctgtacagaaaagaaaatccccgttgtttttcgattgcaagagggttatgatcatagctactacttcattgcaacctttattactgaccacatcagacatcatgctaaatacctgaatgcatgaaaaaactccaaataagagaatctcttcaggattataaaagttgtaaaatgcaactgtattgctgagcaaaaaaaaaaaaaa

SEQ ID NO: 130678 - DNA, 1192 bp, Homo sapiens
  Payload ID: 5550
  Gene Symbol: ESD
  Gene Name: esterase D
  Uniprot ID: P10768
  ENST ID: ENST00000378720
  CDS Start-End: 184-1032
aaagcgagagtgagtgggaccggaggggcggggcatcatatgggcggggctgaggcgaggccccggcggccatcttgagccccgccttttacttcggcccgcttcttctggtcactccgccaccgtagaatcgcctaccatttggtgcaagcaaaaagcaatcagcaattggacaggaaaagaatggcattgaagcagatttccagcaacaagtgctttgggggattgcagaaagtttttgaacatgacagtgttgaactaaactgcaaaatgaaatttgctgtctacttaccaccaaaggcagaaacaggaaagtgccctgcactgtattggctctcaggtttaacttgcacagagcaaaattttatatcaaaatctggttatcatcagtctgcttcagaacatggtcttgttgtcattgctccagataccagccctcgtggctgcaatattaaaggtgaagatgagagctgggactttggcactggtgctggattttatgttgatgccactgaagatccttggaaaaccaactacagaatgtactcttatgtcacagaggagcttccccaactcataaatgccaattttccagtggatccccaaaggatgtctatttttggccactccatgggaggtcatggagctctgatctgtgctttgaaaaatcctggaaaatacaaatctgtgtcagcatttgctccaatttgcaaccctgtactctgtccctggggcaaaaaagcctttagtggatatttgggaacagatcaaagtaaatggaaggcttatgatgctacccaccttgtgaaatcctatccaggatctcagctggacatactaattgatcaagggaaagatgaccagtttcttttagatggacagttactccctgataacttcatagctgcctgtacagaaaagaaaatccccgttgtttttcgattgcaagagggttatgatcatagctactacttcattgcaacctttattactgaccacatcagacatcatgctaaatacctgaatgcatgaaaaaactccaaataagagaatctcttcaggattataaaagttgtaaaatgcaactgtattgctgagcaaaaaaaaaaaaaattcaaaacattggattttatagtgctaaaagggctttattctatagttgaatcacctctgaataaagatataaaaccta

SEQ ID NO: 130679 - DNA, 921 bp, Homo sapiens
  Payload ID: 5550
  Gene Symbol: ESD
  Gene Name: esterase D
  ENST ID: ENST00000412582
  CDS Start-End: 1-692
gtttaacttgcacagagcaaaattttatatcaaaatctggttatcatcagtctgcttcagaacatggtcttgttgtcattgctccagataccagccctcgtggctgcaatattaaaggtgaagatgagagctgggactttggcactggtgctggattttatgttgatgccactgaagatccttggaaaaccaactacagaatgtactcttatgtcacagaggagcttccccaactcataaatgccaattttccagtggatccccaaaggatgtctatttttggccactccatgggaggtcatggagctctgatctgtgctttgaaaaatcctggaaaatacaaatctgtgtcagcatttgctccaatttgcaaccctgtactctgtccctggggcaaaaaagcctttagtggatatttgggaacagatcaaagtaaatggaaggcttatgatgctacccaccttgtgaaatcctatccaggatctcagctggacatactaattgatcaagggaaagatgaccagtttcttttagatggacagttactccctgataacttcatagctgcctgtacagaaaagaaaatccccgttgtttttcgattgcaagagcatggtcgggttaagagtggactacatagcttgaagcggatttcgttgagattcgttgtaattgaatcaacaactgaatgagcatgcctaagtagtggctccagagagtctgctttcagattttcttgccagctttgacccaagattaccctgggtctgcgagttttatcacctgctttatcatttgattacaagtatagtataactgtatttccttgtgggatagaagctgtaaaaaataagctgaaaataataggggatatatataaataaacgatctgagaaagaataaagaaaataattacaatca

SEQ ID NO: 130680 - DNA, 2410 bp, Homo sapiens
  Payload ID: 5550
  Gene Symbol: ESD
  Gene Name: esterase D
  ENST ID: ENST00000471867
  CDS Start-End: 1-361
gtctatttttggccactccatgggaggtcatggagctctgatctgtgctttgaaaaatcctggaaaatacaaatctgtgtcagcatttgctccaatttgcaaccctgtactctgtccctggggcaaaaaagcctttagtggatatttgggaacagatcaaagtaaatggaaggcttatgatgctacccaccttgtgaaatcctatccaggatctcagctggacatactaattgatcaagggaaagatgaccagtttcttttagatggacagttactccctgataacttcatagctgcctgtacagaaaagaaaatccccgttgtttttcgattgcaagaggcaagtattaggaaactttagcttgatctagataatgtaactatgaaaaattaggattctgtgatattttcttaactttattttagaatataaaatgctacttctagtaagtttttaattatattcagacacttgaagtgaaaacctgcctataaaattaattatatctaacactaaatttgatagaaataggaaagcttttggcagtgaaaaatattgttttccatcaaaccagtaaataacaagatttttaatgcttgaatgatgattaatcttcagcattagcagatacttctttctttacacatggacctttgctgcagtagaataaaaaggacaaacttctacctaaattactccttattttatgtatatattttagcctcagaagttaagtattatttatcacacatgtgctttatattatttgactttcatattaatctattcattgtgctacttgatatttctagttgtttaagaataattactgaatcccaatgggcttgcaagttttttttaactaaaatatttttgaccgtccactactcacctaactctatatatgctaccatagtcctaattaaggaagttctgcttttatttttaagaaaaattcataagcttcagaatataatttaaaatattttagagtgaaaaatgagcactgaaaattatacatggtcatgatttttaaataaatttttatccatgtttaaggataatgtgtcaggcacattgatctaaaatgtaattacgatggtaaatgttcaaatctagatcagtgtgtaatgtggtacattagtttgtaaaatgctttcacagcattaactcattgttaattcttataccgccaaatgagatatcatttctttcctatccatctgttttacaaatgaggagacaggctcagagaagtaacctacttatctaaggccacatagctagtaagtggtggaaccagaactggaactaaggccatttaactgcaaatactgacctcctgtcatttatcaagccattttcagacggcatgatattctcctgaggagcaaaggaatggaattagagctagcacaaggagaaattgtgcatagcttgctgcctacgtaacttatgcagaagatctgagcagtcttcctgtttttagggatattttgcacatgtgaactatatagtgagaaaatgtcaaaaactaatacatgatatactgtttgtctcttagtgtccatccttgagtaatagaattttgttttagatttatttgaacatttaccatcacaattaaattttaggtcaacaaccagccttgagaaatccaaataccaatttgactataaatatagtaatacgtttaactgcaataactatagctataagtgcgtaccaaaccatgttttttccaaatgaccttaatttcttggcactacccatgttggatacctcatttgcttccccaaagactgggcccaaaatttctgttgtttctacaatgattctgcctgccaacaaagtctgaaaatctcaagtttgttataaaaacagcacagttagaacatgatgacattcctggagggaaaaataagtccacttatttgtttctaaaatgcctgtatcccaagcaactagaacacatagttggctatacttaatgaggagtcaagacaaaccattcaattcttctaaaaaagtaagaaagtattcaaagcaccagagtcacaatgttgagctcaggtgcaattttctattcactttacttccagcatggtcgggttaagagtggactacatagcttgaagcggatttcgttgagattcgttgtaattgaatcaacaactgaatgagcatgcctaagtagtggctccagagagtctgctttcagattttcttgccagctttgacccaagattaccctgggtctgcgagttttatcacctgctttatcatttgattacaagtatagtataactgtatttccttgtgggatagaagctgtaaaaaataagctgaaaataataggggatatatataaataaacgatctgagaaagaataaagaaaataattacaa

SEQ ID NO: 130681 - DNA, 6458 bp, Homo sapiens
  Payload ID: 5551
  Gene Symbol: ESR1
  Gene Name: estrogen receptor 1
  Uniprot ID: P03372
  ENST ID: ENST00000206249
  CDS Start-End: 363-2150
gagttgtgcctggagtgatgtttaagccaatgtcagggcaaggcaacagtccctggccgtcctccagcacctttgtaatgcatatgagctcgggagaccagtacttaaagttggaggcccgggagcccaggagctggcggagggcgttcgtcctgggactgcacttgctcccgtcgggtcgcccggcttcaccggacccgcaggctcccggggcagggccggggccagagctcgcgtgtcggcgggacatgcgctgcgtcgcctctaacctcgggctgtgctctttttccaggtggcccgccggtttctgagccttctgccctgcggggacacggtctgcaccctgcccgcggccacggaccatgaccatgaccctccacaccaaagcatctgggatggccctactgcatcagatccaagggaacgagctggagcccctgaaccgtccgcagctcaagatccccctggagcggcccctgggcgaggtgtacctggacagcagcaagcccgccgtgtacaactaccccgagggcgccgcctacgagttcaacgccgcggccgccgccaacgcgcaggtctacggtcagaccggcctcccctacggccccgggtctgaggctgcggcgttcggctccaacggcctggggggtttccccccactcaacagcgtgtctccgagcccgctgatgctactgcacccgccgccgcagctgtcgcctttcctgcagccccacggccagcaggtgccctactacctggagaacgagcccagcggctacacggtgcgcgaggccggcccgccggcattctacaggccaaattcagataatcgacgccagggtggcagagaaagattggccagtaccaatgacaagggaagtatggctatggaatctgccaaggagactcgctactgtgcagtgtgcaatgactatgcttcaggctaccattatggagtctggtcctgtgagggctgcaaggccttcttcaagagaagtattcaaggacataacgactatatgtgtccagccaccaaccagtgcaccattgataaaaacaggaggaagagctgccaggcctgccggctccgtaaatgctacgaagtgggaatgatgaaaggtgggatacgaaaagaccgaagaggagggagaatgttgaaacacaagcgccagagagatgatggggagggcaggggtgaagtggggtctgctggagacatgagagctgccaacctttggccaagcccgctcatgatcaaacgctctaagaagaacagcctggccttgtccctgacggccgaccagatggtcagtgccttgttggatgctgagcccccgatactctattccgagtatgatcctaccagacccttcagtgaagcttcgatgatgggcttactgaccaacctggcagacagggagctggttcacatgatcaactgggcgaagagggtgccaggctttgtggatttgaccctccatgatcaggtccaccttctagaatgtgcctggctagagatcctgatgattggtctcgtctggcgctccatggagcacccagggaagctactgtttgctcctaacttgctcttggacaggaaccagggaaaatgtgtagagggcatggtggagatcttcgacatgctgctggctacatcatctcggttccgcatgatgaatctgcagggagaggagtttgtgtgcctcaaatctattattttgcttaattctggagtgtacacatttctgtccagcaccctgaagtctctggaagagaaggaccatatccaccgagtcctggacaagatcacagacactttgatccacctgatggccaaggcaggcctgaccctgcagcagcagcaccagcggctggcccagctcctcctcatcctctcccacatcaggcacatgagtaacaaaggcatggagcatctgtacagcatgaagtgcaagaacgtggtgcccctctatgacctgctgctggagatgctggacgcccaccgcctacatgcgcccactagccgtggaggggcatccgtggaggagacggaccaaagccacttggccactgcgggctctacttcatcgcattccttgcaaaagtattacatcacgggggaggcagagggtttccctgccacggtctgagagctccctggctcccacacggttcagataatccctgctgcattttaccctcatcatgcaccactttagccaaattctgtctcctgcatacactccggcatgcatccaacaccaatggctttctagatgagtggccattcatttgcttgctcagttcttagtggcacatcttctgtcttctgttgggaacagccaaagggattccaaggctaaatctttgtaacagctctctttcccccttgctatgttactaagcgtgaggattcccgtagctcttcacagctgaactcagtctatgggttggggctcagataactctgtgcatttaagctacttgtagagacccaggcctggagagtagacattttgcctctgataagcactttttaaatggctctaagaataagccacagcaaagaatttaaagtggctcctttaattggtgacttggagaaagctaggtcaagggtttattatagcaccctcttgtattcctatggcaatgcatccttttatgaaagtggtacaccttaaagcttttatatgactgtagcagagtatctggtgattgtcaattcattccccctataggaatacaaggggcacacagggaaggcagatcccctagttggcaagactattttaacttgatacactgcagattcagatgtgctgaaagctctgcctctggctttccggtcatgggttccagttaattcatgcctcccatggacctatggagagcagcaagttgatcttagttaagtctccctatatgagggataagttcctgatttttgtttttatttttgtgttacaaaagaaagccctccctccctgaacttgcagtaaggtcagcttcaggacctgttccagtgggcactgtacttggatcttcccggcgtgtgtgtgccttacacaggggtgaactgttcactgtggtgatgcatgatgagggtaaatggtagttgaaaggagcaggggccctggtgttgcatttagccctggggcatggagctgaacagtacttgtgcaggattgttgtggctactagagaacaagagggaaagtagggcagaaactggatacagttctgaggcacagccagacttgctcagggtggccctgccacaggctgcagctacctaggaacattccttgcagaccccgcattgccctttgggggtgccctgggatccctggggtagtccagctcttcttcatttcccagcgtggccctggttggaagaagcagctgtcacagctgctgtagacagctgtgttcctacaattggcccagcaccctggggcacgggagaagggtggggaccgttgctgtcactactcaggctgactggggcctggtcagattacgtatgcccttggtggtttagagataatccaaaatcagggtttggtttggggaagaaaatcctcccccttcctcccccgccccgttccctaccgcctccactcctgccagctcatttccttcaatttcctttgacctataggctaaaaaagaaaggctcattccagccacagggcagccttccctgggcctttgcttctctagcacaattatgggttacttcctttttcttaacaaaaaagaatgtttgatttcctctgggtgaccttattgtctgtaattgaaaccctattgagaggtgatgtctgtgttagccaatgacccaggtgagctgctcgggcttctcttggtatgtcttgtttggaaaagtggatttcattcatttctgattgtccagttaagtgatcaccaaaggactgagaatctgggagggcaaaaaaaaaaaaaaagtttttatgtgcacttaaatttggggacaattttatgtatctgtgttaaggatatgtttaagaacataattcttttgttgctgtttgtttaagaagcaccttagtttgtttaagaagcaccttatatagtataatatatatttttttgaaattacattgcttgtttatcagacaattgaatgtagtaattctgttctggatttaatttgactgggttaacatgcaaaaaccaaggaaaaatatttagtttttttttttttttttgtatacttttcaagctaccttgtcatgtatacagtcatttatgcctaaagcctggtgattattcatttaaatgaagatcacatttcatatcaacttttgtatccacagtagacaaaatagcactaatccagatgcctattgttggatactgaatgacagacaatcttatgtagcaaagattatgcctgaaaaggaaaattattcagggcagctaattttgcttttaccaaaatatcagtagtaatatttttggacagtagctaatgggtcagtgggttctttttaatgtttatacttagattttcttttaaaaaaattaaaataaaacaaaaaaaaatttctaggactagacgatgtaataccagctaaagccaaacaattatacagtggaaggttttacattattcatccaatgtgtttctattcatgttaagatactactacatttgaagtgggcagagaacatcagatgattgaaatgttcgcccaggggtctccagcaactttggaaatctctttgtatttttacttgaagtgccactaatggacagcagatattttctggctgatgttggtattgggtgtaggaacatgatttaaaaaaaaactcttgcctctgctttcccccactctgaggcaagttaaaatgtaaaagatgtgatttatctggggggctcaggtatggtggggaagtggattcaggaatctggggaatggcaaatatattaagaagagtattgaaagtatttggaggaaaatggttaattctgggtgtgcaccagggttcagtagagtccacttctgccctggagaccacaaatcaactagctccatttacagccatttctaaaatggcagcttcagttctagagaagaaagaacaacatcagcagtaaagtccatggaatagctagtggtctgtgtttcttttcgccattgcctagcttgccgtaatgattctataatgccatcatgcagcaattatgagaggctaggtcatccaaagagaagaccctatcaatgtaggttgcaaaatctaacccctaaggaagtgcagtctttgatttgatttccctagtaaccttgcagatatgtttaaccaagccatagcccatgccttttgagggctgaacaaataagggacttactgataatttacttttgatcacattaaggtgttctcaccttgaaatcttatacactgaaatggccattgatttaggccactggcttagagtactccttcccctgcatgacactgattacaaatactttcctattcatactttccaattatgagatggactgtgggtactgggagtgatcactaacaccatagtaatgtctaatattcacaggcagatctgcttggggaagctagttatgtgaaaggcaaatagagtcatacagtagctcaaaaggcaaccataattctctttggtgcaggtcttgggagcgtgatctagattacactgcaccattcccaagttaatcccctgaaaacttactctcaactggagcaaatgaactttggtcccaaatatccatcttttcagtagcgttaattatgctctgtttccaactgcatttcctttccaattgaattaaagtgtggcctcgtttttagtcatttaaaattgttttctaagtaattgctgcctctattatggcacttcaattttgcactgtcttttgagattcaagaaaaatttctattcttttttttgcatccaattgtgcctgaacttttaaaatatgtaaatgctgccatgttccaaacccatcgtcagtgtgtgtgtttagagctgtgcaccctagaaacaacatattgtcccatgagcaggtgcctgagacacagacccctttgcattcacagagaggtcattggttatagagacttgaattaataagtgacattatgccagtttctgttctctcacaggtgataaacaatgctttttgtgcactacatactcttcagtgtagagctcttgttttatgggaaaaggctcaaatgccaaattgtgtttgatggattaatatgcccttttgccgatgcatactattactgatgtgactcggttttgtcgcagctttgctttgtttaatgaaacacacttgtaaacctcttttgcactttgaaaaagaatccagcgggatgctcgagcacctgtaaacaattttctcaacctatttgatgttcaaataaagaattaaactaaa

SEQ ID NO: 130682 - DNA, 3335 bp, Homo sapiens
  Payload ID: 5551
  Gene Symbol: ESR1
  Gene Name: estrogen receptor 1
  Uniprot ID: P03372
  ENST ID: ENST00000338799
  CDS Start-End: 1461-3248
ctagagcatgggtggccattgttgacctacaggaggcaccactgtcaccaacaaagggtaacagtctttcttttcaatatttatttatatccagtatttattttcaatactgactatggagagagctctcctgtgctcaaacactgcaatactgggggtctttcaaagcacaaaaacatatatttgcatgatggcatcattaacatttttatggctttctatttcttttttgtactggtctcaagagccactcataaatctctcagtaactgcatagtgtcccagggccagagaccggccactcctggcattgtgattagagtcatttaatatccaaggtggtgactaatgtctggcaacaaagcctccattgggtgtcatgtgtcctgggaccctgagcgtgggcactctaggagcacctcagtattgcgtgttagtactatggccgagagaatagttgagaaagtggtcaagaggtggatccatgtgaacgccactgggaaatgagagacctcgttcccaatcacggtcagtgcaactcgaaagcctaaaatcagtttaaaacaaaggtatctacctttatcttatgttcatatcctaggcttttaataatacgtatttttcacatgtttacagaaagcagtcaactgagctattcatggaaaggtttgtgggtttggttaacgaagtggaggagtattacatttcagctggaaacacatccctagaatgccaaaacatttattccaaagtctggtttcctggtgcaatcggaggcatggcaatgcctctgttcagagactgggggctagggccagtaaggcatttgatccacatgtatcccagaaggcttttattgttaaattatattctttcggaaaaaccacccatgtcctattttgtaaacttgatatccatacacttttgactggcattctattttagccgtaagactatgattcacagcaagcctgtttttcctcttgcttggggtggcagcagaaagcatagggtactttccagcctccaagggtaggggcaaaggggctggggtttctcctccccagtacagctttctctggctgtgccacactgctccctgtgagcagacagcaagtctcccctcactccccactgccattcatccagcgctgtgcagtagcccagctgcgtgtctgccgggaggggctgccaagtgccctgcctactggctgcttcccgaatccctgccattccacgcacaaacacatccacacactctctctgcctagttcacacactgagccactcgcacatgcgagcacattccttccttccttctcactctctcggcccttgacttctacaagcccatggaacatttctggaaagacgttcttgatccagcagggtggcccgccggtttctgagccttctgccctgcggggacacggtctgcaccctgcccgcggccacggaccatgaccatgaccctccacaccaaagcatctgggatggccctactgcatcagatccaagggaacgagctggagcccctgaaccgtccgcagctcaagatccccctggagcggcccctgggcgaggtgtacctggacagcagcaagcccgccgtgtacaactaccccgagggcgccgcctacgagttcaacgccgcggccgccgccaacgcgcaggtctacggtcagaccggcctcccctacggccccgggtctgaggctgcggcgttcggctccaacggcctggggggtttccccccactcaacagcgtgtctccgagcccgctgatgctactgcacccgccgccgcagctgtcgcctttcctgcagccccacggccagcaggtgccctactacctggagaacgagcccagcggctacacggtgcgcgaggccggcccgccggcattctacaggccaaattcagataatcgacgccagggtggcagagaaagattggccagtaccaatgacaagggaagtatggctatggaatctgccaaggagactcgctactgtgcagtgtgcaatgactatgcttcaggctaccattatggagtctggtcctgtgagggctgcaaggccttcttcaagagaagtattcaaggacataacgactatatgtgtccagccaccaaccagtgcaccattgataaaaacaggaggaagagctgccaggcctgccggctccgtaaatgctacgaagtgggaatgatgaaaggtgggatacgaaaagaccgaagaggagggagaatgttgaaacacaagcgccagagagatgatggggagggcaggggtgaagtggggtctgctggagacatgagagctgccaacctttggccaagcccgctcatgatcaaacgctctaagaagaacagcctggccttgtccctgacggccgaccagatggtcagtgccttgttggatgctgagcccccgatactctattccgagtatgatcctaccagacccttcagtgaagcttcgatgatgggcttactgaccaacctggcagacagggagctggttcacatgatcaactgggcgaagagggtgccaggctttgtggatttgaccctccatgatcaggtccaccttctagaatgtgcctggctagagatcctgatgattggtctcgtctggcgctccatggagcacccagggaagctactgtttgctcctaacttgctcttggacaggaaccagggaaaatgtgtagagggcatggtggagatcttcgacatgctgctggctacatcatctcggttccgcatgatgaatctgcagggagaggagtttgtgtgcctcaaatctattattttgcttaattctggagtgtacacatttctgtccagcaccctgaagtctctggaagagaaggaccatatccaccgagtcctggacaagatcacagacactttgatccacctgatggccaaggcaggcctgaccctgcagcagcagcaccagcggctggcccagctcctcctcatcctctcccacatcaggcacatgagtaacaaaggcatggagcatctgtacagcatgaagtgcaagaacgtggtgcccctctatgacctgctgctggagatgctggacgcccaccgcctacatgcgcccactagccgtggaggggcatccgtggaggagacggaccaaagccacttggccactgcgggctctacttcatcgcattccttgcaaaagtattacatcacgggggaggcagagggtttccctgccacggtctgagagctccctggctcccacacggttcagataatccctgctgcattttaccctcatcatgcaccactttagccaaattctgtctcctgc

SEQ ID NO: 130683 - DNA, 1251 bp, Homo sapiens
  Payload ID: 5551
  Gene Symbol: ESR1
  Gene Name: estrogen receptor 1
  ENST ID: ENST00000406599
  CDS Start-End: 235-1239
aggagctggcggagggcgttcgtcctgggactgcacttgctcccgtcgggtcgcccggcttcaccggacccgcaggctcccggggcagggccggggccagagctcgcgtgtcggcgggacatgcgctgcgtcgcctctaacctcgggctgtgctctttttccaggtggcccgccggtttctgagccttctgccctgcggggacacggtctgcaccctgcccgcggccacggaccatgaccatgaccctccacaccaaagcatctgggatggccctactgcatcagatccaagggaacgagctggagcccctgaaccgtccgcagctcaagatccccctggagcggcccctgggcgaggtgtacctggacagcagcaagcccgccgtgtacaactaccccgagggcgccgcctacgagttcaacgccgcggccgccgccaacgcgcaggtctacggtcagaccggcctcccctacggccccgggtctgaggctgcggcgttcggctccaacggcctggggggtttccccccactcaacagcgtgtctccgagcccgctgatgctactgcacccgccgccgcagctgtcgcctttcctgcagccccacggccagcaggtgccctactacctggagaacgagcccagcggctacacggtgcgcgaggccggcccgccggcattctacaggaaccagggaaaatgtgtagagggcatggtggagatcttcgacatgctgctggctacatcatctcggttccgcatgatgaatctgcagggagaggagtttgtgtgcctcaaatctattattttgcttaattctggagtgtacacatttctgtccagcaccctgaagtctctggaagagaaggaccatatccaccgagtcctggacaagatcacagacactttgatccacctgatggccaaggcaggcctgaccctgcagcagcagcaccagcggctggcccagctcctcctcatcctctcccacatcaggcacatgagtaacaaaggcatggagcatctgtacagcatgaagtgcaagaacgtggtgcccctctatgacctgctgctggagatgctggacgcccaccgcctacatgcgcccactagccgtggaggggcatccgtggaggagacggaccaaagccacttggccactgcgggctctacttcatcgcattccttgcaaaagtattacatcacgggggaggcagagggtttccctgccacggtctgagagctccctggc

SEQ ID NO: 130684 - DNA, 624 bp, Homo sapiens
  Payload ID: 5551
  Gene Symbol: ESR1
  Gene Name: estrogen receptor 1
  ENST ID: ENST00000404742
  CDS Start-End: 371-624
atggtcataacagcctcctgtctaccgactcagaacggattttaccaaaactgaaaatgcaggctccatgctcagaagctctttaacaggctcgaaaggtccatgctcctttctcctgcccattctatagcataagaagacagtctctgagtgataatcttctcttcaagaagaagaaaactaggaaggagtaagcacaaagatctcttcacattctccgggactgcggtaccaaatatcagcacagcacttcttgaaaaaggatgtagattttaatctgaactttgaaccatcactgaggtggcccgccggtttctgagccttctgccctgcggggacacggtctgcaccctgcccgcggccacggaccatgaccatgaccctccacaccaaagcatctgggatggccctactgcatcagatccaagggaacgagctggagcccctgaaccgtccgcagctcaagatccccctggagcggcccctgggcgaggtgtacctggacagcagcaagcccgccgtgtacaactaccccgagggcgccgcctacgagttcaacgccgcggccgccgccaacgcgcaggtctacggtcagaccggcctcccctacggccccgggtctga

SEQ ID NO: 130685 - DNA, 6357 bp, Homo sapiens
  Payload ID: 5551
  Gene Symbol: ESR1
  Gene Name: estrogen receptor 1
  Uniprot ID: P03372
  ENST ID: ENST00000443427
  CDS Start-End: 262-2049
gacaaacagagatatatcggagtctggcacggggcacataaggcagcacattagagaaagccggcccctggatccgtctttcgcgtttattttaagcccagtcttccctgggccacctttagcagatcctcgtgcgcccccgccccctggccgtgaaactcagcctctatccagcagcgacgacaagtaaagtggcccgccggtttctgagccttctgccctgcggggacacggtctgcaccctgcccgcggccacggaccatgaccatgaccctccacaccaaagcatctgggatggccctactgcatcagatccaagggaacgagctggagcccctgaaccgtccgcagctcaagatccccctggagcggcccctgggcgaggtgtacctggacagcagcaagcccgccgtgtacaactaccccgagggcgccgcctacgagttcaacgccgcggccgccgccaacgcgcaggtctacggtcagaccggcctcccctacggccccgggtctgaggctgcggcgttcggctccaacggcctggggggtttccccccactcaacagcgtgtctccgagcccgctgatgctactgcacccgccgccgcagctgtcgcctttcctgcagccccacggccagcaggtgccctactacctggagaacgagcccagcggctacacggtgcgcgaggccggcccgccggcattctacaggccaaattcagataatcgacgccagggtggcagagaaagattggccagtaccaatgacaagggaagtatggctatggaatctgccaaggagactcgctactgtgcagtgtgcaatgactatgcttcaggctaccattatggagtctggtcctgtgagggctgcaaggccttcttcaagagaagtattcaaggacataacgactatatgtgtccagccaccaaccagtgcaccattgataaaaacaggaggaagagctgccaggcctgccggctccgtaaatgctacgaagtgggaatgatgaaaggtgggatacgaaaagaccgaagaggagggagaatgttgaaacacaagcgccagagagatgatggggagggcaggggtgaagtggggtctgctggagacatgagagctgccaacctttggccaagcccgctcatgatcaaacgctctaagaagaacagcctggccttgtccctgacggccgaccagatggtcagtgccttgttggatgctgagcccccgatactctattccgagtatgatcctaccagacccttcagtgaagcttcgatgatgggcttactgaccaacctggcagacagggagctggttcacatgatcaactgggcgaagagggtgccaggctttgtggatttgaccctccatgatcaggtccaccttctagaatgtgcctggctagagatcctgatgattggtctcgtctggcgctccatggagcacccagggaagctactgtttgctcctaacttgctcttggacaggaaccagggaaaatgtgtagagggcatggtggagatcttcgacatgctgctggctacatcatctcggttccgcatgatgaatctgcagggagaggagtttgtgtgcctcaaatctattattttgcttaattctggagtgtacacatttctgtccagcaccctgaagtctctggaagagaaggaccatatccaccgagtcctggacaagatcacagacactttgatccacctgatggccaaggcaggcctgaccctgcagcagcagcaccagcggctggcccagctcctcctcatcctctcccacatcaggcacatgagtaacaaaggcatggagcatctgtacagcatgaagtgcaagaacgtggtgcccctctatgacctgctgctggagatgctggacgcccaccgcctacatgcgcccactagccgtggaggggcatccgtggaggagacggaccaaagccacttggccactgcgggctctacttcatcgcattccttgcaaaagtattacatcacgggggaggcagagggtttccctgccacggtctgagagctccctggctcccacacggttcagataatccctgctgcattttaccctcatcatgcaccactttagccaaattctgtctcctgcatacactccggcatgcatccaacaccaatggctttctagatgagtggccattcatttgcttgctcagttcttagtggcacatcttctgtcttctgttgggaacagccaaagggattccaaggctaaatctttgtaacagctctctttcccccttgctatgttactaagcgtgaggattcccgtagctcttcacagctgaactcagtctatgggttggggctcagataactctgtgcatttaagctacttgtagagacccaggcctggagagtagacattttgcctctgataagcactttttaaatggctctaagaataagccacagcaaagaatttaaagtggctcctttaattggtgacttggagaaagctaggtcaagggtttattatagcaccctcttgtattcctatggcaatgcatccttttatgaaagtggtacaccttaaagcttttatatgactgtagcagagtatctggtgattgtcaattcattccccctataggaatacaaggggcacacagggaaggcagatcccctagttggcaagactattttaacttgatacactgcagattcagatgtgctgaaagctctgcctctggctttccggtcatgggttccagttaattcatgcctcccatggacctatggagagcagcaagttgatcttagttaagtctccctatatgagggataagttcctgatttttgtttttatttttgtgttacaaaagaaagccctccctccctgaacttgcagtaaggtcagcttcaggacctgttccagtgggcactgtacttggatcttcccggcgtgtgtgtgccttacacaggggtgaactgttcactgtggtgatgcatgatgagggtaaatggtagttgaaaggagcaggggccctggtgttgcatttagccctggggcatggagctgaacagtacttgtgcaggattgttgtggctactagagaacaagagggaaagtagggcagaaactggatacagttctgaggcacagccagacttgctcagggtggccctgccacaggctgcagctacctaggaacattccttgcagaccccgcattgccctttgggggtgccctgggatccctggggtagtccagctcttcttcatttcccagcgtggccctggttggaagaagcagctgtcacagctgctgtagacagctgtgttcctacaattggcccagcaccctggggcacgggagaagggtggggaccgttgctgtcactactcaggctgactggggcctggtcagattacgtatgcccttggtggtttagagataatccaaaatcagggtttggtttggggaagaaaatcctcccccttcctcccccgccccgttccctaccgcctccactcctgccagctcatttccttcaatttcctttgacctataggctaaaaaagaaaggctcattccagccacagggcagccttccctgggcctttgcttctctagcacaattatgggttacttcctttttcttaacaaaaaagaatgtttgatttcctctgggtgaccttattgtctgtaattgaaaccctattgagaggtgatgtctgtgttagccaatgacccaggtgagctgctcgggcttctcttggtatgtcttgtttggaaaagtggatttcattcatttctgattgtccagttaagtgatcaccaaaggactgagaatctgggagggcaaaaaaaaaaaaaaagtttttatgtgcacttaaatttggggacaattttatgtatctgtgttaaggatatgtttaagaacataattcttttgttgctgtttgtttaagaagcaccttagtttgtttaagaagcaccttatatagtataatatatatttttttgaaattacattgcttgtttatcagacaattgaatgtagtaattctgttctggatttaatttgactgggttaacatgcaaaaaccaaggaaaaatatttagtttttttttttttttttgtatacttttcaagctaccttgtcatgtatacagtcatttatgcctaaagcctggtgattattcatttaaatgaagatcacatttcatatcaacttttgtatccacagtagacaaaatagcactaatccagatgcctattgttggatactgaatgacagacaatcttatgtagcaaagattatgcctgaaaaggaaaattattcagggcagctaattttgcttttaccaaaatatcagtagtaatatttttggacagtagctaatgggtcagtgggttctttttaatgtttatacttagattttcttttaaaaaaattaaaataaaacaaaaaaaaatttctaggactagacgatgtaataccagctaaagccaaacaattatacagtggaaggttttacattattcatccaatgtgtttctattcatgttaagatactactacatttgaagtgggcagagaacatcagatgattgaaatgttcgcccaggggtctccagcaactttggaaatctctttgtatttttacttgaagtgccactaatggacagcagatattttctggctgatgttggtattgggtgtaggaacatgatttaaaaaaaaactcttgcctctgctttcccccactctgaggcaagttaaaatgtaaaagatgtgatttatctggggggctcaggtatggtggggaagtggattcaggaatctggggaatggcaaatatattaagaagagtattgaaagtatttggaggaaaatggttaattctgggtgtgcaccagggttcagtagagtccacttctgccctggagaccacaaatcaactagctccatttacagccatttctaaaatggcagcttcagttctagagaagaaagaacaacatcagcagtaaagtccatggaatagctagtggtctgtgtttcttttcgccattgcctagcttgccgtaatgattctataatgccatcatgcagcaattatgagaggctaggtcatccaaagagaagaccctatcaatgtaggttgcaaaatctaacccctaaggaagtgcagtctttgatttgatttccctagtaaccttgcagatatgtttaaccaagccatagcccatgccttttgagggctgaacaaataagggacttactgataatttacttttgatcacattaaggtgttctcaccttgaaatcttatacactgaaatggccattgatttaggccactggcttagagtactccttcccctgcatgacactgattacaaatactttcctattcatactttccaattatgagatggactgtgggtactgggagtgatcactaacaccatagtaatgtctaatattcacaggcagatctgcttggggaagctagttatgtgaaaggcaaatagagtcatacagtagctcaaaaggcaaccataattctctttggtgcaggtcttgggagcgtgatctagattacactgcaccattcccaagttaatcccctgaaaacttactctcaactggagcaaatgaactttggtcccaaatatccatcttttcagtagcgttaattatgctctgtttccaactgcatttcctttccaattgaattaaagtgtggcctcgtttttagtcatttaaaattgttttctaagtaattgctgcctctattatggcacttcaattttgcactgtcttttgagattcaagaaaaatttctattcttttttttgcatccaattgtgcctgaacttttaaaatatgtaaatgctgccatgttccaaacccatcgtcagtgtgtgtgtttagagctgtgcaccctagaaacaacatattgtcccatgagcaggtgcctgagacacagacccctttgcattcacagagaggtcattggttatagagacttgaattaataagtgacattatgccagtttctgttctctcacaggtgataaacaatgctttttgtgcactacatactcttcagtgtagagctcttgttttatgggaaaaggctcaaatgccaaattgtgtttgatggattaatatgcccttttgccgatgcatactattactgatgtgactcggttttgtcgcagctttgctttgtttaatgaaacacacttgtaaacctcttttgcactttgaaaaagaatccagcgggatgctcgagcacctgtaaacaattttctcaacctatttgatgttcaaataaagaattaaactaaa

SEQ ID NO: 130686 - DNA, 5436 bp, Homo sapiens
  Payload ID: 5551
  Gene Symbol: ESR1
  Gene Name: estrogen receptor 1
  ENST ID: ENST00000427531
  CDS Start-End: 233-1165
gcttaaaaataatctcctgccagcccagtgacaagcctgtcccacccggggagaatgccccggagtggcgtgcgggtcagccagggtctgcgcctcgcagccactgtggaaggagcgcggccggtccaggacacaggagaccactttgtgacttcaatggcgaaggccaaattcagataatcgacgccagggtggcagagaaagattggccagtaccaatgacaagggaagtatggctatggaatctgccaaggagactcgctactgtgcagtgtgcaatgactatgcttcaggctaccattatggagtctggtcctgtgagggctgcaaggccttcttcaagagaagtattcaaggacataacgactatatgtgtccagccaccaaccagtgcaccattgataaaaacaggaggaagagctgccaggcctgccggctccgtaaatgctacgaagtgggaatgatgaaaggtgggatacgaaaagaccgaagaggagggagaatgttgaaacacaagcgccagagagatgatggggagggcaggggtgaagtggggtctgctggagacatgagagctgccaacctttggccaagcccgctcatgatcaaacgctctaagaagaacagcctggccttgtccctgacggccgaccagatggtcagtgccttgttggatgctgagcccccgatactctattccgagtatgatcctaccagacccttcagtgaagcttcgatgatgggcttactgaccaacctggcagacagggagctggttcacatgatcaactgggcgaagagggtgccaggctttgtggatttgaccctccatgatcaggtccaccttctagaatgtgcctggctagagatcctgatgattggtctcgtctggcgctccatggagcacccagggaagctactgtttgctcctaacttgctcttggacaggaaccagggaaaatgtgtagagggcatggtggagatcttcgacatgctgctggctacatcatctcggttccgcatgatgaatctgcagggagaggagtttgtgtgcctcaaatctattattttgcttaattctggtatctcacatgtagaagcaaagaagagaatcctgaacttgcatcctaaaatatttggaaacaagtggtttcctcgtgtctaaagcctctggtcataaggcctcacagtatcctgcagatcatcaaatccgtgtgtggacgtggggacattttgttttgaggcagttacatgaccatgggcaagtaaattagtctctctggccttcagttttctcatttgcaatgattcaatggtttgccttaaagtgtcttaagaaggataggatagctacccacaaactttggatcaaattttcttcaaaacatccttcccctgactttaaaatatgccctggcaaccaacactcaacacctgtagctagatgagttataacagagtgactgaagagagctcccacaattcctagttattaaatacctgactaattttcattaggagacatttaagaactttagtgatgggaagatttacatatataattgatagtacaatctgacagagctgaatagctcctgtttgtcaactgttaaattctttgtgcaattaggtcaaagatcaagatcaaaacaagggctgcccattgacctgttcactcctgagaaaaatggcaaaccattgaatcataaatcatgacagccaaaataattttaggatattaatgcacccctcatctttgcaaatgagaaaactgaaggccagagagactaatttacttgcccatttttgataaaaatgtcaccatttacagaatgtggactcctatgttggagtctgttgaaggacatggcacatttaacagcatcagagcattttttattaaaatttaatttgtgcatgacttctaatgctgaagaacgccaagctaggaagaagtcatgggctgagatggggacagagagaacacacaatattcagtgactgtccgtgcagctggctgcccttgaaaatatccgaactatccactgggaaaatgcctgtccccttggggtaattaccagagtttcaacatgcccaaagctgcctcatcttcagggggaacttgttctagcgattttagtatcaagaagctaatggtcccagggaaagggttatttttaatatttagctactgtgctaaaaatcacctaagtttctagagtcttgggaaatttcataagggaaagaacaaaggcaacttgttgactacccactggtcattctcctctggtcttattacatacatggatgccagtttagattgtgtttatataggaaaaattaaatgtgtgagcctccttaaggaacatcatcaatacagatatatcagatagttctgtccagcaaaaaacgtgcttatttgctacaagtaaatttttatttatttttctcacttccctcactccttcaaatttccaggtaaatagctgcccaggagttgcttcatctctgtcccaaaatacctagacaattgcgggataaggagaatggcagggagggagtagtggctaaaatcacacccttcaaaagaaagtgtgtaggacacacaattgtgagaagtctgaatgccatgcacatagggtatgactcactttgaaaattgtttataatcaaggaaatgaaaatgagttaatttcgtgcatgcatcatttaaagccaaatgagaagaaacttctaatttattttgttacttttcggctaacactggcagtatgtaacagatttattttgcagaaacatctagattgtccgtgatcttgatcctgcccttatgtgtcttgtctttgaaacccagtgtttcctggatatatggttcaggagacaagtttccagaatcaagttaggacccaggtcttctttttttccaaaccaaacattcttgctaatcctaaactacctgaggcagcctgtggtggcctcagctctaaaaccattgtttaaaggcttctacccatcaatggcccttcagcagagtggtacggttaacggggtagggtctggagtcaggggagacctgggttcaaatcctacatctttacacctctaatccccagtgtccttgtctataaattgggaatatagccatgtcatgggattcttgtgagggttaaatgaggtaaaacacatacaatgcttagcatgtatacaattaagcactaaataattgaaacacattaagtactaaatgaatgtcagcagcttatcactattatctgtataatgataccaagggtgtgccgactcatacccttaggggttggctggattcggccttttctctcgggaaaacatacctgatttattaatagtgctttcaagcatgtgataaatttctcaaactgcctgtcttgttccctagaaacaccaggaaggcctacctcaaatagcaacagagaaacctatcggagccttaccctacagctttccttggggcacgggtgagcaatctgccttagaggggagaggctctgtgctgaggctctttgaatgctttgaataaatagatccccagataatgaaaagacttcaaaacaaattctacaagaaactgagtagtgtttatagtgaggccctagtgtacatgcaaaaaacccccactgcccttgcttaaatgtatctgattaacttgaatacatttttaaatgagggcttttttccctctttcagtgtttcggccagtcatttgccacttctcattccatcttagttctctgtaaagaaggtgccagagacctaaggtgcccaaggcaattttgcattttacaattctaagctttagaatgaagtcatcaatttgctacatccggactacagtgcaattattcctttgccttgctggaaattggagtgaaatctttctagctgtcaatttcaactcagttgcagtagtgttttgaagaattaatggcgataaggttagaaaattttaagtcaaacgtagggaaaaagtaccagctagaccatcataagcatttgctttgaaagcatgcttctaaagtgtgtttaacctcaaataacagtcacaaatatggttattatgaatgtatgcacagatttttatgtttctaattttaagaagttctagggagctccctgtaacgatttagggaatctctagattctgatatactgcaagtcttttaatggtaggaatcacattgaattaattttgtaggcccagggcctaaatttagtaggtgttcagtacctattggcatcaattcatatgtaggtttaaaatactgtatgaagatacagaatcaccaccatcaaatcaaattgaaatatgtaacaggctagtataatattaacatctgactttaaacaacaacaaagaaaccaaatgagtaactcctcccttcaaactaatagtcagtttcttccaactcagtctctttctcctctcaggaagaatgcgtatctaaaaatttcccattgcagactgctggaaacaacattctaaactatttatgcttctgcaataacctttccaatttgctggaccagtgcaagattaaacacgagatatctcaagtctcaatgtaaaggaacaccacgacagcctggactgtgggtgaagttcattcttccccagcagactctgcctttcattctcggggttgggtgtgccccaaacagaggtaccgacggtaacgaagcccaagaatgttcaaccacaacctgtctgtgaaggtgttggatgacgtttgccattcaggtgaagattatttatgttccagtcccacctgagtagcaaagtgaacactgtgctgaatgctcagaaagatgttaatgaaccgtgctggacagagcagagctgaaaggcgccttgcgagtgtcgtagtgagaatgtggctgtcccagctgcaaagccctgttaggaggcatgaggaagcacttgctgccctaagaaacgatgccttcgacattttcaaaagatctatgtggctgtctgaaacaatgcggagagcagatagacgcaatatttgggaaccaaagagtgactgctgttggcgttgcatcataacataagcgctttcccccttctcgtcactatcatttgtatcaaccaaagaactgatctctggtatcctcgaaggaatgctgtggggatattcttcatctctgttcatggtacatcagcaatttgtggggaaaagatggactatataacacaatgatctgcctaaaagaaactgtctctacttatagggggctgagcaaaccttagagcatctgcggatgctcgtcattatcttcaaaagtccccaagagtttttctccatactttattattgctattttgtttaggctagaaaaaaaaaaactcataaaattgtcttcaaaccaaaccaaaggaaatgaaaagaaaaaaaa

SEQ ID NO: 130687 - DNA, 323 bp, Homo sapiens
  Payload ID: 5551
  Gene Symbol: ESR1
  Gene Name: estrogen receptor 1
  ENST ID: ENST00000415488
  CDS Start-End: 1-323
cataacgactatatgtgtccagccaccaaccagtgcaccattgataaaaacaggaggaagagctgccaggcctgccggctccgtaaatgctacgaagtgggaatgatgaaaggtggctttgtggatttgaccctccatgatcaggtccaccttctagaatgtgcctggctagagatcctgatgattggtctcgtctggcgctccatggagcacccagggaagctactgtttgctcctaacttgctcttggacaggaaccagggaaaatgtgtagagggcatggtggagatcttcgacatgctgctggctacatcatctcggtt

SEQ ID NO: 130688 - DNA, 6466 bp, Homo sapiens
  Payload ID: 5551
  Gene Symbol: ESR1
  Gene Name: estrogen receptor 1
  Uniprot ID: P03372
  ENST ID: ENST00000440973
  CDS Start-End: 371-2158
atggtcataacagcctcctgtctaccgactcagaacggattttaccaaaactgaaaatgcaggctccatgctcagaagctctttaacaggctcgaaaggtccatgctcctttctcctgcccattctatagcataagaagacagtctctgagtgataatcttctcttcaagaagaagaaaactaggaaggagtaagcacaaagatctcttcacattctccgggactgcggtaccaaatatcagcacagcacttcttgaaaaaggatgtagattttaatctgaactttgaaccatcactgaggtggcccgccggtttctgagccttctgccctgcggggacacggtctgcaccctgcccgcggccacggaccatgaccatgaccctccacaccaaagcatctgggatggccctactgcatcagatccaagggaacgagctggagcccctgaaccgtccgcagctcaagatccccctggagcggcccctgggcgaggtgtacctggacagcagcaagcccgccgtgtacaactaccccgagggcgccgcctacgagttcaacgccgcggccgccgccaacgcgcaggtctacggtcagaccggcctcccctacggccccgggtctgaggctgcggcgttcggctccaacggcctggggggtttccccccactcaacagcgtgtctccgagcccgctgatgctactgcacccgccgccgcagctgtcgcctttcctgcagccccacggccagcaggtgccctactacctggagaacgagcccagcggctacacggtgcgcgaggccggcccgccggcattctacaggccaaattcagataatcgacgccagggtggcagagaaagattggccagtaccaatgacaagggaagtatggctatggaatctgccaaggagactcgctactgtgcagtgtgcaatgactatgcttcaggctaccattatggagtctggtcctgtgagggctgcaaggccttcttcaagagaagtattcaaggacataacgactatatgtgtccagccaccaaccagtgcaccattgataaaaacaggaggaagagctgccaggcctgccggctccgtaaatgctacgaagtgggaatgatgaaaggtgggatacgaaaagaccgaagaggagggagaatgttgaaacacaagcgccagagagatgatggggagggcaggggtgaagtggggtctgctggagacatgagagctgccaacctttggccaagcccgctcatgatcaaacgctctaagaagaacagcctggccttgtccctgacggccgaccagatggtcagtgccttgttggatgctgagcccccgatactctattccgagtatgatcctaccagacccttcagtgaagcttcgatgatgggcttactgaccaacctggcagacagggagctggttcacatgatcaactgggcgaagagggtgccaggctttgtggatttgaccctccatgatcaggtccaccttctagaatgtgcctggctagagatcctgatgattggtctcgtctggcgctccatggagcacccagggaagctactgtttgctcctaacttgctcttggacaggaaccagggaaaatgtgtagagggcatggtggagatcttcgacatgctgctggctacatcatctcggttccgcatgatgaatctgcagggagaggagtttgtgtgcctcaaatctattattttgcttaattctggagtgtacacatttctgtccagcaccctgaagtctctggaagagaaggaccatatccaccgagtcctggacaagatcacagacactttgatccacctgatggccaaggcaggcctgaccctgcagcagcagcaccagcggctggcccagctcctcctcatcctctcccacatcaggcacatgagtaacaaaggcatggagcatctgtacagcatgaagtgcaagaacgtggtgcccctctatgacctgctgctggagatgctggacgcccaccgcctacatgcgcccactagccgtggaggggcatccgtggaggagacggaccaaagccacttggccactgcgggctctacttcatcgcattccttgcaaaagtattacatcacgggggaggcagagggtttccctgccacggtctgagagctccctggctcccacacggttcagataatccctgctgcattttaccctcatcatgcaccactttagccaaattctgtctcctgcatacactccggcatgcatccaacaccaatggctttctagatgagtggccattcatttgcttgctcagttcttagtggcacatcttctgtcttctgttgggaacagccaaagggattccaaggctaaatctttgtaacagctctctttcccccttgctatgttactaagcgtgaggattcccgtagctcttcacagctgaactcagtctatgggttggggctcagataactctgtgcatttaagctacttgtagagacccaggcctggagagtagacattttgcctctgataagcactttttaaatggctctaagaataagccacagcaaagaatttaaagtggctcctttaattggtgacttggagaaagctaggtcaagggtttattatagcaccctcttgtattcctatggcaatgcatccttttatgaaagtggtacaccttaaagcttttatatgactgtagcagagtatctggtgattgtcaattcattccccctataggaatacaaggggcacacagggaaggcagatcccctagttggcaagactattttaacttgatacactgcagattcagatgtgctgaaagctctgcctctggctttccggtcatgggttccagttaattcatgcctcccatggacctatggagagcagcaagttgatcttagttaagtctccctatatgagggataagttcctgatttttgtttttatttttgtgttacaaaagaaagccctccctccctgaacttgcagtaaggtcagcttcaggacctgttccagtgggcactgtacttggatcttcccggcgtgtgtgtgccttacacaggggtgaactgttcactgtggtgatgcatgatgagggtaaatggtagttgaaaggagcaggggccctggtgttgcatttagccctggggcatggagctgaacagtacttgtgcaggattgttgtggctactagagaacaagagggaaagtagggcagaaactggatacagttctgaggcacagccagacttgctcagggtggccctgccacaggctgcagctacctaggaacattccttgcagaccccgcattgccctttgggggtgccctgggatccctggggtagtccagctcttcttcatttcccagcgtggccctggttggaagaagcagctgtcacagctgctgtagacagctgtgttcctacaattggcccagcaccctggggcacgggagaagggtggggaccgttgctgtcactactcaggctgactggggcctggtcagattacgtatgcccttggtggtttagagataatccaaaatcagggtttggtttggggaagaaaatcctcccccttcctcccccgccccgttccctaccgcctccactcctgccagctcatttccttcaatttcctttgacctataggctaaaaaagaaaggctcattccagccacagggcagccttccctgggcctttgcttctctagcacaattatgggttacttcctttttcttaacaaaaaagaatgtttgatttcctctgggtgaccttattgtctgtaattgaaaccctattgagaggtgatgtctgtgttagccaatgacccaggtgagctgctcgggcttctcttggtatgtcttgtttggaaaagtggatttcattcatttctgattgtccagttaagtgatcaccaaaggactgagaatctgggagggcaaaaaaaaaaaaaaagtttttatgtgcacttaaatttggggacaattttatgtatctgtgttaaggatatgtttaagaacataattcttttgttgctgtttgtttaagaagcaccttagtttgtttaagaagcaccttatatagtataatatatatttttttgaaattacattgcttgtttatcagacaattgaatgtagtaattctgttctggatttaatttgactgggttaacatgcaaaaaccaaggaaaaatatttagtttttttttttttttttgtatacttttcaagctaccttgtcatgtatacagtcatttatgcctaaagcctggtgattattcatttaaatgaagatcacatttcatatcaacttttgtatccacagtagacaaaatagcactaatccagatgcctattgttggatactgaatgacagacaatcttatgtagcaaagattatgcctgaaaaggaaaattattcagggcagctaattttgcttttaccaaaatatcagtagtaatatttttggacagtagctaatgggtcagtgggttctttttaatgtttatacttagattttcttttaaaaaaattaaaataaaacaaaaaaaaatttctaggactagacgatgtaataccagctaaagccaaacaattatacagtggaaggttttacattattcatccaatgtgtttctattcatgttaagatactactacatttgaagtgggcagagaacatcagatgattgaaatgttcgcccaggggtctccagcaactttggaaatctctttgtatttttacttgaagtgccactaatggacagcagatattttctggctgatgttggtattgggtgtaggaacatgatttaaaaaaaaactcttgcctctgctttcccccactctgaggcaagttaaaatgtaaaagatgtgatttatctggggggctcaggtatggtggggaagtggattcaggaatctggggaatggcaaatatattaagaagagtattgaaagtatttggaggaaaatggttaattctgggtgtgcaccagggttcagtagagtccacttctgccctggagaccacaaatcaactagctccatttacagccatttctaaaatggcagcttcagttctagagaagaaagaacaacatcagcagtaaagtccatggaatagctagtggtctgtgtttcttttcgccattgcctagcttgccgtaatgattctataatgccatcatgcagcaattatgagaggctaggtcatccaaagagaagaccctatcaatgtaggttgcaaaatctaacccctaaggaagtgcagtctttgatttgatttccctagtaaccttgcagatatgtttaaccaagccatagcccatgccttttgagggctgaacaaataagggacttactgataatttacttttgatcacattaaggtgttctcaccttgaaatcttatacactgaaatggccattgatttaggccactggcttagagtactccttcccctgcatgacactgattacaaatactttcctattcatactttccaattatgagatggactgtgggtactgggagtgatcactaacaccatagtaatgtctaatattcacaggcagatctgcttggggaagctagttatgtgaaaggcaaatagagtcatacagtagctcaaaaggcaaccataattctctttggtgcaggtcttgggagcgtgatctagattacactgcaccattcccaagttaatcccctgaaaacttactctcaactggagcaaatgaactttggtcccaaatatccatcttttcagtagcgttaattatgctctgtttccaactgcatttcctttccaattgaattaaagtgtggcctcgtttttagtcatttaaaattgttttctaagtaattgctgcctctattatggcacttcaattttgcactgtcttttgagattcaagaaaaatttctattcttttttttgcatccaattgtgcctgaacttttaaaatatgtaaatgctgccatgttccaaacccatcgtcagtgtgtgtgtttagagctgtgcaccctagaaacaacatattgtcccatgagcaggtgcctgagacacagacccctttgcattcacagagaggtcattggttatagagacttgaattaataagtgacattatgccagtttctgttctctcacaggtgataaacaatgctttttgtgcactacatactcttcagtgtagagctcttgttttatgggaaaaggctcaaatgccaaattgtgtttgatggattaatatgcccttttgccgatgcatactattactgatgtgactcggttttgtcgcagctttgctttgtttaatgaaacacacttgtaaacctcttttgcactttgaaaaagaatccagcgggatgctcgagcacctgtaaacaattttctcaacctatttgatgttcaaataaagaattaaactaaa

SEQ ID NO: 130689 - DNA, 731 bp, Homo sapiens
  Payload ID: 5551
  Gene Symbol: ESR1
  Gene Name: estrogen receptor 1
  ENST ID: ENST00000446550
  CDS Start-End: 385-731
atgcaaccgcacaccccattctatctgccctatctcggttacagtgtagtcctccccagggtcatcctatgtacacactacgtatttctagccaacgaggagggggaatcaaacagaaagagagacaaacagagatatatcggagtctggcacggggcacataaggcagcacattagagaaagccggcccctggatccgtctttcgcgtttattttaagcccagtcttccctgggccacctttagcagatcctcgtgcgcccccgccccctggccgtgaaactcagcctctatccagcagcgacgacaagtaaagtggcccgccggtttctgagccttctgccctgcggggacacggtctgcaccctgcccgcggccacggaccatgaccatgaccctccacaccaaagcatctgggatggccctactgcatcagatccaagggaacgagctggagcccctgaaccgtccgcagctcaagatccccctggagcggcccctgggcgaggtgtacctggacagcagcaagcccgccgtgtacaactaccccgagggcgccgcctacgagttcaacgccgcggccgccgccaacgcgcaggtctacggtcagaccggcctcccctacggccccgggtctgaggctgcggcgttcggctccaacggcctggggggtttccccccactcaacagcgtgtctccgagcccgctgatgctactgcacccgccgccgca

SEQ ID NO: 130690 - DNA, 1368 bp, Homo sapiens
  Payload ID: 5551
  Gene Symbol: ESR1
  Gene Name: estrogen receptor 1
  ENST ID: ENST00000456483
  CDS Start-End: 235-693
aggagctggcggagggcgttcgtcctgggactgcacttgctcccgtcgggtcgcccggcttcaccggacccgcaggctcccggggcagggccggggccagagctcgcgtgtcggcgggacatgcgctgcgtcgcctctaacctcgggctgtgctctttttccaggtggcccgccggtttctgagccttctgccctgcggggacacggtctgcaccctgcccgcggccacggaccatgaccatgaccctccacaccaaagcatctgggatggccctactgcatcagatccaagggaacgagctggagcccctgaaccgtccgcagctcaagatccccctggagcggcccctgggcgaggtgtacctggacagcagcaagcccgccgtgtacaactaccccgagggcgccgcctacgagttcaacgccgcggccgccgccaacgcgcaggtctacggtcagaccggcctcccctacggccccgggtctgaggctgcggcgttcggctccaacggcctggggggtttccccccactcaacagcgtgtctccgagcccgctgatgctactgcacccgccgccgcagctgtcgcctttcctgcagccccacggccagcaggtgccctactacctggagaacgagcccagcggctacacggtgcgcgaggccggcccgccggcattctacaggacataacgactatatgtgtccagccaccaaccagtgcaccattgataaaaacaggaggaagagctgccaggcctgccggctccgtaaatgctacgaagtgggaatgatgaaaggtggaaccagggaaaatgtgtagagggcatggtggagatcttcgacatgctgctggctacatcatctcggttccgcatgatgaatctgcagggagaggagtttgtgtgcctcaaatctattattttgcttaattctggagtgtacacatttctgtccagcaccctgaagtctctggaagagaaggaccatatccaccgagtcctggacaagatcacagacactttgatccacctgatggccaaggcaggcctgaccctgcagcagcagcaccagcggctggcccagctcctcctcatcctctcccacatcaggcacatgagtaacaaaggcatggagcatctgtacagcatgaagtgcaagaacgtggtgcccctctatgacctgctgctggagatgctggacgcccaccgcctacatgcgcccactagccgtggaggggcatccgtggaggagacggaccaaagccacttggccactgcgggctctacttcatcgcattccttgcaaaagtattacatcacgggggaggcagagggtttccctgccacggtctgagagctccctggc

SEQ ID NO: 130691 - DNA, 1518 bp, Homo sapiens
  Payload ID: 5552
  Gene Symbol: ESR2
  Gene Name: estrogen receptor 2 (ER beta)
  Uniprot ID: Q92731
  ENST ID: ENST00000267525
  CDS Start-End: 91-1410
ccattatacttgcccacgaatctttgagaacattataatgacctttgtgcctcttcttgcaaggtgttttctcagctgttatctcaagacatggatataaaaaactcaccatctagccttaattctccttcctcctacaactgcagtcaatccatcttacccctggagcacggctccatatacataccttcctcctatgtagacagccaccatgaatatccagccatgacattctatagccctgctgtgatgaattacagcattcccagcaatgtcactaacttggaaggtgggcctggtcggcagaccacaagcccaaatgtgttgtggccaacacctgggcacctttctcctttagtggtccatcgccagttatcacatctgtatgcggaacctcaaaagagtccctggtgtgaagcaagatcgctagaacacaccttacctgtaaacagagagacactgaaaaggaaggttagtgggaaccgttgcgccagccctgttactggtccaggttcaaagagggatgctcacttctgcgctgtctgcagcgattacgcatcgggatatcactatggagtctggtcgtgtgaaggatgtaaggccttttttaaaagaagcattcaaggacataatgattatatttgtccagctacaaatcagtgtacaatcgataaaaaccggcgcaagagctgccaggcctgccgacttcggaagtgttacgaagtgggaatggtgaagtgtggctcccggagagagagatgtgggtaccgccttgtgcggagacagagaagtgccgacgagcagctgcactgtgccggcaaggccaagagaagtggcggccacgcgccccgagtgcgggagctgctgctggacgccctgagccccgagcagctagtgctcaccctcctggaggctgagccgccccatgtgctgatcagccgccccagtgcgcccttcaccgaggcctccatgatgatgtccctgaccaagttggccgacaaggagttggtacacatgatcagctgggccaagaagattcccggtatgtaccctctggtcacagcgacccaggatgctgacagcagccggaagctggctcacttgctgaacgccgtgaccgatgctttggtttgggtgattgccaagagcggcatctcctcccagcagcaatccatgcgcctggctaacctcctgatgctcctgtcccacgtcaggcatgcgagtaacaagggcatggaacatctgctcaacatgaagtgcaaaaatgtggtcccagtgtatgacctgctgctggagatgctgaatgcccacgtgcttcgcgggtgcaagtcctccatcacggggtccgagtgcagcccggcagaggacagtaaaagcaaagagggctcccagaacccacagtctcagtgacgcctggccctgaggtgaactggcccacagaggtcacaggctgaagcgtgaactccagtgtgtcaggagcctgggcttcatctttctgctgtgtggtccctcatttgg

SEQ ID NO: 130692 - DNA, 2454 bp, Homo sapiens
  Payload ID: 5552
  Gene Symbol: ESR2
  Gene Name: estrogen receptor 2 (ER beta)
  Uniprot ID: Q92731
  ENST ID: ENST00000353772
  CDS Start-End: 469-1956
ctcggtctttaaaaggaagaaggggcttatcgttaagtcgcttgtgatcttttcagtttctccagctgctggctttttggacacccactcccccgccaggaggcagttgcaagcgcggaggctgcgagaaataactgcctcttgaaacttgcagggcgaagagcaggcggcgagcgctgggccggggagggaccacccgagctgcgacgggctctggggctgcggggcagggctggcgcccggagcctgagctgcaggaggtgcgctcgctttcctcaacaggtggcggcggggcgcgcgccgggagaccccccctaatgcgggaaaagcacgtgtccgcattttagagaaggcaaggccggtgtgtttatctgcaagccattatacttgcccacgaatctttgagaacattataatgacctttgtgcctcttcttgcaaggtgttttctcagctgttatctcaagacatggatataaaaaactcaccatctagccttaattctccttcctcctacaactgcagtcaatccatcttacccctggagcacggctccatatacataccttcctcctatgtagacagccaccatgaatatccagccatgacattctatagccctgctgtgatgaattacagcattcccagcaatgtcactaacttggaaggtgggcctggtcggcagaccacaagcccaaatgtgttgtggccaacacctgggcacctttctcctttagtggtccatcgccagttatcacatctgtatgcggaacctcaaaagagtccctggtgtgaagcaagatcgctagaacacaccttacctgtaaacagagagacactgaaaaggaaggttagtgggaaccgttgcgccagccctgttactggtccaggttcaaagagggatgctcacttctgcgctgtctgcagcgattacgcatcgggatatcactatggagtctggtcgtgtgaaggatgtaaggccttttttaaaagaagcattcaaggacataatgattatatttgtccagctacaaatcagtgtacaatcgataaaaaccggcgcaagagctgccaggcctgccgacttcggaagtgttacgaagtgggaatggtgaagtgtggctcccggagagagagatgtgggtaccgccttgtgcggagacagagaagtgccgacgagcagctgcactgtgccggcaaggccaagagaagtggcggccacgcgccccgagtgcgggagctgctgctggacgccctgagccccgagcagctagtgctcaccctcctggaggctgagccgccccatgtgctgatcagccgccccagtgcgcccttcaccgaggcctccatgatgatgtccctgaccaagttggccgacaaggagttggtacacatgatcagctgggccaagaagattcccggctttgtggagctcagcctgttcgaccaagtgcggctcttggagagctgttggatggaggtgttaatgatggggctgatgtggcgctcaattgaccaccccggcaagctcatctttgctccagatcttgttctggacagggatgaggggaaatgcgtagaaggaattctggaaatctttgacatgctcctggcaactacttcaaggtttcgagagttaaaactccaacacaaagaatatctctgtgtcaaggccatgatcctgctcaattccagtatgtaccctctggtcacagcgacccaggatgctgacagcagccggaagctggctcacttgctgaacgccgtgaccgatgctttggtttgggtgattgccaagagcggcatctcctcccagcagcaatccatgcgcctggctaacctcctgatgctcctgtcccacgtcaggcatgcgagggcagaaaaggcctctcaaacactcacctcatttggaatgaagatggagactcttttgcctgaagcaacgatggagcagtgaccctctaatcaactcggtggcctaaagaaaaatcttgggtaacattttcacttcagtttccctctgggatcattgtaatccatgaaaaaaataattttaaagaaagagttaaaatactttgaagttagttatgtggttaaaaaccaccttcctttctattatcaatccaacaatttgataactgtaaacgctaaagtgaagacggattctcttcagatggtctccttaactgcccagggcttgcagatgtctcacccatgaggggcaccaatgtagaaagctgaggcttcatctactgatgagcttcactggtttcccctgaggtttgtgctttggcagagaaggggaggaggggactgggattgtgtggtcagctgtgcctgccaacagatgcaggttaggaactgtgttcagtatcttccaataagaaaggggaaatgccgatgcctatcctctttgtttaggtagaaagtaaaatgctactggacttaaatgggc

SEQ ID NO: 130693 - DNA, 2060 bp, Homo sapiens
  Payload ID: 5552
  Gene Symbol: ESR2
  Gene Name: estrogen receptor 2 (ER beta)
  Uniprot ID: Q92731
  ENST ID: ENST00000341099
  CDS Start-End: 419-2011
tttcagtttctccagctgctggctttttggacacccactcccccgccaggaggcagttgcaagcgcggaggctgcgagaaataactgcctcttgaaacttgcagggcgaagagcaggcggcgagcgctgggccggggagggaccacccgagctgcgacgggctctggggctgcggggcagggctggcgcccggagcctgagctgcaggaggtgcgctcgctttcctcaacaggtggcggcggggcgcgcgccgggagaccccccctaatgcgggaaaagcacgtgtccgcattttagagaaggcaaggccggtgtgtttatctgcaagccattatacttgcccacgaatctttgagaacattataatgacctttgtgcctcttcttgcaaggtgttttctcagctgttatctcaagacatggatataaaaaactcaccatctagccttaattctccttcctcctacaactgcagtcaatccatcttacccctggagcacggctccatatacataccttcctcctatgtagacagccaccatgaatatccagccatgacattctatagccctgctgtgatgaattacagcattcccagcaatgtcactaacttggaaggtgggcctggtcggcagaccacaagcccaaatgtgttgtggccaacacctgggcacctttctcctttagtggtccatcgccagttatcacatctgtatgcggaacctcaaaagagtccctggtgtgaagcaagatcgctagaacacaccttacctgtaaacagagagacactgaaaaggaaggttagtgggaaccgttgcgccagccctgttactggtccaggttcaaagagggatgctcacttctgcgctgtctgcagcgattacgcatcgggatatcactatggagtctggtcgtgtgaaggatgtaaggccttttttaaaagaagcattcaaggacataatgattatatttgtccagctacaaatcagtgtacaatcgataaaaaccggcgcaagagctgccaggcctgccgacttcggaagtgttacgaagtgggaatggtgaagtgtggctcccggagagagagatgtgggtaccgccttgtgcggagacagagaagtgccgacgagcagctgcactgtgccggcaaggccaagagaagtggcggccacgcgccccgagtgcgggagctgctgctggacgccctgagccccgagcagctagtgctcaccctcctggaggctgagccgccccatgtgctgatcagccgccccagtgcgcccttcaccgaggcctccatgatgatgtccctgaccaagttggccgacaaggagttggtacacatgatcagctgggccaagaagattcccggctttgtggagctcagcctgttcgaccaagtgcggctcttggagagctgttggatggaggtgttaatgatggggctgatgtggcgctcaattgaccaccccggcaagctcatctttgctccagatcttgttctggacagggatgaggggaaatgcgtagaaggaattctggaaatctttgacatgctcctggcaactacttcaaggtttcgagagttaaaactccaacacaaagaatatctctgtgtcaaggccatgatcctgctcaattccagtatgtaccctctggtcacagcgacccaggatgctgacagcagccggaagctggctcacttgctgaacgccgtgaccgatgctttggtttgggtgattgccaagagcggcatctcctcccagcagcaatccatgcgcctggctaacctcctgatgctcctgtcccacgtcaggcatgcgagtaacaagggcatggaacatctgctcaacatgaagtgcaaaaatgtggtcccagtgtatgacctgctgctggagatgctgaatgcccacgtgcttcgcgggtgcaagtcctccatcacggggtccgagtgcagcccggcagaggacagtaaaagcaaagagggctcccagaacccacagtctcagtgacgcctggccctgaggtgaactggcccacagaggtcacaggctgaagcgt

SEQ ID NO: 130694 - DNA, 1427 bp, Homo sapiens
  Payload ID: 5552
  Gene Symbol: ESR2
  Gene Name: estrogen receptor 2 (ER beta)
  Uniprot ID: Q92731
  ENST ID: ENST00000344288
  CDS Start-End: 52-1023
gacctttgtgcctcttcttgcaaggtgttttctcagctgttatctcaagacatggatataaaaaactcaccatctagccttaattctccttcctcctacaactgcagtcaatccatcttacccctggagcacggctccatatacataccttcctcctatgtagacagccaccatgaatatccagccatgacattctatagccctgctgtgatgaattacagcattcccagcaatgtcactaacttggaaggtgggcctggtcggcagaccacaagcccaaatgtgttgtggccaacacctgggcacctttctcctttagtggtccatcgccagttatcacatctgtatgcggaacctcaaaagagtccctggtgtgaagcaagatcgctagaacacaccttacctgtaaacagagagacactgaaaaggaaggttagtgggaaccgttgcgccagccctgttactggtccaggttcaaagagggatgctcacttctgcgctgtctgcagcgattacgcatcgggatatcactatggagtctggtcgtgtgaaggatgtaaggccttttttaaaagaagcattcaaggacataatgattatatttgtccagctacaaatcagtgtacaatcgataaaaaccggcgcaagagctgccaggcctgccgacttcggaagtgttacgaagtgggaatggtgaagtgtggctcccggagagagagatgtgggtaccgccttgtgcggagacagagaagtgccgacgagcagctgcactgtgccggcaaggccaagagaagtggcggccacgcgccccgagtgcgggagctgctgctggacgccctgagccccgagcagctagtgctcaccctcctggaggctgagccgccccatgtgctgatcagccgccccagtgcgcccttcaccgaggcctccatgatgatgtccctgaccaagttggccgacaaggagttggtacacatgatcagctgggccaagaagattcccgggatgaggggaaatgcgtagaaggaattctggaaatctttgacatgctcctggcaactacttcaaggtttcgagagttaaaactccaacacaaagaatatctctgtgtcaaggccatgatcctgctcaattccagtatgtaccctctggtcacagcgacccaggatgctgacagcagccggaagctggctcacttgctgaacgccgtgaccgatgctttggtttgggtgattgccaagagcggcatctcctcccagcagcaatccatgcgcctggctaacctcctgatgctcctgtcccacgtcaggcatgcgagggcagaaaaggcctctcaaacactcacctcatttggaatgaagatggagactcttttgcctgaagcaacgatggagcagtgaccctctaatcaactcggtggcctaaag

SEQ ID NO: 130695 - DNA, 1899 bp, Homo sapiens
  Payload ID: 5552
  Gene Symbol: ESR2
  Gene Name: estrogen receptor 2 (ER beta)
  Uniprot ID: Q92731
  ENST ID: ENST00000358599
  CDS Start-End: 306-1793
gatgccagttaactgtcgagaggggacgctccctcctcgtaggcgtccacactggagaaggaataagatgggcgattgcctgggaagcctgacagggcggcggcagctgggatgctggagaggactggccccttgagttactgagtccgatgaatgtgcttgctctgctggaggaaccgcgctcaggttacagtcatcccaatatggttctgaagccattatacttgcccacgaatctttgagaacattataatgacctttgtgcctcttcttgcaaggtgttttctcagctgttatctcaagacatggatataaaaaactcaccatctagccttaattctccttcctcctacaactgcagtcaatccatcttacccctggagcacggctccatatacataccttcctcctatgtagacagccaccatgaatatccagccatgacattctatagccctgctgtgatgaattacagcattcccagcaatgtcactaacttggaaggtgggcctggtcggcagaccacaagcccaaatgtgttgtggccaacacctgggcacctttctcctttagtggtccatcgccagttatcacatctgtatgcggaacctcaaaagagtccctggtgtgaagcaagatcgctagaacacaccttacctgtaaacagagagacactgaaaaggaaggttagtgggaaccgttgcgccagccctgttactggtccaggttcaaagagggatgctcacttctgcgctgtctgcagcgattacgcatcgggatatcactatggagtctggtcgtgtgaaggatgtaaggccttttttaaaagaagcattcaaggacataatgattatatttgtccagctacaaatcagtgtacaatcgataaaaaccggcgcaagagctgccaggcctgccgacttcggaagtgttacgaagtgggaatggtgaagtgtggctcccggagagagagatgtgggtaccgccttgtgcggagacagagaagtgccgacgagcagctgcactgtgccggcaaggccaagagaagtggcggccacgcgccccgagtgcgggagctgctgctggacgccctgagccccgagcagctagtgctcaccctcctggaggctgagccgccccatgtgctgatcagccgccccagtgcgcccttcaccgaggcctccatgatgatgtccctgaccaagttggccgacaaggagttggtacacatgatcagctgggccaagaagattcccggctttgtggagctcagcctgttcgaccaagtgcggctcttggagagctgttggatggaggtgttaatgatggggctgatgtggcgctcaattgaccaccccggcaagctcatctttgctccagatcttgttctggacagggatgaggggaaatgcgtagaaggaattctggaaatctttgacatgctcctggcaactacttcaaggtttcgagagttaaaactccaacacaaagaatatctctgtgtcaaggccatgatcctgctcaattccagtatgtaccctctggtcacagcgacccaggatgctgacagcagccggaagctggctcacttgctgaacgccgtgaccgatgctttggtttgggtgattgccaagagcggcatctcctcccagcagcaatccatgcgcctggctaacctcctgatgctcctgtcccacgtcaggcatgcgagggcagaaaaggcctctcaaacactcacctcatttggaatgaagatggagactcttttgcctgaagcaacgatggagcagtgaccctctaatcaactcggtggcctaaagaaaaatcttgggtaacattttcacttcagtttccctctgggatcattgtaatccatgaaaaaaataattttaaagaaag

SEQ ID NO: 130696 - DNA, 1883 bp, Homo sapiens
  Payload ID: 5552
  Gene Symbol: ESR2
  Gene Name: estrogen receptor 2 (ER beta)
  Uniprot ID: Q92731
  ENST ID: ENST00000555278
  CDS Start-End: 1-1446
atggatataaaaaactcaccatctagccttaattctccttcctcctacaactgcagtcaatccatcttacccctggagcacggctccatatacataccttcctcctatgtagacagccaccatgaatatccagccatgacattctatagccctgctgtgatgaattacagcattcccagcaatgtcactaacttggaaggtgggcctggtcggcagaccacaagcccaaatgtgttgtggccaacacctgggcacctttctcctttagtggtccatcgccagttatcacatctgtatgcggaacctcaaaagagtccctggtgtgaagcaagatcgctagaacacaccttacctgtaaacagagagacactgaaaaggaaggttagtgggaaccgttgcgccagccctgttactggtccaggttcaaagagggatgctcacttctgcgctgtctgcagcgattacgcatcgggatatcactatggagtctggtcgtgtgaaggatgtaaggccttttttaaaagaagcattcaaggacataatgattatatttgtccagctacaaatcagtgtacaatcgataaaaaccggcgcaagagctgccaggcctgccgacttcggaagtgttacgaagtgggaatggtgaagtgtggctcccggagagagagatgtgggtaccgccttgtgcggagacagagaagtgccgacgagcagctgcactgtgccggcaaggccaagagaagtggcggccacgcgccccgagtgcgggagctgctgctggacgccctgagccccgagcagctagtgctcaccctcctggaggctgagccgccccatgtgctgatcagccgccccagtgcgcccttcaccgaggcctccatgatgatgtccctgaccaagttggccgacaaggagttggtacacatgatcagctgggccaagaagattcccggctttgtggagctcagcctgttcgaccaagtgcggctcttggagagctgttggatggaggtgttaatgatggggctgatgtggcgctcaattgaccaccccggcaagctcatctttgctccagatcttgttctggacagggatgaggggaaatgcgtagaaggaattctggaaatctttgacatgctcctggcaactacttcaaggtttcgagagttaaaactccaacacaaagaatatctctgtgtcaaggccatgatcctgctcaattccagtatgtaccctctggtcacagcgacccaggatgctgacagcagccggaagctggctcacttgctgaacgccgtgaccgatgctttggtttgggtgattgccaagagcggcatctcctcccagcagcaatccatgcgcctggctaacctcctgatgctcctgtcccacgtcaggcatgcgagatggggagaaaagcaattcattcatttgaagttatcttagtgccaagagtcatgtgaaaatgtcccttgcatgtgggcaatgaaagatttgcagacgatataaaacccagactacctcataaaagagttttgggaatacactgagctttgagtgaaagaagctgcagtggcctccctggagatggggagcaaaccagcttaaaggcccttatcctgaggaagagacaaaaattgacatgcacaatattaagctttgaaatgcagaccacacttcctttcactgcaactttgacttgtcccgcatctctacttaagggcagaaaaggcctctcaaacactcacctcatttggaatgaagatggagactcttttgcctgaagcaacgatggagcagtgaccctctaatcaactcggtggcctaaagaaaaatcttgggtaacattttcacttcagtttccctctgggatcattgtaatc

SEQ ID NO: 130697 - DNA, 3588 bp, Homo sapiens
  Payload ID: 5552
  Gene Symbol: ESR2
  Gene Name: estrogen receptor 2 (ER beta)
  Uniprot ID: Q92731
  ENST ID: ENST00000554572
  CDS Start-End: 1275-2762
cgagaggggacgctccctcctcgtaggcgtccacactggagaaggaataagatgggcgattgcctgggaagcctgacagggcggcggcagctgggatgctggagaggactggccccttgagttactgagtccgatgaatgtgcttgctctgctggaggaaccgcgctcaggttacagtcatcccaatatggttctgaagacatccaagtggagatatggcatttaaattcatgagattggatgagatcccaccaaaggaacaggtttaggtggagacaaccaaataccgatgcctaggacactgcagtgtttagaattcaaggagatgagaaggaaacaggagggaagattgaaaagaagagtccagtgtgttatgaggaaaaccccaagagcatgctgccttacaagacaggtgaaaaatgtgttctgtgaaagaaagagtaattaactgttaaatgttacagactgatcaaataaaatgaagactgagaatggcctgtttgtaagagggagacatcaacctgttgtggaaaagaatgatcacttaaagtctttagaaattctgaaccaactctctagcaggtgatccttgttagaatttgagcccttaacgctatccaggactggaggttgaagggacgatagagggagcaggaggagaatgcacatggattaaggagcgagaacacagaaatcctgggctctcttctcccagccacaaggttaggttgaaaaacagagcagatggaggtagtttgtagcctacaggtgccctgaatgaagcttccacagtgctaaagtggaagaacgagggactccaagggaaggattcaaggctgggcccatgcacctgtgtaattcagaagagaccccagaggagatcagcgccctctaattagccctgtatctgggctctacaggacagacatgcctccatttatgcaacaaataagaacagcatctcatgacagtggagaaaacatgggatgtgcaggtagggttttgttttgcctcttggtagtttctttcctacggaaaattctccctctgatctttccaagtcaaaggcttcagcaaacatttgttgaacgcgtggattgtgctaggtgggtgttatggaccatggagaatgctagagatgtaagacatgcgctgtccaatcgcagcgcaggttgtgttgacagccattatacttgcccacgaatctttgagaacattataatgacctttgtgcctcttcttgcaaggtgttttctcagctgttatctcaagacatggatataaaaaactcaccatctagccttaattctccttcctcctacaactgcagtcaatccatcttacccctggagcacggctccatatacataccttcctcctatgtagacagccaccatgaatatccagccatgacattctatagccctgctgtgatgaattacagcattcccagcaatgtcactaacttggaaggtgggcctggtcggcagaccacaagcccaaatgtgttgtggccaacacctgggcacctttctcctttagtggtccatcgccagttatcacatctgtatgcggaacctcaaaagagtccctggtgtgaagcaagatcgctagaacacaccttacctgtaaacagagagacactgaaaaggaaggttagtgggaaccgttgcgccagccctgttactggtccaggttcaaagagggatgctcacttctgcgctgtctgcagcgattacgcatcgggatatcactatggagtctggtcgtgtgaaggatgtaaggccttttttaaaagaagcattcaaggacataatgattatatttgtccagctacaaatcagtgtacaatcgataaaaaccggcgcaagagctgccaggcctgccgacttcggaagtgttacgaagtgggaatggtgaagtgtggctcccggagagagagatgtgggtaccgccttgtgcggagacagagaagtgccgacgagcagctgcactgtgccggcaaggccaagagaagtggcggccacgcgccccgagtgcgggagctgctgctggacgccctgagccccgagcagctagtgctcaccctcctggaggctgagccgccccatgtgctgatcagccgccccagtgcgcccttcaccgaggcctccatgatgatgtccctgaccaagttggccgacaaggagttggtacacatgatcagctgggccaagaagattcccggctttgtggagctcagcctgttcgaccaagtgcggctcttggagagctgttggatggaggtgttaatgatggggctgatgtggcgctcaattgaccaccccggcaagctcatctttgctccagatcttgttctggacagggatgaggggaaatgcgtagaaggaattctggaaatctttgacatgctcctggcaactacttcaaggtttcgagagttaaaactccaacacaaagaatatctctgtgtcaaggccatgatcctgctcaattccagtatgtaccctctggtcacagcgacccaggatgctgacagcagccggaagctggctcacttgctgaacgccgtgaccgatgctttggtttgggtgattgccaagagcggcatctcctcccagcagcaatccatgcgcctggctaacctcctgatgctcctgtcccacgtcaggcatgcgagggcagaaaaggcctctcaaacactcacctcatttggaatgaagatggagactcttttgcctgaagcaacgatggagcagtgaccctctaatcaactcggtggcctaaagaaaaatcttgggtaacattttcacttcagtttccctctgggatcattgtaatccatgaaaaaaataattttaaagaaagagttaaaatactttgaagttagttatgtggttaaaaaccaccttcctttctattatcaatccaacaatttgataactgtaaacgctaaagtgaagacggattctcttcagatggtctccttaactgcccagggcttgcagatgtctcacccatgaggggcaccaatgtagaaagctgaggcttcatctactgatgagcttcactggtttcccctgaggtttgtgctttggcagagaaggggaggaggggactgggattgtgtggtcagctgtgcctgccaacagatgcaggttaggaactgtgttcagtatcttccaataagaaaggggaaatgccgatgcctatcctctttgtttaggtagaaagtaaaatgctactggacttaaatgggcaacaaggggctttgcctgttcatttgccatggagagggctgggaatccaggtgcggtggctcacacctgtaatcccaacactttgggaggccgaggtgggcagatcagttgaggtcaggagtttgaaaccagcctggccaacatggcgaaaccccgtctctattaaaaatataataattagccaggcatggtggtgtgtgcttgtaatcccagctactcaggaggctgaggcatgagaatggcttgaacctggaaggcaaaggttgcagtgagccgagattgggccaccgcactccagcctgggtgactgacagagtgagactctgtc

SEQ ID NO: 130698 - DNA, 5458 bp, Homo sapiens
  Payload ID: 5552
  Gene Symbol: ESR2
  Gene Name: estrogen receptor 2 (ER beta)
  Uniprot ID: Q92731
  ENST ID: ENST00000557772
  CDS Start-End: 1-1419
atggatataaaaaactcaccatctagccttaattctccttcctcctacaactgcagtcaatccatcttacccctggagcacggctccatatacataccttcctcctatgtagacagccaccatgaatatccagccatgacattctatagccctgctgtgatgaattacagcattcccagcaatgtcactaacttggaaggtgggcctggtcggcagaccacaagcccaaatgtgttgtggccaacacctgggcacctttctcctttagtggtccatcgccagttatcacatctgtatgcggaacctcaaaagagtccctggtgtgaagcaagatcgctagaacacaccttacctgtaaacagagagacactgaaaaggaaggttagtgggaaccgttgcgccagccctgttactggtccaggttcaaagagggatgctcacttctgcgctgtctgcagcgattacgcatcgggatatcactatggagtctggtcgtgtgaaggatgtaaggccttttttaaaagaagcattcaaggacataatgattatatttgtccagctacaaatcagtgtacaatcgataaaaaccggcgcaagagctgccaggcctgccgacttcggaagtgttacgaagtgggaatggtgaagtgtggctcccggagagagagatgtgggtaccgccttgtgcggagacagagaagtgccgacgagcagctgcactgtgccggcaaggccaagagaagtggcggccacgcgccccgagtgcgggagctgctgctggacgccctgagccccgagcagctagtgctcaccctcctggaggctgagccgccccatgtgctgatcagccgccccagtgcgcccttcaccgaggcctccatgatgatgtccctgaccaagttggccgacaaggagttggtacacatgatcagctgggccaagaagattcccggctttgtggagctcagcctgttcgaccaagtgcggctcttggagagctgttggatggaggtgttaatgatggggctgatgtggcgctcaattgaccaccccggcaagctcatctttgctccagatcttgttctggacagggatgaggggaaatgcgtagaaggaattctggaaatctttgacatgctcctggcaactacttcaaggtttcgagagttaaaactccaacacaaagaatatctctgtgtcaaggccatgatcctgctcaattccagtatgtaccctctggtcacagcgacccaggatgctgacagcagccggaagctggctcacttgctgaacgccgtgaccgatgctttggtttgggtgattgccaagagcggcatctcctcccagcagcaatccatgcgcctggctaacctcctgatgctcctgtcccacgtcaggcatgcgaggtacgcgccctaaggagctgctctgcttgggcttgggatgggattatgtgctccacggagggtgaagtgatttgggaaaagtgtctgcaagttaaggaaaatgaatgcctgaaagggaatggggaatttgtcagttcacacacctgtaagcaaagatgggcacagagtgggcatggaaggaatgtcatgtggtatcttacaggctctgcatggcagccagtggtggctcatgggtttttcaattgctggggtttatagcctgtttatggagtcctaaaaggggcagttcctcccctaacacgaactgccacccctgtttacaccacccagggctgaggccctgaggccactttttgtggagaggctaagacccgctcccctagatggcccctcgagctggtgatgcgaagaagtgcacaaatgcttccctaagagttgttctttcggtggcatcaggaaattaaggataagacttaagagaagtggtggacccagcagatttaggaaggcagggctgtaggtagggcatgtttctgatcaggaaacgtaattgtgtgtgctgatgaagagggtgtgcagtggtggctactgttggtacaatgatgctcagtgcttggtgtcacccacgatgagggtagccttgccctggagctggaggaggggaggggagggtggaaggtaattaactggtcactgaggaggcaagtctagaggctgtggagaaggacaatatacacctcgagaatcttaagtgagatgaagacctctgcctttcccctttaatgattgctcagcacatagccatttgcagaacagatcctgtgtttgtagattccttcattgtgaatttatctgcttgctaaaatttatttgtaaccccaaaatcaatatttgtggtgtttttgaggtcatgaacagagtggcagaaattttgagttgccctttatgtacagtcccagctgagatggaacaagcagctgctctcatactgtcaacaagtgtcctttacttggtctacttagtgccatggttttacatttttgtgcttttggtgacttcactgtttaaaatgcccccctggtgtggtgctgaagacctgtctagtgttcctcggtgtgaaaaagctgtgatgtgccttatggagaaagtatgtgttaagctttgctcgggtgtgagttatagtgctgctggccatgagttcaatgttaatgagtcaatggtatttatcacataaggcatctttagaaagaaacacacataaaacaaggttttgtattgatcagctgatgaagatgtggccagaggcttgcaggaacctaaccctgtatttcccctatgagtgaggattcagtgttcacagtgactttacggaacataattaccgcaaacaatgaggattgattgtcctatgtgtcaggccattgtaggtgtgtggtgggacacagaggctgacaagacatcgtccttgcccttgagcctaaattatcagggggagctggatgcacgagccatggataaatgggctgggggaagagtgggtttaggggtggggtagactggctctgagcaaagagagccggggaaggcttcggggttcctgtggctgcctcggaggagggaatctcagcacctttttgtccccatagtaacaagggcatggaacatctgctcaacatgaagtgcaaaaatgtggtcccagtgtatgacctgctgctggagatgctgaatgcccacgtgcttcgcgggtgcaagtcctccatcacggggtccgagtgcagcccggcagaggacagtaaaagcaaagagggctcccagaacccacagtctcagtgacgcctggccctgaggtgaactggcccacagaggtcacaggctgaagcgtgaactccagtgtgtcaggagcctgggcttcatctttctgctgtgtggtccctcatttggtgatggcaggcttggtcatgtaccatccttccctccaccttcccaactctcaggagtcggtgtgaggaagccatagtttcccttgttagcagagggcacatttgaatgcagcgtttccacactcaatggcctcataggatctcagtgtggtctttcttactttccttcttccttcctcccctttgtgaaacatcttaaaggttttggaatgaatggtggaaatctgacttggaagggctgcgaatcagaaaggggagaggaagtgacacgcttacagaagtgggctaacccttcttgtgtggcacacactacccttccctctgagagttgacctttgctgttttccggaccactccattgtaagattgaaaacccctgtggcaattgcgtacttacctcccaggcctgtggggactgatcatatcatatgatgcttattctgtcaaaggccagagggactgtggttaagctgggatgtgagtcatgttctctccctgaccttgctgccagctgcacacagatttgtccctctcgatttgtattcacagagcctgccaataatttggggtatgtgtgtatgagcgtgtgatcattttcatgcaggactgtgggagatacaaatctcgctgcttctggagctgctcttccttaaacctgttgtcccatggggccagcgtgggtgctggagaaaggccgtgtttgcaggaatggggttctctcctgtgggtgtgggtgacagccacagtgtttccctggggcaatgtggatgcagtttccatcttgtacaacctcataagtagcagccacaattgccccatcagtcaccacaagtagtcagggatactttgggctgtggatgtgtgcagtgtgctgttttatggatggatgagtagctatgcaccccagtgtgtcagctctggggccacactgtatagccttgatgagtacgccccttgaacaagacccagtttgtgaactctccttaaagagaaatatttagggataattatttatagcaagaaagaattcttttacacttgagagctcttttaaaaatattttcttattggaaaatttatatggtgggcagggtgaaaaagaaacagtaaaaatattagttcttattccaagtggaacataaataggacatgaagaagggcacctctgaaatgacaactttaactcaccttttaaaagatgtgaaatttccagttttggatacacggtgaatatgtaaaatgagtaacagcatactatggaagccagcaattaaataatcatgtttcattattgcagtaacgttttaaacaattaccttgtgatatgatattaaatatattttctttttgaaaatatgttcactttgggtagcacatcctgtatttactaagtcattaggaagactgcattcagtgttaccaagactggtttttgctagtaagacctcgaataatccataattttgatattggtgcaattttactataagttgagcttagctgtttcagaaatgcttggacaagtacctagagaacacactgatgtctgtgttctgaggcagtctgaagttattcttagagactcagttacagctttagtaagatttagtacaggcaggataagcttggtttcataggaaccagggaaccagtgttagtgtcagcttctttcctcctggtcagcctagaatcccccactcccaatagaggggtttggaagctggagagtaggaagtaagaggcaaagaaggcagccttcagcaactcattatctgccagtgaaattctattaaatgtatttttaaaagagattaccaggtaacaaaaacataaaaaaccaaaacaaggccagatgtggtggctcacgcctgtaatcccagcactttgggaggccgaggtgggcgaaccacttgagcccatgagtttgactccaggctgggcaacatggaaaccctgtcctacaaaagatacaaaaattagccaggcgtggtggtgcaggcctgtagttccagctacctgggaggctgaggtgggaggatcacctgagcctggggagatcaaggctgcagtccattgcactccagcctgggtgacagagggagaccctgtctc

SEQ ID NO: 130699 - DNA, 1634 bp, Homo sapiens
  Payload ID: 5552
  Gene Symbol: ESR2
  Gene Name:: estrogen receptor 2 (ER beta)
  Uniprot ID: Q92731
  ENST ID: ENST00000553796
  CDS Start-End: 1-1425
atggatataaaaaactcaccatctagccttaattctccttcctcctacaactgcagtcaatccatcttacccctggagcacggctccatatacataccttcctcctatgtagacagccaccatgaatatccagccatgacattctatagccctgctgtgatgaattacagcattcccagcaatgtcactaacttggaaggtgggcctggtcggcagaccacaagcccaaatgtgttgtggccaacacctgggcacctttctcctttagtggtccatcgccagttatcacatctgtatgcggaacctcaaaagagtccctggtgtgaagcaagatcgctagaacacaccttacctgtaaacagagagacactgaaaaggaaggttagtgggaaccgttgcgccagccctgttactggtccaggttcaaagagggatgctcacttctgcgctgtctgcagcgattacgcatcgggatatcactatggagtctggtcgtgtgaaggatgtaaggccttttttaaaagaagcattcaaggacataatgattatatttgtccagctacaaatcagtgtacaatcgataaaaaccggcgcaagagctgccaggcctgccgacttcggaagtgttacgaagtgggaatggtgaagtgtggctcccggagagagagatgtgggtaccgccttgtgcggagacagagaagtgccgacgagcagctgcactgtgccggcaaggccaagagaagtggcggccacgcgccccgagtgcgggagctgctgctggacgccctgagccccgagcagctagtgctcaccctcctggaggctgagccgccccatgtgctgatcagccgccccagtgcgcccttcaccgaggcctccatgatgatgtccctgaccaagttggccgacaaggagttggtacacatgatcagctgggccaagaagattcccggctttgtggagctcagcctgttcgaccaagtgcggctcttggagagctgttggatggaggtgttaatgatggggctgatgtggcgctcaattgaccaccccggcaagctcatctttgctccagatcttgttctggacagggatgaggggaaatgcgtagaaggaattctggaaatctttgacatgctcctggcaactacttcaaggtttcgagagttaaaactccaacacaaagaatatctctgtgtcaaggccatgatcctgctcaattccagtatgtaccctctggtcacagcgacccaggatgctgacagcagccggaagctggctcacttgctgaacgccgtgaccgatgctttggtttgggtgattgccaagagcggcatctcctcccagcagcaatccatgcgcctggctaacctcctgatgctcctgtcccacgtcaggcatgcgaggtcctgtgtatacaagtaaaatgcagctcacaaaagtcctggtatccagtgcatcgattatttggatagattttctgtaatcattctgagtttgattagaattatatcctttacagatggggagaaaagcaattcattcatttgaagttatcttagtgccaagagtcatgtgaaaatgtcccttgcatgtgggcaatgaaagatttgcagacgatataaaacccagac

SEQ ID NO: 130700 - DNA, 2695 bp, Homo sapiens
  Payload ID: 5552
  Gene Symbol: ESR2
  Gene Name: estrogen receptor 2 (ER beta)
  ENST ID: ENST00000556275
  CDS Start-End: 469-2010
ctcggtctttaaaaggaagaaggggcttatcgttaagtcgcttgtgatcttttcagtttctccagctgctggctttttggacacccactcccccgccaggaggcagttgcaagcgcggaggctgcgagaaataactgcctcttgaaacttgcagggcgaagagcaggcggcgagcgctgggccggggagggaccacccgagctgcgacgggctctggggctgcggggcagggctggcgcccggagcctgagctgcaggaggtgcgctcgctttcctcaacaggtggcggcggggcgcgcgccgggagaccccccctaatgcgggaaaagcacgtgtccgcattttagagaaggcaaggccggtgtgtttatctgcaagccattatacttgcccacgaatctttgagaacattataatgacctttgtgcctcttcttgcaaggtgttttctcagctgttatctcaagacatggatataaaaaactcaccatctagccttaattctccttcctcctacaactgcagtcaatccatcttacccctggagcacggctccatatacataccttcctcctatgtagacagccaccatgaatatccagccatgacattctatagccctgctgtgatgaattacagcattcccagcaatgtcactaacttggaaggtgggcctggtcggcagaccacaagcccaaatgtgttgtggccaacacctgggcacctttctcctttagtggtccatcgccagttatcacatctgtatgcggaacctcaaaagagtccctggtgtgaagcaagatcgctagaacacaccttacctgtaaacagagagacactgaaaaggaaggttagtgggaaccgttgcgccagccctgttactggtccaggttcaaagagggatgctcacttctgcgctgtctgcagcgattacgcatcgggatatcactatggagtctggtcgtgtgaaggatgtaaggccttttttaaaagaagcattcaaggacataatgattatatttgtccagctacaaatcagtgtacaatcgataaaaaccggcgcaagagctgccaggcctgccgacttcggaagtgttacgaagtgggaatggtgaagtgtggctcccggagagagagatgtgggtaccgccttgtgcggagacagagaagtgccgacgagcagctgcactgtgccggcaaggccaagagaagtggcggccacgcgccccgagtgcgggagctgctgctggacgccctgagccccgagcagctagtgctcaccctcctggaggctgagccgccccatgtgctgatcagccgccccagtgcgcccttcaccgaggcctccatgatgatgtccctgaccaagttggccgacaaggagttggtacacatgatcagctgggccaagaagattcccggctttgtggagctcagcctgttcgaccaagtgcggctcttggagagctgttggatggaggtgttaatgatggggctgatgtggcgctcaattgaccaccccggcaagctcatctttgctccagatcttgttctggacagggatgaggggaaatgcgtagaaggaattctggaaatctttgacatgctcctggcaactacttcaaggtttcgagagttaaaactccaacacaaagaatatctctgtgtcaaggccatgatcctgctcaattccagtatgtaccctctggtcacagcgacccaggatgctgacagcagccggaagctggctcacttgctgaacgccgtgaccgatgctttggtttgggtgattgccaagagcggcatctcctcccagcagcaatccatgcgcctggctaacctcctgatgctcctgtcccacgtcaggcatgcgagctctctctcactctcttggagattgtttatgctgagggaagccagctgccatggtgtgaggcagactcctggaggagcccacgtgtctgtaagtagaagcagatcttttgaggcctgtcaacagccacgggaatgagcttggaagcagatcccacctcctccctcacacaagtcgagccttcagatgagcctgcagcctttgtcgacaccttgaccgcattctcatgagagaccttgagccagagatacttagctaagccatgcccatggactcctgacccacagaaactgtgataataagtttgttgtttcaagctgctaacttatggagtaatatgttacacaaaaatagctaatatatagctcaaaactggaagcaacccaaatatctattaactggtagataaacaaactactcatttccaaacttatttccaaaactggaacactacttggcaatcaaataattaactatgcattaagtgtaacaacctggatgaatctcaaaggcattatgttaagtgaaacaagtgagccacgtaagactacatactgtttgattccctctatatgatattctagaaaaggcaaaactatagtaataggaaacagtgagtgatcacctagggttgaagacaggtgaaaggggattgactgcaaagaggcaggaggaaacgtcttgggagatggagatgttccttatattgatggcggtggtggttacacaactgcacttttatcaaaacttacctaactgctacttaaaataggtgtattaatatttttactgtatgtaaattatacctcaataaatttgattt

SEQ ID NO: 130701 - DNA, 2379 bp, Homo sapiens
  Payload ID: 5553
  Gene Symbol: EBAG9
  Gene Name: estrogen receptor binding site associated, antigen, 9
  Uniprot ID: O00559
  ENST ID: ENST00000337573
  CDS Start-End: 301-942
gtgcagcattcgccatgctccgctcacgcgtgggagactgggctgtggggtaccggcccggaaagcacgcagcctccaaagccgccttcctcagggaaatttgcgtgaccttactgccctccgtctacaggccttgtacctctccaggccgatttttccacaatttaaatctcagttcacctggtatccagctccagcaacttagagcgtttcacgtcacgccgggcgccaggcgtcggcttgtataacctgaaaacgctcctgtttttctcatctgtgcagtgggttttgattcccaccatggccatcacccagtttcggttatttaaattttgtacctgcctagcaacagtattctcattcctaaagagattaatatgcagatctggcagaggacggaaattaagtggagaccaaataactttgccaactacagttgattattcatcagttcctaagcagacagatgttgaagagtggacttcctgggatgaagatgcacccaccagtgtaaagatcgaaggagggaatgggaatgtggcaacacaacaaaattctttggaacaactggaacctgactattttaaggacatgacaccaactattaggaaaactcagaaaattgttattaagaagagagaaccattgaattttggcatcccagatgggagcacaggtttctctagtagattagcagctacacaagatctgccttttattcatcagtcttctgaattaggtgacttagatacctggcaggaaaataccaatgcatgggaagaagaagaagatgcagcctggcaagcagaagaagttctgagacagcagaaactagcagacagagaaaagagagcagccgaacaacaaaggaagaaaatggaaaaggaagcacaacggctaatgaagaaggaacaaaacaaaattggtgtgaaactttcataacacatgttcaaattttatcatgccagtaggagaaatctcagctccacaacccaagcaacatttgtatggatttaagagtattttaagaagacatactgcttgattttaatacattgatcaggccatccaggacaccacgattctcccaaagtaccttgaactcttagtgattgagactcaaaaaaacaaaaaagacttgagacaatgttttcttcaacatgctccaaatataagacatttgtttgctgtacagaaagtatcacaaatggaatatatcagtacctctcaagctagtgtttctagctaaataaatgggtgtatataattttatggtggaaaagaactgtactgtctgttatgatttccttcaatgtgcataatgataaaataaataattttaatattcttttgtttccatggttacctgacctaaattagataaattgtagggctttagctttcttatttttgtcaaaagttggtgttgacatacattccctctaatttgaactggtattgtttacgtttgatacaacattaaggaatttgatgattttcatttcatgaaaatgacattaaatgcaataattttacttatcataaacattttgtacatcattattttcttttggattagtgttgtcatacatgtaatttatatcacatgtataaacattgaaaatcaactaaaatgacatttgttctacattataacttgtgagtttcaagaactagtattagtagttttttcctttcattatagattgtaagatgttgtggtatctttgagtgccttagttcttccttcctcccaaaagccattaatttacaaatgcttaaagccatcaggtcaaatatttcaaagcctttagatgatttctgtactagctttagatgtctgacgttatgtaggttacctgtgttcttggctaggaaaacattattgattcattaaatcataaaggtgggaataataatcttttatttatgatgttgattggctccaaaatagtcttaaggaaataaatactgggtctgtaggggaaaagtagacttcatagtttaaaatcccattaaccttttcaccgcagttgaaatgcatccagcctgattttcctatcattttggaatttttaaggatttttactttcttaagttactgcctagaatcaacattcggtgagattttgaaatgtcatagatactgtacaggccaaaccttactaatttattttacttaaagtgatattttatagaaaaatcataagttatacaatgagaaccctttaagcccttagcctaagctttcagactaaatgtgattatagaataagatgaaagttaactttggtacagagctttttatagccccaaattatatttccagttattatattcattagaatttctgctaataaactcccaacttaaatagaa

SEQ ID NO: 130702 - DNA, 1467 bp, Homo sapiens
  Payload ID: 5553
  Gene Symbol: EBAG9
  Gene Name: estrogen receptor binding site associated, antigen, 9
  Uniprot ID: O00559
  ENST ID: ENST00000395785
  CDS Start-End: 225-866
gatgaaggggcggccatggcagctgcgcagaggcaacgcaggctgctacggagcgcgcgcccggctttgaatgagcggggctgggagtgagcgggcggagcgcgagctcgaggaagagacaggcagcgcgcgtgagcgcgccttgtgtgcgcgcgcggcccgcggcagctcggagcctccgccgggcgggcggggagggggaggggcaggttttgattcccaccatggccatcacccagtttcggttatttaaattttgtacctgcctagcaacagtattctcattcctaaagagattaatatgcagatctggcagaggacggaaattaagtggagaccaaataactttgccaactacagttgattattcatcagttcctaagcagacagatgttgaagagtggacttcctgggatgaagatgcacccaccagtgtaaagatcgaaggagggaatgggaatgtggcaacacaacaaaattctttggaacaactggaacctgactattttaaggacatgacaccaactattaggaaaactcagaaaattgttattaagaagagagaaccattgaattttggcatcccagatgggagcacaggtttctctagtagattagcagctacacaagatctgccttttattcatcagtcttctgaattaggtgacttagatacctggcaggaaaataccaatgcatgggaagaagaagaagatgcagcctggcaagcagaagaagttctgagacagcagaaactagcagacagagaaaagagagcagccgaacaacaaaggaagaaaatggaaaaggaagcacaacggctaatgaagaaggaacaaaacaaaattggtgtgaaactttcataacacatgttcaaattttatcatgccagtaggagaaatctcagctccacaacccaagcaacatttgtatggatttaagagtattttaagaagacatactgcttgattttaatacattgatcaggccatccaggacaccacgattctcccaaagtaccttgaactcttagtgattgagactcaaaaaaacaaaaaagacttgagacaatgttttcttcaacatgctccaaatataagacatttgtttgctgtacagaaagtatcacaaatggaatatatcagtacctctcaagctagtgtttctagctaaataaatgggtgtatataattttatggtggaaaagaactgtactgtctgttatgatttccttcaatgtgcataatgataaaataaataattttaatattcttttgtttccatggttacctgacctaaattagataaattgtagggctttagctttcttatttttgtcaaaagttggtgttgacatacattccctctaatttgaactggtattgtttacgtttgatacaacattaaggaatttgatgattttcatttcatgaaaatgacattaaatgcaataattttacttatcat

SEQ ID NO: 130703 - DNA, 777 bp, Homo sapiens
  Payload ID: 5553
  Gene Symbol: EBAG9
  Gene Name: estrogen receptor binding site associated, antigen, 9
  Uniprot ID: O00559
  ENST ID: ENST00000531677
  CDS Start-End: 1-777
atggccatcacccagtttcggttatttaaattttgtacctgcctagcaacagtattctcattcctaaagagattaatatgcagatctggcagaggacggaaattaagtggagaccaaataactttgccaactacagttgattattcatcagttcctaagcagacagatgttgaagagtggacttcctgggatgaagatgcacccaccagtgtaaagatcgaaggagggaatgggaatgtggcaacacaacaaaattctttggaacaactggaacctgactattttaaggacatgacaccaactattaggaaaactcagaaaattgttattaagaagagagaaccattgaattttggcatcccagatgggagcacaggtttctctagtagattagcagctacacaagatctgccttttattcatcagtcttctgaattaggtgacttagatacctggcaggaaaataccaatgcatgggaagaagaagaagatgcagcctggcaagcagaagaagttctgagatccaggaccaatgtatgtttactctgctctctcctgtttcatcatcccactcctacctccactccctacattaaccaatcagtaaagatagagagagtgagtctgggtcagtggagttacggaaagagtaaggaacagcagaaactagcagacagagaaaagagagcagccgaacaacaaaggaagaaaatggaaaaggaagcacaacggctaatgaagaaggaacaaaacaaaattggtgtgaaactttcataa

SEQ ID NO: 130704 - DNA, 706 bp, Homo sapiens
  Payload ID: 5553
  Gene Symbol: EBAG9
  Gene Name: estrogen receptor binding site associated, antigen, 9
  ENST ID: ENST00000530629
  CDS Start-End: 116-706
atggcacagaatgttcgattttactaccagctctcacactccgcttctgtttccccttctcttacgggccgctgctcaaacctttatttatcaaatttaagttttgattcccaccatggccatcacccagtttcggttatttaaattttgtacctgcctagcaacagtattctcattcctaaagagattaatatgcagatctggcagaggacggaaattaagtggagaccaaataactttgccaactacagttgattattcatcagttcctaagcagacagatgttgaagagtggacttcctgggatgaagatgcacccaccagtgtaaagatcgaaggagggaatgggaatgtggcaacacaacaaaattctttggaacaactggaacctgactattttaaggacatgacaccaactattaggaaaactcagaaaattgttattaagaagagagaaccattgaattttggcatcccagatgggagcacaggtttctctagtagattagcagctacacaagatctgccttttattcatcagtcttctgaattaggtgacttagatacctggcaggaaaataccaatgcatgggaagaagaagaagatgcagcctggcaagcagaagaagttctgagacagcagaaactagcagacagagaaaagagagcagccgaacaacaaaggaagaaaatggaaaaggaagca

SEQ ID NO: 130705 - DNA, 413 bp, Homo sapiens
  Payload ID: 5553
  Gene Symbol: EBAG9
  Gene Name: estrogen receptor binding site associated, antigen, 9
  ENST ID: ENST00000529931
  CDS Start-End: 291-413
gcgcgtgagcgcgccttgtgtgcgcgcgcggcccgcggcagctcggagcctccgccgggcgggcggggagggggaggggcagatctggcagaggacggaaattaagtggagaccaaataactttgccaactacagttgattattcatcagttcctaagcagacagatgttgaagagtggacttcctgggatgaagatgcacccaccagtgtaaagatcgaaggagggaatgggaatgtggcaacacaacaaaattctttggaacaactggaacctgactattttaaggacatgacaccaactattaggaaaactcagaaaattgttattaagaagagagaaccattgaattttggcatcccagatgggagcacaggtttctctagtagattagcagctacacaagatctgcct

SEQ ID NO: 130706 - DNA, 813 bp, Homo sapiens
  Payload ID: 5553
  Gene Symbol: EBAG9
  Gene Name: estrogen receptor binding site associated, antigen, 9
  ENST ID: ENST00000534318
  CDS Start-End: 579-813
ggtactcctaggtattggcatttctttaatagattcccagatttgtgaaccactggactaaatgagctccatggtaactttcaatttactagctatgtgactttggtcaagttatttgacctctcttaattcaatttcctcatctataaaatggatataaggaaatatattcatctgcaagttaaaaatatttaaagtattttaaatagtattatgttcatgtggttcaaactttaaaaggtacacagagatttaatatattctattttatacttttttattttttgaattgtagatttttgtattaatagatttaggtaaaattattttcaaaaactcagaatgaagggttttatccttacaaccattgaaaactcgaaaacctggtttttgacttgttaatatgatttaaattataattttaaaatttactgtgttatagtttctagagaaaggtaaaaaatatcttagatttttcttagtgcataataggtcttttcaggacaggagtatgacttttgaaatcaatttaatgcattttttgttttgtgcctcttccacaggttttgattcccaccatggccatcacccagtttcggttatttaaattttgtacctgcctagcaacagtattctcattcctaaagagattaatatgcagatctggcagaggacggaaattaagtggagaccaaataactttgccaactacagttgattattcatcagttcctaagcagacagatgttgaagagtggacttcctgggatgaagatgcacccaccagtgtaaagatcgaaggagggaatggga

SEQ ID NO: 130707 - DNA, 939 bp, Homo sapiens
  Payload ID: 5553
  Gene Symbol: EBAG9
  Gene Name: estrogen receptor binding site associated, antigen, 9
  ENST ID: ENST00000527709
  CDS Start-End: 293-754
ttcgccatgctccgctcacgcgtgggagactgggctgtggggtaccggcccggaaagcacgcagcctccaaagccgccttcctcagggaaatttgcgtgaccttactgccctccgtctacaggccttgtacctctccaggccgatttttccacaatttaaatctcagttcacctggtatccagctccagcaacttagagcgtttcacgtcacgccgggcgccaggcgtcggcttgtataacctgaaaacgctcctgtttttctcatctgtgcagtgggttttgattcccaccatggccatcacccagtttcggttatttaaattttgtacctgcctagcaacagtattctcattcctaaagagattaatatgcagatctggcagaggacggaaattaagtggagaccaaataactttgccaactacagttgattattcatcagttcctaagcagacagatgttgaagagtggacttcctgggatgaagatgcacccaccagtgtaaagatcgaaggagggaatgggaatgtggcaacacaacaaaattctttggaacaactggaacctgactattttaaggacatgacaccaactattaggaaaactcagaaaattgttattaagaagagagaaccattgaattttggcatcccagatgggagcacaggtttctctagtagattagcagctacacaagatctgccttttattcatcagtctacaagtcattgggttggggctacaatcatctgaaggcttgattgtggtcgaaggattcatttcaaagacagctcacttctacacctgacaaattaatgctatttgtttgcacaaagcctcagttccttgctgtgcacctctccaaggagctgcttgaatttctttatgatgtaactcctgattttcccatctgaattaggtgacttagatacctggca

SEQ ID NO: 130708 - DNA, 2186 bp, Homo sapiens
  Payload ID: 5553
  Gene Symbol: EBAG9
  Gene Name: estrogen receptor binding site associated, antigen, 9
  Uniprot ID: O00559
  ENST ID: ENST00000620557
  CDS Start-End: 116-757
atggcacagaatgttcgattttactaccagctctcacactccgcttctgtttccccttctcttacgggccgctgctcaaacctttatttatcaaatttaagttttgattcccaccatggccatcacccagtttcggttatttaaattttgtacctgcctagcaacagtattctcattcctaaagagattaatatgcagatctggcagaggacggaaattaagtggagaccaaataactttgccaactacagttgattattcatcagttcctaagcagacagatgttgaagagtggacttcctgggatgaagatgcacccaccagtgtaaagatcgaaggagggaatgggaatgtggcaacacaacaaaattctttggaacaactggaacctgactattttaaggacatgacaccaactattaggaaaactcagaaaattgttattaagaagagagaaccattgaattttggcatcccagatgggagcacaggtttctctagtagattagcagctacacaagatctgccttttattcatcagtcttctgaattaggtgacttagatacctggcaggaaaataccaatgcatgggaagaagaagaagatgcagcctggcaagcagaagaagttctgagacagcagaaactagcagacagagaaaagagagcagccgaacaacaaaggaagaaaatggaaaaggaagcacaacggctaatgaagaaggaacaaaacaaaattggtgtgaaactttcataacacatgttcaaattttatcatgccagtaggagaaatctcagctccacaacccaagcaacatttgtatggatttaagagtattttaagaagacatactgcttgattttaatacattgatcaggccatccaggacaccacgattctcccaaagtaccttgaactcttagtgattgagactcaaaaaaacaaaaaagacttgagacaatgttttcttcaacatgctccaaatataagacatttgtttgctgtacagaaagtatcacaaatggaatatatcagtacctctcaagctagtgtttctagctaaataaatgggtgtatataattttatggtggaaaagaactgtactgtctgttatgatttccttcaatgtgcataatgataaaataaataattttaatattcttttgtttccatggttacctgacctaaattagataaattgtagggctttagctttcttatttttgtcaaaagttggtgttgacatacattccctctaatttgaactggtattgtttacgtttgatacaacattaaggaatttgatgattttcatttcatgaaaatgacattaaatgcaataattttacttatcataaacattttgtacatcattattttcttttggattagtgttgtcatacatgtaatttatatcacatgtataaacattgaaaatcaactaaaatgacatttgttctacattataacttgtgagtttcaagaactagtattagtagttttttcctttcattatagattgtaagatgttgtggtatctttgagtgccttagttcttccttcctcccaaaagccattaatttacaaatgcttaaagccatcaggtcaaatatttcaaagcctttagatgatttctgtactagctttagatgtctgacgttatgtaggttacctgtgttcttggctaggaaaacattattgattcattaaatcataaaggtgggaataataatcttttatttatgatgttgattggctccaaaatagtcttaaggaaataaatactgggtctgtaggggaaaagtagacttcatagtttaaaatcccattaaccttttcaccgcagttgaaatgcatccagcctgattttcctatcattttggaatttttaaggatttttactttcttaagttactgcctagaatcaacattcggtgagattttgaaatgtcatagatactgtacaggccaaaccttactaatttattttacttaaagtgatattttatagaaaaatcataagttatacaatgagaaccctttaagcccttagcctaagctttcagactaaatgtgattatagaataagatgaaagttaactttggtacagagctttttatagccccaaattatatttccagttattatattcattagaatttctgctaataaactcccaactt

SEQ ID NO: 130709 - DNA, 1179 bp, Homo sapiens
  Payload ID: 5553
  Gene Symbol: EBAG9
  Gene Name: estrogen receptor binding site associated, antigen, 9
  Uniprot ID: O00559
  ENST ID: ENST00000614147
  CDS Start-End: 403-1179
ccaccagacctccctcgacgcccgacagctgctctgggtactgtttccgggtcagggtgacctctggggtgaggaaactgcgactgggagcgggacccaggcgtgcagcattcgccatgctccgctcacgcgtgggagactgggctgtggggtaccggcccggaaagcacgcagcctccaaagccgccttcctcagggaaatttgcgtgaccttactgccctccgtctacaggccttgtacctctccaggccgatttttccacaatttaaatctcagttcacctggtatccagctccagcaacttagagcgtttcacgtcacgccgggcgccaggcgtcggcttgtataacctgaaaacgctcctgtttttctcatctgtgcagtgggttttgattcccaccatggccatcacccagtttcggttatttaaattttgtacctgcctagcaacagtattctcattcctaaagagattaatatgcagatctggcagaggacggaaattaagtggagaccaaataactttgccaactacagttgattattcatcagttcctaagcagacagatgttgaagagtggacttcctgggatgaagatgcacccaccagtgtaaagatcgaaggagggaatgggaatgtggcaacacaacaaaattctttggaacaactggaacctgactattttaaggacatgacaccaactattaggaaaactcagaaaattgttattaagaagagagaaccattgaattttggcatcccagatgggagcacaggtttctctagtagattagcagctacacaagatctgccttttattcatcagtcttctgaattaggtgacttagatacctggcaggaaaataccaatgcatgggaagaagaagaagatgcagcctggcaagcagaagaagttctgagatccaggaccaatgtatgtttactctgctctctcctgtttcatcatcccactcctacctccactccctacattaaccaatcagtaaagatagagagagtgagtctgggtcagtggagttacggaaagagtaaggaacagcagaaactagcagacagagaaaagagagcagccgaacaacaaaggaagaaaatggaaaaggaagcacaacggctaatgaagaaggaacaaaacaaaattggtgtgaaactttcataa

SEQ ID NO: 130710 - DNA, 2215 bp, Homo sapiens
  Payload ID: 5554
  Gene Symbol: ESRRA
  Gene Name: estrogen-related receptor alpha
  Uniprot ID: P11474
  ENST ID: ENST00000000442
  CDS Start-End: 172-1443
aagcagccggcggcgccgccgagtgaggggacgcggcgcggtggggcggcgcggcccgaggaggcggcggaggaggggccgcccgcggcccccggctcactccggcactccgggccgctcggcccccatgcctgcccgaccgcgctgccggagccccaggtgaccagcgccatgtccagccaggtggtgggcattgagcctctctacatcaaggcagagccggccagccctgacagtccaaagggttcctcggagacagagaccgagcctcctgtggccctggcccctggtccagctcccactcgctgcctcccaggccacaaggaagaggaggatggggagggggctgggcctggcgagcagggcggtgggaagctggtgctcagctccctgcccaagcgcctctgcctggtctgtggggacgtggcctccggctaccactatggtgtggcatcctgtgaggcctgcaaagccttcttcaagaggaccatccaggggagcatcgagtacagctgtccggcctccaacgagtgtgagatcaccaagcggagacgcaaggcctgccaggcctgccgcttcaccaagtgcctgcgggtgggcatgctcaaggagggagtgcgcctggaccgcgtccggggtgggcggcagaagtacaagcggcggccggaggtggacccactgcccttcccgggccccttccctgctgggcccctggcagtcgctggaggcccccggaagacagcagccccagtgaatgcactggtgtctcatctgctggtggttgagcctgagaagctctatgccatgcctgaccccgcaggccctgatgggcacctcccagccgtggctaccctctgtgacctctttgaccgagagattgtggtcaccatcagctgggccaagagcatcccaggcttctcatcgctgtcgctgtctgaccagatgtcagtactgcagagcgtgtggatggaggtgctggtgctgggtgtggcccagcgctcactgccactgcaggatgagctggccttcgctgaggacttagtcctggatgaagagggggcacgggcagctggcctgggggaactgggggctgccctgctgcaactagtgcggcggctgcaggccctgcggctggagcgagaggagtatgttctactaaaggccttggcccttgccaattcagactctgtgcacatcgaagatgccgaggctgtggagcagctgcgagaagctctgcacgaggccctgctggagtatgaagccggccgggctggccccggagggggtgctgagcggcggcgggcgggcaggctgctgctcacgctaccgctcctccgccagacagcgggcaaagtgctggcccatttctatggggtgaagctggagggcaaggtgcccatgcacaagctgttcttggagatgctcgaggccatgatggactgaggcaaggggtgggactggtgggggttctggcaggacctgcctagcatggggtcagccccaagggctggggcggagctggggtctgggcagtgccacagcctgctggcagggccagggcaatgccatcagcccctgggaacaggccccacgccctctcctccccctcctagggggtgtcagaagctgggaacgtgtgtccaggctctgggcacagtgctgccccttgcaagccataacgtgcccccagagtgtagggggccttgcggaagccatagggggctgcacgggatgcgtgggaggcagaaacctatctcagggagggaaggggatggaggccagagtctcccagtgggtgatgcttttgctgctgcttaatcctaccccctcttcaaagcagagtgggacttggagagcaaaggcccatgcccccttcgctcctcctctcatcatttgcattgggcattagtgtccccccttgaagcaataactccaagcagactccagcccctggacccctggggtggccagggcttccccatcagctcccaacgagcctcctcagggggtaggagagcactgcctctatgccctgcagagcaataacactatatttatttttgggtttggccagggaggcgcagggacatggggcaagccagggcccagagcccttggctgtacagagactctattttaatgtatatttgctgcaaagagaaaccgcttttggttttaaacctttaatgagaaaaaaatatataataccgagctc

SEQ ID NO: 130711 - DNA, 2283 bp, Homo sapiens
  Payload ID: 5554
  Gene Symbol: ESRRA
  Gene Name: estrogen-related receptor alpha
  Uniprot ID: P11474
  ENST ID: ENST00000405666
  CDS Start-End: 235-1506
tagaggtctcccgcgggcggggagggggaggcgtagcaactttaggcaacttcccaaaggtgtgcgcaggttgggggcgggacgcggcgccccgggaggtggcggcctctgcgacagcgggagtataagagtggacctgcaggctggtcgcgaggaggtggagcggcgcccgccgtgtgcctgggaccggcatgctggggcaggagggcagccgcgtgtcaggtgaccagcgccatgtccagccaggtggtgggcattgagcctctctacatcaaggcagagccggccagccctgacagtccaaagggttcctcggagacagagaccgagcctcctgtggccctggcccctggtccagctcccactcgctgcctcccaggccacaaggaagaggaggatggggagggggctgggcctggcgagcagggcggtgggaagctggtgctcagctccctgcccaagcgcctctgcctggtctgtggggacgtggcctccggctaccactatggtgtggcatcctgtgaggcctgcaaagccttcttcaagaggaccatccaggggagcatcgagtacagctgtccggcctccaacgagtgtgagatcaccaagcggagacgcaaggcctgccaggcctgccgcttcaccaagtgcctgcgggtgggcatgctcaaggagggagtgcgcctggaccgcgtccggggtgggcggcagaagtacaagcggcggccggaggtggacccactgcccttcccgggccccttccctgctgggcccctggcagtcgctggaggcccccggaagacagcagccccagtgaatgcactggtgtctcatctgctggtggttgagcctgagaagctctatgccatgcctgaccccgcaggccctgatgggcacctcccagccgtggctaccctctgtgacctctttgaccgagagattgtggtcaccatcagctgggccaagagcatcccaggcttctcatcgctgtcgctgtctgaccagatgtcagtactgcagagcgtgtggatggaggtgctggtgctgggtgtggcccagcgctcactgccactgcaggatgagctggccttcgctgaggacttagtcctggatgaagagggggcacgggcagctggcctgggggaactgggggctgccctgctgcaactagtgcggcggctgcaggccctgcggctggagcgagaggagtatgttctactaaaggccttggcccttgccaattcagactctgtgcacatcgaagatgccgaggctgtggagcagctgcgagaagctctgcacgaggccctgctggagtatgaagccggccgggctggccccggagggggtgctgagcggcggcgggcgggcaggctgctgctcacgctaccgctcctccgccagacagcgggcaaagtgctggcccatttctatggggtgaagctggagggcaaggtgcccatgcacaagctgttcttggagatgctcgaggccatgatggactgaggcaaggggtgggactggtgggggttctggcaggacctgcctagcatggggtcagccccaagggctggggcggagctggggtctgggcagtgccacagcctgctggcagggccagggcaatgccatcagcccctgggaacaggccccacgccctctcctccccctcctagggggtgtcagaagctgggaacgtgtgtccaggctctgggcacagtgctgccccttgcaagccataacgtgcccccagagtgtagggggccttgcggaagccatagggggctgcacgggatgcgtgggaggcagaaacctatctcagggagggaaggggatggaggccagagtctcccagtgggtgatgcttttgctgctgcttaatcctaccccctcttcaaagcagagtgggacttggagagcaaaggcccatgcccccttcgctcctcctctcatcatttgcattgggcattagtgtccccccttgaagcaataactccaagcagactccagcccctggacccctggggtggccagggcttccccatcagctcccaacgagcctcctcagggggtaggagagcactgcctctatgccctgcagagcaataacactatatttatttttgggtttggccagggaggcgcagggacatggggcaagccagggcccagagcccttggctgtacagagactctattttaatgtatatttgctgcaaagagaaaccgcttttggttttaaacctttaatgagaaaaaaatatataataccgagctcaaaaa

SEQ ID NO: 130712 - DNA, 2218 bp, Homo sapiens
  Payload ID: 5554
  Gene Symbol: ESRRA
  Gene Name: estrogen-related receptor alpha
  Uniprot ID: P11474
  ENST ID: ENST00000406310
  CDS Start-End: 178-1446
tcctacaagcagccggcggcgccgccgagtgaggggacgcggcgcggtggggcggcgcggcccgaggaggcggcggaggaggggccgcccgcggcccccggctcactccggcactccgggccgctcggcccccatgcctgcccgaccgcgctgccggagccccaggtgaccagcgccatgtccagccaggtggtgggcattgagcctctctacatcaaggcagagccggccagccctgacagtccaaagggttcctcggagacagagaccgagcctcctgtggccctggcccctggtccagctcccactcgctgcctcccaggccacaaggaagaggaggatggggagggggctgggcctggcgagcagggcggtgggaagctggtgctcagctccctgcccaagcgcctctgcctggtctgtggggacgtggcctccggctaccactatggtgtggcatcctgtgaggcctgcaaagccttcttcaagaggaccatccaggggagcatcgagtacagctgtccggcctccaacgagtgtgagatcaccaagcggagacgcaaggcctgccaggcctgccgcttcaccaagtgcctgcgggtgggcatgctcaaggagggagtgcgcctggaccgcgtccggggtgggcggcagaagtacaagcggcggccggaggtggacccactgcccttcccgggccccttccctgctgggcccctggcagtcgctggaggcccccggaagacagccccagtgaatgcactggtgtctcatctgctggtggttgagcctgagaagctctatgccatgcctgaccccgcaggccctgatgggcacctcccagccgtggctaccctctgtgacctctttgaccgagagattgtggtcaccatcagctgggccaagagcatcccaggcttctcatcgctgtcgctgtctgaccagatgtcagtactgcagagcgtgtggatggaggtgctggtgctgggtgtggcccagcgctcactgccactgcaggatgagctggccttcgctgaggacttagtcctggatgaagagggggcacgggcagctggcctgggggaactgggggctgccctgctgcaactagtgcggcggctgcaggccctgcggctggagcgagaggagtatgttctactaaaggccttggcccttgccaattcagactctgtgcacatcgaagatgccgaggctgtggagcagctgcgagaagctctgcacgaggccctgctggagtatgaagccggccgggctggccccggagggggtgctgagcggcggcgggcgggcaggctgctgctcacgctaccgctcctccgccagacagcgggcaaagtgctggcccatttctatggggtgaagctggagggcaaggtgcccatgcacaagctgttcttggagatgctcgaggccatgatggactgaggcaaggggtgggactggtgggggttctggcaggacctgcctagcatggggtcagccccaagggctggggcggagctggggtctgggcagtgccacagcctgctggcagggccagggcaatgccatcagcccctgggaacaggccccacgccctctcctccccctcctagggggtgtcagaagctgggaacgtgtgtccaggctctgggcacagtgctgccccttgcaagccataacgtgcccccagagtgtagggggccttgcggaagccatagggggctgcacgggatgcgtgggaggcagaaacctatctcagggagggaaggggatggaggccagagtctcccagtgggtgatgcttttgctgctgcttaatcctaccccctcttcaaagcagagtgggacttggagagcaaaggcccatgcccccttcgctcctcctctcatcatttgcattgggcattagtgtccccccttgaagcaataactccaagcagactccagcccctggacccctggggtggccagggcttccccatcagctcccaacgagcctcctcagggggtaggagagcactgcctctatgccctgcagagcaataacactatatttatttttgggtttggccagggaggcgcagggacatggggcaagccagggcccagagcccttggctgtacagagactctattttaatgtatatttgctgcaaagagaaaccgcttttggttttaaacctttaatgagaaaaaaatatataataccgagctc

SEQ ID NO: 130713 - DNA, 747 bp, Homo sapiens
  Payload ID: 5554
  Gene Symbol: ESRRA
  Gene Name: estrogen-related receptor alpha
  ENST ID: ENST00000539594
  CDS Start-End: 262-747
gcagccggcggcgccgccgagtgaggggacgcggcgcggtggggcggcgcggcccgaggaggcggcggaggaggggccgcccgcggcccccggctcactccggcactccgggccgctcggcccccatgcctgcccgaccgcgctgccggagccccagggagcatcgagtacagctgtccggcctccaacgagtgtgagatcaccaagcggagacgcaaggcctgccaggcctgccgcttcaccaagtgcctgcgggtgggcatgctcaaggagggagtgcgcctggaccgcgtccggggtgggcggcagaagtacaagcggcggccggaggtggacccactgcccttcccgggccccttccctgctgggcccctggcagtcgctggaggcccccggaagacagcagccccagtgaatgcactggtgtctcatctgctggtggttgagcctgagaagctctatgccatgcctgaccccgcaggccctgatgggcacctcccagccgtggctaccctctgtgacctctttgaccgagagattgtggtcaccatcagctgggccaagagcatcccaggcttctcatcgctgtcgctgtctgaccagatgtcagtactgcagagcgtgtggatggaggtgctggtgctgggtgtggcccagcgctcactgccactgcaggatgagctggccttcgctgaggacttagtcctggatgaagagggggcacgggcagctggcctgggggaactg

SEQ ID NO: 130714 - DNA, 742 bp, Homo sapiens
  Payload ID: 5554
  Gene Symbol: ESRRA
  Gene Name: estrogen-related receptor alpha
  ENST ID: ENST00000468670
  CDS Start-End: 414-742
caggtgtgaaaagctctggaggtgttttcatgagtccgtgcctgtgcgtgtggatgtggggagacctagtgagagtgtgtgtgatcatgagccttgactgagttcgtggatggggtgtgcgctccaggagaagtgtgtgagcacaagtgtgagcaggagtgagcacgggtttgggaaggccggtgcaagtgtgaaagccctcagcagagagcgagcctgcgtgggcttgtggggctcctgagcaccccggtgagtggagtgtgtgaactcggtgtgagcacgtccactggccttgggtctgctctccaatgcagaatacccagatgagggcagggtctcagaggtccccccaacatctggagaaaactgggaagtatcctgctcctggctagggattccaggtgaccagcgccatgtccagccaggtggtgggcattgagcctctctacatcaaggcagagccggccagccctgacagtccaaagggttcctcggagacagagaccgagcctcctgtggccctggcccctggtccagctcccactcgctgcctcccaggccacaaggaagaggaggatggggagggggctgggcctggcgagcagggcggtgggaagctggtgctcagctccctgcccaagcgcctctgcctggtctgtggggacgtggcctccggctaccactatggtgtggcatcctgtgaggcctgcaaagccttcttcaagaggaccatccagggtga

SEQ ID NO: 130715 - DNA, 677 bp, Homo sapiens
  Payload ID: 5554
  Gene Symbol: ESRRA
  Gene Name: estrogen-related receptor alpha
  ENST ID: ENST00000545035
  CDS Start-End: 1-593
ggcggccggaggtggacccactgcccttcccgggccccttccctgctgggcccctggcagtcgctggaggcccccggaagacaggcttctcatcgctgtcgctgtctgaccagatgtcagtactgcagagcgtgtggatggaggtgctggtgctgggtgtggcccagcgctcactgccactgcaggatgagctggccttcgctgaggacttagtcctggatgaagagggggcacgggcagctggcctgggggaactgggggctgccctgctgcaactagtgcggcggctgcaggccctgcggctggagcgagaggagtatgttctactaaaggccttggcccttgccaattcagactctgtgcacatcgaagatgccgaggctgtggagcagctgcgagaagctctgcacgaggccctgctggagtatgaagccggccgggctggccccggagggggtgctgagcggcggcgggcgggcaggctgctgctcacgctaccgctcctccgccagacagcgggcaaagtgctggcccatttctatggggtgaagctggagggcaaggtgcccatgcacaagctgttcttggagatgctcgaggccatgatggactgaggcaaggggtgggactggtgggggttctggcaggacctgcctagcatggggtcagccccaagg

SEQ ID NO: 130716 - DNA, 2745 bp, Homo sapiens
  Payload ID: 5555
  Gene Symbol: ESRRB
  Gene Name: estrogen-related receptor beta
  Uniprot ID: O95718
  ENST ID: ENST00000380887
  CDS Start-End: 99-1625
tccctgccaaaatggtgtccagaactttgaggccagaggtgatccagtgatttgggagctgcaggtcacacaggctgctcagagggctgctgaacaggatgtcctcggacgacaggcacctgggctccagctgcggctccttcatcaagactgagccgtccagcccgtcctcgggcatcgatgccctcagccaccacagccccagtggctcgtccgacgccagcggcggctttggcctggccctgggcacccacgccaacggtctggactcgccacccatgtttgcaggcgccgggctgggaggcaccccatgccgcaagagctacgaggactgtgccagcggcatcatggaggactcggccatcaagtgcgagtacatgctcaacgccatccccaagcgcctgtgcctcgtgtgcggggacattgcctctggctaccactacggcgtggcctcctgcgaggcttgcaaggccttcttcaagaggactatccaagggaacattgagtacagctgcccggccaccaacgagtgcgagatcaccaaacggaggcgcaagtcctgccaggcctgccgcttcatgaaatgcctcaaagtggggatgctgaaggaaggtgtgcgccttgatcgagtgcgtggaggccgtcagaaatacaagcgacggctggactcagagagcagcccatacctgagcttacaaatttctccacctgctaaaaagccattgaccaagattgtctcatacctactggtggctgagccggacaagctctatgccatgcctccccctggtatgcctgagggggacatcaaggccctgaccactctctgtgacctggcagaccgagagcttgtggtcatcattggctgggccaagcacatcccaggcttctcaagcctctccctgggggaccagatgagcctgctgcagagtgcctggatggaaatcctcatcctgggcatcgtgtaccgctcgctgccctatgacgacaagctggtgtacgctgaggactacatcatggatgaggagcactcccgcctcgcggggctgctggagctctaccgggccatcctgcagctggtacgcaggtacaagaagctcaaggtggagaaggaggagtttgtgacgctcaaggccctggccctcgccaactccgattccatgtacatcgaggatctagaggctgtccagaagctgcaggacctgctgcacgaggcactgcaggactacgagctgagccagcgccatgaggagccctggaggacgggcaagctgctgctgacactgccgctgctgcggcagacggccgccaaggccgtgcagcacttctatagcgtcaaactgcagggcaaagtgcccatgcacaaactcttcctggagatgctggaggccaaggttggccaagagcagcttagaggatctcccaaggatgaaagaatgtcaagccatgatggaaaatgccccttccaatcagctgccttcacaagcagggatcagagcaactccccggggatccccaatccacgcccttctagtccaacccccctcaatgagagaggcaggcagatctcacccagcactaggacaccaggaggccagggaaagcatctctggctcaccatgtaacatctggcttggagcaagtgggtgttctgcacaccaggcagctgcacctcactggatctagtgttgctgcgagtgacctcacttcagagcccctctagcagagtggggcggaagtcctgatggttggtgtccatgaggtggaagctgcttttatacttaaaactcagatcacaacaggaaatgtgtcagtaacaatggaactccatccaatgggaaagttcctggtactgaaggggtccattggacactcagaaaagaagttcaggggccaacttcttagctggaatcctggccagatgaggaccctctccggggaagggagaggactgacttagtggaaggtggtgaagtgaggagagtttaggggaaccttcccccagtggaacagatctcaagtttaccctaaacctgccatttctggaaaatctgtaaagaggaaacagcctgtctcagctgtactctcatgatacaggtcatttgaaatgaaccaagaaataaaacatgaaaatccaaccatggagaaggtggtatggctgggttttgtttggtccccttgtccttatacgttctaaagtttccagactggctttgtcactttgtgaactcgtcatgtgtgaaaaccaatctttgcatatagggaacttcctcgggccacactttaagaaccaagtaagaggctctcaagactccagcagagtcgggaggccatggcagcgccttagaggagctggaacctgcacccacctgtgtcggtggggggggcctcctttccccatagactctgccctccctctgtgcagatggaagtggcaggggagggtgaccagcttgtgacaagaagactgaagggtccagagtccatgctcacggaacagcaccaaagaaaagcactatgtggaaagattgttttattttctaataatgataatatggctggaatggcttcttaagatgtatatattttttaaaatggcagttccccattgcagcatcacctacttgtatgtctttctgcctctgtatatgttctcccagaaacccccatgtaaatcaaatgccctaggatgcttccatcctggtcccatgtatctggaatctaataaataaggaaaggaactat

SEQ ID NO: 130717 - DNA, 2849 bp, Homo sapiens
  Payload ID: 5555
  Gene Symbol: ESRRB
  Gene Name: estrogen-related receptor beta
  Uniprot ID: O95718
  ENST ID: ENST00000509242
  CDS Start-End: 209-1735
ccctctccatgtttgagggccgaagagcctgcatcgagcagagccaccaggctaaatcctctgaccttgactttggtttagggaccagagtctggtatctaagtgcgatcttactctagctttcccatctgttctgtttaggccagaggtgatccagtgatttgggagctgcaggtcacacaggctgctcagagggctgctgaacaggatgtcctcggacgacaggcacctgggctccagctgcggctccttcatcaagactgagccgtccagcccgtcctcgggcatcgatgccctcagccaccacagccccagtggctcgtccgacgccagcggcggctttggcctggccctgggcacccacgccaacggtctggactcgccacccatgtttgcaggcgccgggctgggaggcaccccatgccgcaagagctacgaggactgtgccagcggcatcatggaggactcggccatcaagtgcgagtacatgctcaacgccatccccaagcgcctgtgcctcgtgtgcggggacattgcctctggctaccactacggcgtggcctcctgcgaggcttgcaaggccttcttcaagaggactatccaagggaacattgagtacagctgcccggccaccaacgagtgcgagatcaccaaacggaggcgcaagtcctgccaggcctgccgcttcatgaaatgcctcaaagtggggatgctgaaggaaggtgtgcgccttgatcgagtgcgtggaggccgtcagaaatacaagcgacggctggactcagagagcagcccatacctgagcttacaaatttctccacctgctaaaaagccattgaccaagattgtctcatacctactggtggctgagccggacaagctctatgccatgcctccccctggtatgcctgagggggacatcaaggccctgaccactctctgtgacctggcagaccgagagcttgtggtcatcattggctgggccaagcacatcccaggcttctcaagcctctccctgggggaccagatgagcctgctgcagagtgcctggatggaaatcctcatcctgggcatcgtgtaccgctcgctgccctatgacgacaagctggtgtacgctgaggactacatcatggatgaggagcactcccgcctcgcggggctgctggagctctaccgggccatcctgcagctggtacgcaggtacaagaagctcaaggtggagaaggaggagtttgtgacgctcaaggccctggccctcgccaactccgattccatgtacatcgaggatctagaggctgtccagaagctgcaggacctgctgcacgaggcactgcaggactacgagctgagccagcgccatgaggagccctggaggacgggcaagctgctgctgacactgccgctgctgcggcagacggccgccaaggccgtgcagcacttctatagcgtcaaactgcagggcaaagtgcccatgcacaaactcttcctggagatgctggaggccaaggttggccaagagcagcttagaggatctcccaaggatgaaagaatgtcaagccatgatggaaaatgccccttccaatcagctgccttcacaagcagggatcagagcaactccccggggatccccaatccacgcccttctagtccaacccccctcaatgagagaggcaggcagatctcacccagcactaggacaccaggaggccagggaaagcatctctggctcaccatgtaacatctggcttggagcaagtgggtgttctgcacaccaggcagctgcacctcactggatctagtgttgctgcgagtgacctcacttcagagcccctctagcagagtggggcggaagtcctgatggttggtgtccatgaggtggaagctgcttttatacttaaaactcagatcacaacaggaaatgtgtcagtaacaatggaactccatccaatgggaaagttcctggtactgaaggggtccattggacactcagaaaagaagttcaggggccaacttcttagctggaatcctggccagatgaggaccctctccggggaagggagaggactgacttagtggaaggtggtgaagtgaggagagtttaggggaaccttcccccagtggaacagatctcaagtttaccctaaacctgccatttctggaaaatctgtaaagaggaaacagcctgtctcagctgtactctcatgatacaggtcatttgaaatgaaccaagaaataaaacatgaaaatccaaccatggagaaggtggtatggctgggttttgtttggtccccttgtccttatacgttctaaagtttccagactggctttgtcactttgtgaactcgtcatgtgtgaaaaccaatctttgcatatagggaacttcctcgggccacactttaagaaccaagtaagaggctctcaagactccagcagagtcgggaggccatggcagcgccttagaggagctggaacctgcacccacctgtgtcggtggggggggcctcctttccccatagactctgccctccctctgtgcagatggaagtggcaggggagggtgaccagcttgtgacaagaagactgaagggtccagagtccatgctcacggaacagcaccaaagaaaagcactatgtggaaagattgttttattttctaataatgataatatggctggaatggcttcttaagatgtatatattttttaaaatggcagttccccattgcagcatcacctacttgtatgtctttctgcctctgtatatgttctcccagaaacccccatgtaaatcaaatgccctaggatgcttccatcctggtcccatgtatctggaatctaataaataaggaaagg

SEQ ID NO: 130718 - DNA, 2432 bp, Homo sapiens
  Payload ID: 5555
  Gene Symbol: ESRRB
  Gene Name: estrogen-related receptor beta
  Uniprot ID: O95718
  ENST ID: ENST00000505752
  CDS Start-End: 575-2077
ttcaggaaaagccatcatgtttccgcagcatttatctgtcagcaggagactattatgagagcacaaactcacattgtattagcgttatcagttaattatgatccttgggaccagtgccagccaatgggctagcagtctgctgaccatcactcagggatataactccacacccccaaattcaagcatgtaagaagacagcaggtccgcagagaggtgtggtcagggacatttcccctggccgggagcccatggagcactgtcctcagagatgcgcaggttaggctcactgtctaggccaggcccaccttagtcactgtggactggcaatggaagctcttcctggacacacctgccctagccctcaccctggggtggaagagaaatgagcttggcttgcaactcagaccattccacggaggcatcctccccttcctgggctggtgaataaaagtttcctgaggtcaaggacttccttttccctgccaaaatggtgtccagaactttgaggccagaggtgatccagtgatttgggagctgcaggtcacacaggctgctcagagggctgctgaacaggatgtcctcggacgacaggcacctgggctccagctgcggctccttcatcaagactgagccgtccagcccgtcctcgggcatcgatgccctcagccaccacagccccagtggctcgtccgacgccagcggcggctttggcctggccctgggcacccacgccaacggtctggactcgccacccatgtttgcaggcgccgggctgggaggcaccccatgccgcaagagctacgaggactgtgccagcggcatcatggaggactcggccatcaagtgcgagtacatgctcaacgccatccccaagcgcctgtgcctcgtgtgcggggacattgcctctggctaccactacggcgtggcctcctgcgaggcttgcaaggccttcttcaagaggactatccaagggaacattgagtacagctgcccggccaccaacgagtgcgagatcaccaaacggaggcgcaagtcctgccaggcctgccgcttcatgaaatgcctcaaagtggggatgctgaaggaaggtgtgcgccttgatcgagtgcgtggaggccgtcagaaatacaagcgacggctggactcagagagcagcccatacctgagcttacaaatttctccacctgctaaaaagccattgaccaagattgtctcatacctactggtggctgagccggacaagctctatgccatgcctccccctggtatgcctgagggggacatcaaggccctgaccactctctgtgacctggcagaccgagagcttgtggtcatcattggctgggccaagcacatcccaggcttctcaagcctctccctgggggaccagatgagcctgctgcagagtgcctggatggaaatcctcatcctgggcatcgtgtaccgctcgctgccctatgacgacaagctggtgtacgctgaggactacatcatggatgaggagcactcccgcctcgcggggctgctggagctctaccgggccatcctgcagctggtacgcaggtacaagaagctcaaggtggagaaggaggagtttgtgacgctcaaggccctggccctcgccaactccgattccatgtacatcgaggatctagaggctgtccagaagctgcaggacctgctgcacgaggcactgcaggactacgagctgagccagcgccatgaggagccctggaggacgggcaagctgctgctgacactgccgctgctgcggcagacggccgccaaggccgtgcagcacttctatagcgtcaaactgcagggcaaagtgcccatgcacaaactcttcctggagatgctggaggccaaggcctgggccagggctgactcccttcaggagtggaggccactggagcaagtgccctctcccctccaccgagccaccaagaggcagcatgtgcatttcctaactcccttgccccctcccccatctgtggcctgggtgggcactgctcaggctggataccacctggaggttttccttccgcagagggcaggttggccaagagcagcttagaggatctcccaaggatgaaagaatgtcaagccatgatggaaaatgccccttccaatcagctgccttcacaagcagggatcagagcaactccccggggatccccaatccacgcccttctagtccaacccccctcaatgagagaggcaggcagatctcacccagcactaggacaccaggaggccagggaaagcatctctggctcaccatgtaacatctggcttggagcaagtgggtgttctgcacaccaggcagctgcacctcactggatctagtgttgctgcgagtgacctcacttcagagcccctctagcagagtggggcggaagtcctgatggttggtgtccatgaggtggaag

SEQ ID NO: 130719 - DNA, 1826 bp, Homo sapiens
  Payload ID: 5555
  Gene Symbol: ESRRB
  Gene Name: estrogen-related receptor beta
  ENST ID: ENST00000512784
  CDS Start-End: 302-1826
catggggctgggtggagttggaagtctagagctttttgctgttttgtttaagacctggttatggttgtgagacttttttttttttttttttttttttgtcagctgcctgttatatcaatcacggagtcgggatctatttataggttgggagtactgtgtccttagtcacaaagagacacagacaggggactgtcagctggtaccggaggagcggagcaacgagttatcagcaactgaaagcacctgaggggccgcacattccaccccagcccagtcctcgtcctccacgccagccccaagcatgctgctgaacaggatgtcctcggacgacaggcacctgggctccagctgcggctccttcatcaagactgagccgtccagcccgtcctcgggcatcgatgccctcagccaccacagccccagtggctcgtccgacgccagcggcggctttggcctggccctgggcacccacgccaacggtctggactcgccacccatgtttgcaggcgccgggctgggaggcaccccatgccgcaagagctacgaggactgtgccagcggcatcatggaggactcggccatcaagtgcgagtacatgctcaacgccatccccaagcgcctgtgcctcgtgtgcggggacattgcctctggctaccactacggcgtggcctcctgcgaggcttgcaaggccttcttcaagaggactatccaagggaacattgagtacagctgcccggccaccaacgagtgcgagatcaccaaacggaggcgcaagtcctgccaggcctgccgcttcatgaaatgcctcaaagtggggatgctgaaggaaggtgtgcgccttgatcgagtgcgtggaggccgtcagaaatacaagcgacggctggactcagagagcagcccatacctgagcttacaaatttctccacctgctaaaaagccattgaccaagattgtctcatacctactggtggctgagccggacaagctctatgccatgcctccccctggtatgcctgagggggacatcaaggccctgaccactctctgtgacctggcagaccgagagcttgtggtcatcattggctgggccaagcacatcccaggcttctcaagcctctccctgggggaccagatgagcctgctgcagagtgcctggatggaaatcctcatcctgggcatcgtgtaccgctcgctgccctatgacgacaagctggtgtacgctgaggactacatcatggatgaggagcactcccgcctcgcggggctgctggagctctaccgggccatcctgcagctggtacgcaggtacaagaagctcaaggtggagaaggaggagtttgtgacgctcaaggccctggccctcgccaactccgattccatgtacatcgaggatctagaggctgtccagaagctgcaggacctgctgcacgaggcactgcaggactacgagctgagccagcgccatgaggagccctggaggacgggcaagctgctgctgacactgccgctgctgcggcagacggccgccaaggccgtgcagcacttctatagcgtcaaactgcagggcaaagtgcccatgcacaaactcttcctggagatgctggaggccaaggttggccaagagcagcttagaggatctcccaaggatgaaagaatgtcaagccatgatggaaaatgccccttccaatcagctgccttcacaagcagggatcagagcaactccccggggatccccaatccacgcccttctagtccaacccccctcaatgagagaggcaggcagatctcacccagcactaggacaccaggaggccagggaaagcatc

SEQ ID NO: 130720 - DNA, 1427 bp, Homo sapiens
  Payload ID: 5555
  Gene Symbol: ESRRB
  Gene Name: estrogen-related receptor beta
  Uniprot ID: O95718
  ENST ID: ENST00000556177
  CDS Start-End: 73-1374
tttaggccagaggtgatccagtgatttgggagctgcaggtcacacaggctgctcagagggctgctgaacaggatgtcctcggacgacaggcacctgggctccagctgcggctccttcatcaagactgagccgtccagcccgtcctcgggcatcgatgccctcagccaccacagccccagtggctcgtccgacgccagcggcggctttggcctggccctgggcacccacgccaacggtctggactcgccacccatgtttgcaggcgccgggctgggaggcaccccatgccgcaagagctacgaggactgtgccagcggcatcatggaggactcggccatcaagtgcgagtacatgctcaacgccatccccaagcgcctgtgcctcgtgtgcggggacattgcctctggctaccactacggcgtggcctcctgcgaggcttgcaaggccttcttcaagaggactatccaagggaacattgagtacagctgcccggccaccaacgagtgcgagatcaccaaacggaggcgcaagtcctgccaggcctgccgcttcatgaaatgcctcaaagtggggatgctgaaggaaggtgtgcgccttgatcgagtgcgtggaggccgtcagaaatacaagcgacggctggactcagagagcagcccatacctgagcttacaaatttctccacctgctaaaaagccattgaccaagattgtctcatacctactggtggctgagccggacaagctctatgccatgcctccccctggtatgcctgagggggacatcaaggccctgaccactctctgtgacctggcagaccgagagcttgtggtcatcattggctgggccaagcacatcccaggcttctcaagcctctccctgggggaccagatgagcctgctgcagagtgcctggatggaaatcctcatcctgggcatcgtgtaccgctcgctgccctatgacgacaagctggtgtacgctgaggactacatcatggatgaggagcactcccgcctcgcggggctgctggagctctaccgggccatcctgcagctggtacgcaggtacaagaagctcaaggtggagaaggaggagtttgtgacgctcaaggccctggccctcgccaactccgattccatgtacatcgaggatctagaggctgtccagaagctgcaggacctgctgcacgaggcactgcaggactacgagctgagccagcgccatgaggagccctggaggacgggcaagctgctgctgacactgccgctgctgcggcagacggccgccaaggccgtgcagcacttctatagcgtcaaactgcagggcaaagtgcccatgcacaaactcttcctggagatgctggaggccaaggtgtgatggccccgcacacggaccaatgcccacctacagacagacaaacggacagaccg

SEQ ID NO: 130721 - DNA, 5197 bp, Homo sapiens
  Payload ID: 5556
  Gene Symbol: ESRRG
  Gene Name: estrogen-related receptor gamma
  Uniprot ID: P62508
  ENST ID: ENST00000359162
  CDS Start-End: 205-1512
ggttttgtagactttcatagccaaagaaaccggcttcggcttctttaaaatccccgacgactcacctgattaacctgctgcagttctgaccctgccaagagctgacaatttactggttcatcaatgaaacaatattaaattatgaagatgtaaggaaaaaatcctacgctaacactgtcgcagtttgaaaggcttctctgcagaatgtcaaacaaagatcgacacattgattccagctgttcgtccttcatcaagacggaaccttccagcccagcctccctgacggacagcgtcaaccaccacagccctggtggctcttcagacgccagtgggagctacagttcaaccatgaatggccatcagaacggacttgactcgccacctctctacccttctgctcctatcctgggaggtagtgggcctgtcaggaaactgtatgatgactgctccagcaccattgttgaagatccccagaccaagtgtgaatacatgctcaactcgatgcccaagagactgtgtttagtgtgtggtgacatcgcttctgggtaccactatggggtagcatcatgtgaagcctgcaaggcattcttcaagaggacaattcaaggcaatatagaatacagctgccctgccacgaatgaatgtgaaatcacaaagcgcagacgtaaatcctgccaggcttgccgcttcatgaagtgtttaaaagtgggcatgctgaaagaaggggtgcgtcttgacagagtacgtggaggtcggcagaagtacaagcgcaggatagatgcggagaacagcccatacctgaaccctcagctggttcagccagccaaaaagccatataacaagattgtctcacatttgttggtggctgaaccggagaagatctatgccatgcctgaccctactgtccccgacagtgacatcaaagccctcactacactgtgtgacttggccgaccgagagttggtggttatcattggatgggcgaagcatattccaggcttctccacgctgtccctggcggaccagatgagccttctgcagagtgcttggatggaaattttgatccttggtgtcgtataccggtctctttcgtttgaggatgaacttgtctatgcagacgattatataatggacgaagaccagtccaaattagcaggccttcttgatctaaataatgctatcctgcagctggtaaagaaatacaagagcatgaagctggaaaaagaagaatttgtcaccctcaaagctatagctcttgctaattcagactccatgcacatagaagatgttgaagccgttcagaagcttcaggatgtcttacatgaagcgctgcaggattatgaagctggccagcacatggaagaccctcgtcgagctggcaagatgctgatgacactgccactcctgaggcagacctctaccaaggccgtgcagcatttctacaacatcaaactagaaggcaaagtcccaatgcacaaactttttttggaaatgttggaggccaaggtctgactaaaagctccctgggccttcccatccttcatgttgaaaaagggaaaataaacccaagagtgatgtcgaagaaacttagagtttagttaacaacatcaaaaatcaacagactgcactgataatttagcagcaagactatgaagcagctttcagattcctccataggttcctgatgagtttctttctactttctccatcatcttctttcctctttcttcccacatttctctttctctttattttttctccttttcttctttcacctcccttatttctttgcttctttcattcctagttcccattctcctttattttcttcccgtctgcctgccttctttcttttctttacctactctcattcctctcttttctcatccttccccttttttctaaatttgaaatagctttagtttaaaaaaaaatcctcccttccccctttcctttccctttctttcctttttccctttccttttccctttcctttcctttcctcttgaccttctttccatctttctttttcttccttctgctgctgaacttttaaaagaggtctctaactgaagagagatggaagccagccctgccaaaggatggagatccataatatggatgccagtgaacttattgtgaaccatactgtccccaatgactaaggaatcaaagagagagaaccaacgttcctaaaagtacagtgcaacatatacaaattgactgagtgcagtattagatttcatgggagcagcctctaattagacaacttaagcaacgttgcatcggctgcttcttatcattgcttttccatctagatcagttacagccatttgattccttaattgttttttcaagtcttccaggtatttgttagtttagctactatgtaactttttcagggaatagtttaagctttattcattcatgcaatactaaagagaaataagaatactgcaattttgtgctggctttgaacaattacgaacaataatgaaggacaaatgaatcctgaaggaagatttttaaaaatgttttgtttcttcttacaaatggagatttttttgtaccagctttaccacttttcagccatttattaatatgggaatttaacttactcaagcaatagttgaagggaaggtgcatattatcacggatgcaatttatgttgtgtgccagtctggtcccaaacatcaatttcttaacatgagctccagtttacctaaatgttcactgacacaaaggatgagattacacctacagtgactctgagtagtcacatatataagcactgcacatgagatatagatccgtagaattgtcaggagtgcacctctctacttgggaggtacaattgccatatgatttctagctgccatggtggttaggaatgtgatactgcctgtttgcaaagtcacagaccttgcctcagaaggagctgtgagccagtattcatttaagaggcaataaggcaaatgccagaattaaaaaaaaaaatcatcaaagacagaaaatgcctgaccaaattctaaaacctaatccatataagtttattcatttaggaatgttcgtttaaattaatctgcagtttttaccaagagctaagccaatatatgtgcttttcaaccagtattgtcacagcatgaaagtcaagtcaggttccagactgttaagaggtgtaatctaatgaagaaatcaattagatgccccgaaatctacagtcgctgaataaccaataaacagtaacctccatcaaatgctataccaatggaccagtgttagtagctgctccctgtattatgtgaacagtcttattctatgtacacagatgtaattaaaattgtaatcctaacaaacaaaagaaatgtagttcagcttttcaatgtttcatgtttgctgtgcttttctgaattttatgttgcattcaaagactgttgtcttgttcttgtggtgtttggattcttgtggtgtgtgcttttagacacagggtagaattagagacaatattggatgtacaattcctcaggagactacagtagtatattctattccttaccagtaataaggttcttcctaataataattaagagattgaaactccaaacaagtattcattatgaacagatacacatcaaaatcataataatattttcaaaacaaggaataatttctctaatggtttattatagaataccaatgtatagcttagaaataaaactttgaatatttcaagaatatagataagtctaatttttaaatgctgtatatatggctttcactcaatcatctctcagatgttgttattaactcgctctgtgttgttgcaaaactttttggtgcagattcgtttccaaaactattgctactttgtgtgctttaaacaaaataccttgggttgatgaaacatcaacccagtgctaggaatactgtgtatctatcattagctatatgggactatattgtagattgtggtttctcagtagagaagtgactgtagtgtgattctagataaatcatcattagcaattcattcagatggtcaataacttgaaatttatagctgtgataggagttcagaaattggcacatccctttaaaaataacaacagaaaatacaactcctgggaaaaaaggtgctgattctataagattatttatatatgtaagtgtttaaaaagattattttccagaaagtttgtgcagggtttaagttgctactattcaactacactatatataaataaaatatatacaatatatacattgttttcactgtatcacattaaagtacttgggcttcagaagtaagagccaaccaactgaaaacctgagatggagatatgttcaaagaatgagatacaattttttagttttcagtttaagtaactctcagcattacaaaagagtaagtatctcacaaataggaaataaaactaaaacgtggatttaaaaagaactgcacgggctttagggtaaatgctcatcttaaacctcactagagggaagtcttctcaagtttcaagcaagaccatttacttaatgtgaagttttggaaagttataaaggtgtatgttttagccatatgattttaattttaattttgcttcttttaggttcgttcttatttaaagcaatatgattgtgtgactccttgtagttacacttgtgtttcaatcagatcagattgttgtatttattccactattttgcatttaaatgataacataaaagatataaaaaatttaaaactgctatttttcttatagaagagaaaatgggtgttggtgattgtattttaattatttaagcgtctctgtttacctgcctaggaaaacattttatggcagtcttatgtgcaaagatcgtaaaaggacaaaaaatttaaactgcttataataatccaggagttgcattatagccagtagtaaaaataataataataataataaaaccatgtctatagctgtagatgggcttcacatctgtaaagcaatcaattgtatatttttgtgatgtgtaccatactgtgtgctccagcaaatgtccatttgtgtaaatgtatttattttatattgtatatattgttaaatgcaaaaaggagatatgattctgtaactccaatcagttcagatgtgtaactcaaattattatgcctttcaggatgatggtagagcaatattaaacaagcttccacttt

SEQ ID NO: 130722 - DNA, 5431 bp, Homo sapiens
  Payload ID: 5556
  Gene Symbol: ESRRG
  Gene Name: estrogen-related receptor gamma
  Uniprot ID: P62508
  ENST ID: ENST00000360012
  CDS Start-End: 439-1746
tatccacacacagcatcggaatattgctagctaactcaacaaatgtgcaaatcaggggactgttgtgtgtgtaccgattcatgtctatactgtttttattggtgaagtaggaaattagtctaaatatttgattctgcagttgcatgtcaccaaattcagtgaggttagatgttaaatcatcttgttggctttgggctgaatttgatctaagagacaaaagtctcaaacaacagactacttactgccaccacatctcgattcaaagaatagttttcacatgttcgtggtgtggaaaggactttctgtttctcactaatttcttcagctataccaagagtggtgttgtctttgaacaggaaggacagcaaaaataaacataacagttttttcataagatacacagctgcattacacatcccaaaattgcttctctgcagaatgtcaaacaaagatcgacacattgattccagctgttcgtccttcatcaagacggaaccttccagcccagcctccctgacggacagcgtcaaccaccacagccctggtggctcttcagacgccagtgggagctacagttcaaccatgaatggccatcagaacggacttgactcgccacctctctacccttctgctcctatcctgggaggtagtgggcctgtcaggaaactgtatgatgactgctccagcaccattgttgaagatccccagaccaagtgtgaatacatgctcaactcgatgcccaagagactgtgtttagtgtgtggtgacatcgcttctgggtaccactatggggtagcatcatgtgaagcctgcaaggcattcttcaagaggacaattcaaggcaatatagaatacagctgccctgccacgaatgaatgtgaaatcacaaagcgcagacgtaaatcctgccaggcttgccgcttcatgaagtgtttaaaagtgggcatgctgaaagaaggggtgcgtcttgacagagtacgtggaggtcggcagaagtacaagcgcaggatagatgcggagaacagcccatacctgaaccctcagctggttcagccagccaaaaagccatataacaagattgtctcacatttgttggtggctgaaccggagaagatctatgccatgcctgaccctactgtccccgacagtgacatcaaagccctcactacactgtgtgacttggccgaccgagagttggtggttatcattggatgggcgaagcatattccaggcttctccacgctgtccctggcggaccagatgagccttctgcagagtgcttggatggaaattttgatccttggtgtcgtataccggtctctttcgtttgaggatgaacttgtctatgcagacgattatataatggacgaagaccagtccaaattagcaggccttcttgatctaaataatgctatcctgcagctggtaaagaaatacaagagcatgaagctggaaaaagaagaatttgtcaccctcaaagctatagctcttgctaattcagactccatgcacatagaagatgttgaagccgttcagaagcttcaggatgtcttacatgaagcgctgcaggattatgaagctggccagcacatggaagaccctcgtcgagctggcaagatgctgatgacactgccactcctgaggcagacctctaccaaggccgtgcagcatttctacaacatcaaactagaaggcaaagtcccaatgcacaaactttttttggaaatgttggaggccaaggtctgactaaaagctccctgggccttcccatccttcatgttgaaaaagggaaaataaacccaagagtgatgtcgaagaaacttagagtttagttaacaacatcaaaaatcaacagactgcactgataatttagcagcaagactatgaagcagctttcagattcctccataggttcctgatgagtttctttctactttctccatcatcttctttcctctttcttcccacatttctctttctctttattttttctccttttcttctttcacctcccttatttctttgcttctttcattcctagttcccattctcctttattttcttcccgtctgcctgccttctttcttttctttacctactctcattcctctcttttctcatccttccccttttttctaaatttgaaatagctttagtttaaaaaaaaatcctcccttccccctttcctttccctttctttcctttttccctttccttttccctttcctttcctttcctcttgaccttctttccatctttctttttcttccttctgctgctgaacttttaaaagaggtctctaactgaagagagatggaagccagccctgccaaaggatggagatccataatatggatgccagtgaacttattgtgaaccatactgtccccaatgactaaggaatcaaagagagagaaccaacgttcctaaaagtacagtgcaacatatacaaattgactgagtgcagtattagatttcatgggagcagcctctaattagacaacttaagcaacgttgcatcggctgcttcttatcattgcttttccatctagatcagttacagccatttgattccttaattgttttttcaagtcttccaggtatttgttagtttagctactatgtaactttttcagggaatagtttaagctttattcattcatgcaatactaaagagaaataagaatactgcaattttgtgctggctttgaacaattacgaacaataatgaaggacaaatgaatcctgaaggaagatttttaaaaatgttttgtttcttcttacaaatggagatttttttgtaccagctttaccacttttcagccatttattaatatgggaatttaacttactcaagcaatagttgaagggaaggtgcatattatcacggatgcaatttatgttgtgtgccagtctggtcccaaacatcaatttcttaacatgagctccagtttacctaaatgttcactgacacaaaggatgagattacacctacagtgactctgagtagtcacatatataagcactgcacatgagatatagatccgtagaattgtcaggagtgcacctctctacttgggaggtacaattgccatatgatttctagctgccatggtggttaggaatgtgatactgcctgtttgcaaagtcacagaccttgcctcagaaggagctgtgagccagtattcatttaagaggcaataaggcaaatgccagaattaaaaaaaaaaatcatcaaagacagaaaatgcctgaccaaattctaaaacctaatccatataagtttattcatttaggaatgttcgtttaaattaatctgcagtttttaccaagagctaagccaatatatgtgcttttcaaccagtattgtcacagcatgaaagtcaagtcaggttccagactgttaagaggtgtaatctaatgaagaaatcaattagatgccccgaaatctacagtcgctgaataaccaataaacagtaacctccatcaaatgctataccaatggaccagtgttagtagctgctccctgtattatgtgaacagtcttattctatgtacacagatgtaattaaaattgtaatcctaacaaacaaaagaaatgtagttcagcttttcaatgtttcatgtttgctgtgcttttctgaattttatgttgcattcaaagactgttgtcttgttcttgtggtgtttggattcttgtggtgtgtgcttttagacacagggtagaattagagacaatattggatgtacaattcctcaggagactacagtagtatattctattccttaccagtaataaggttcttcctaataataattaagagattgaaactccaaacaagtattcattatgaacagatacacatcaaaatcataataatattttcaaaacaaggaataatttctctaatggtttattatagaataccaatgtatagcttagaaataaaactttgaatatttcaagaatatagataagtctaatttttaaatgctgtatatatggctttcactcaatcatctctcagatgttgttattaactcgctctgtgttgttgcaaaactttttggtgcagattcgtttccaaaactattgctactttgtgtgctttaaacaaaataccttgggttgatgaaacatcaacccagtgctaggaatactgtgtatctatcattagctatatgggactatattgtagattgtggtttctcagtagagaagtgactgtagtgtgattctagataaatcatcattagcaattcattcagatggtcaataacttgaaatttatagctgtgataggagttcagaaattggcacatccctttaaaaataacaacagaaaatacaactcctgggaaaaaaggtgctgattctataagattatttatatatgtaagtgtttaaaaagattattttccagaaagtttgtgcagggtttaagttgctactattcaactacactatatataaataaaatatatacaatatatacattgttttcactgtatcacattaaagtacttgggcttcagaagtaagagccaaccaactgaaaacctgagatggagatatgttcaaagaatgagatacaattttttagttttcagtttaagtaactctcagcattacaaaagagtaagtatctcacaaataggaaataaaactaaaacgtggatttaaaaagaactgcacgggctttagggtaaatgctcatcttaaacctcactagagggaagtcttctcaagtttcaagcaagaccatttacttaatgtgaagttttggaaagttataaaggtgtatgttttagccatatgattttaattttaattttgcttcttttaggttcgttcttatttaaagcaatatgattgtgtgactccttgtagttacacttgtgtttcaatcagatcagattgttgtatttattccactattttgcatttaaatgataacataaaagatataaaaaatttaaaactgctatttttcttatagaagagaaaatgggtgttggtgattgtattttaattatttaagcgtctctgtttacctgcctaggaaaacattttatggcagtcttatgtgcaaagatcgtaaaaggacaaaaaatttaaactgcttataataatccaggagttgcattatagccagtagtaaaaataataataataataataaaaccatgtctatagctgtagatgggcttcacatctgtaaagcaatcaattgtatatttttgtgatgtgtaccatactgtgtgctccagcaaatgtccatttgtgtaaatgtatttattttatattgtatatattgttaaatgcaaaaaggagatatgattctgtaactccaatcagttcagatgtgtaactcaaattattatgcctttcaggatgatggtagagcaatattaaacaagcttccacttt

SEQ ID NO: 130723 - DNA, 5216 bp, Homo sapiens
  Payload ID: 5556
  Gene Symbol: ESRRG
  Gene Name: estrogen-related receptor gamma
  Uniprot ID: P62508
  ENST ID: ENST00000361395
  CDS Start-End: 224-1531
agctgacaatttactggttcatcaatgaaacaatattaaattatgaagatgtaaggaaaaaatcctacgctaacactgtcgcagtttgaaagctttaaaaagttgaagtctattggaaaccttcttataagaaaccttcctagtcagagaattcaactttcttcttttcttcattcatgaaaatgcagatccactgagaaagggaataaggcttctctgcagaatgtcaaacaaagatcgacacattgattccagctgttcgtccttcatcaagacggaaccttccagcccagcctccctgacggacagcgtcaaccaccacagccctggtggctcttcagacgccagtgggagctacagttcaaccatgaatggccatcagaacggacttgactcgccacctctctacccttctgctcctatcctgggaggtagtgggcctgtcaggaaactgtatgatgactgctccagcaccattgttgaagatccccagaccaagtgtgaatacatgctcaactcgatgcccaagagactgtgtttagtgtgtggtgacatcgcttctgggtaccactatggggtagcatcatgtgaagcctgcaaggcattcttcaagaggacaattcaaggcaatatagaatacagctgccctgccacgaatgaatgtgaaatcacaaagcgcagacgtaaatcctgccaggcttgccgcttcatgaagtgtttaaaagtgggcatgctgaaagaaggggtgcgtcttgacagagtacgtggaggtcggcagaagtacaagcgcaggatagatgcggagaacagcccatacctgaaccctcagctggttcagccagccaaaaagccatataacaagattgtctcacatttgttggtggctgaaccggagaagatctatgccatgcctgaccctactgtccccgacagtgacatcaaagccctcactacactgtgtgacttggccgaccgagagttggtggttatcattggatgggcgaagcatattccaggcttctccacgctgtccctggcggaccagatgagccttctgcagagtgcttggatggaaattttgatccttggtgtcgtataccggtctctttcgtttgaggatgaacttgtctatgcagacgattatataatggacgaagaccagtccaaattagcaggccttcttgatctaaataatgctatcctgcagctggtaaagaaatacaagagcatgaagctggaaaaagaagaatttgtcaccctcaaagctatagctcttgctaattcagactccatgcacatagaagatgttgaagccgttcagaagcttcaggatgtcttacatgaagcgctgcaggattatgaagctggccagcacatggaagaccctcgtcgagctggcaagatgctgatgacactgccactcctgaggcagacctctaccaaggccgtgcagcatttctacaacatcaaactagaaggcaaagtcccaatgcacaaactttttttggaaatgttggaggccaaggtctgactaaaagctccctgggccttcccatccttcatgttgaaaaagggaaaataaacccaagagtgatgtcgaagaaacttagagtttagttaacaacatcaaaaatcaacagactgcactgataatttagcagcaagactatgaagcagctttcagattcctccataggttcctgatgagtttctttctactttctccatcatcttctttcctctttcttcccacatttctctttctctttattttttctccttttcttctttcacctcccttatttctttgcttctttcattcctagttcccattctcctttattttcttcccgtctgcctgccttctttcttttctttacctactctcattcctctcttttctcatccttccccttttttctaaatttgaaatagctttagtttaaaaaaaaatcctcccttccccctttcctttccctttctttcctttttccctttccttttccctttcctttcctttcctcttgaccttctttccatctttctttttcttccttctgctgctgaacttttaaaagaggtctctaactgaagagagatggaagccagccctgccaaaggatggagatccataatatggatgccagtgaacttattgtgaaccatactgtccccaatgactaaggaatcaaagagagagaaccaacgttcctaaaagtacagtgcaacatatacaaattgactgagtgcagtattagatttcatgggagcagcctctaattagacaacttaagcaacgttgcatcggctgcttcttatcattgcttttccatctagatcagttacagccatttgattccttaattgttttttcaagtcttccaggtatttgttagtttagctactatgtaactttttcagggaatagtttaagctttattcattcatgcaatactaaagagaaataagaatactgcaattttgtgctggctttgaacaattacgaacaataatgaaggacaaatgaatcctgaaggaagatttttaaaaatgttttgtttcttcttacaaatggagatttttttgtaccagctttaccacttttcagccatttattaatatgggaatttaacttactcaagcaatagttgaagggaaggtgcatattatcacggatgcaatttatgttgtgtgccagtctggtcccaaacatcaatttcttaacatgagctccagtttacctaaatgttcactgacacaaaggatgagattacacctacagtgactctgagtagtcacatatataagcactgcacatgagatatagatccgtagaattgtcaggagtgcacctctctacttgggaggtacaattgccatatgatttctagctgccatggtggttaggaatgtgatactgcctgtttgcaaagtcacagaccttgcctcagaaggagctgtgagccagtattcatttaagaggcaataaggcaaatgccagaattaaaaaaaaaaatcatcaaagacagaaaatgcctgaccaaattctaaaacctaatccatataagtttattcatttaggaatgttcgtttaaattaatctgcagtttttaccaagagctaagccaatatatgtgcttttcaaccagtattgtcacagcatgaaagtcaagtcaggttccagactgttaagaggtgtaatctaatgaagaaatcaattagatgccccgaaatctacagtcgctgaataaccaataaacagtaacctccatcaaatgctataccaatggaccagtgttagtagctgctccctgtattatgtgaacagtcttattctatgtacacagatgtaattaaaattgtaatcctaacaaacaaaagaaatgtagttcagcttttcaatgtttcatgtttgctgtgcttttctgaattttatgttgcattcaaagactgttgtcttgttcttgtggtgtttggattcttgtggtgtgtgcttttagacacagggtagaattagagacaatattggatgtacaattcctcaggagactacagtagtatattctattccttaccagtaataaggttcttcctaataataattaagagattgaaactccaaacaagtattcattatgaacagatacacatcaaaatcataataatattttcaaaacaaggaataatttctctaatggtttattatagaataccaatgtatagcttagaaataaaactttgaatatttcaagaatatagataagtctaatttttaaatgctgtatatatggctttcactcaatcatctctcagatgttgttattaactcgctctgtgttgttgcaaaactttttggtgcagattcgtttccaaaactattgctactttgtgtgctttaaacaaaataccttgggttgatgaaacatcaacccagtgctaggaatactgtgtatctatcattagctatatgggactatattgtagattgtggtttctcagtagagaagtgactgtagtgtgattctagataaatcatcattagcaattcattcagatggtcaataacttgaaatttatagctgtgataggagttcagaaattggcacatccctttaaaaataacaacagaaaatacaactcctgggaaaaaaggtgctgattctataagattatttatatatgtaagtgtttaaaaagattattttccagaaagtttgtgcagggtttaagttgctactattcaactacactatatataaataaaatatatacaatatatacattgttttcactgtatcacattaaagtacttgggcttcagaagtaagagccaaccaactgaaaacctgagatggagatatgttcaaagaatgagatacaattttttagttttcagtttaagtaactctcagcattacaaaagagtaagtatctcacaaataggaaataaaactaaaacgtggatttaaaaagaactgcacgggctttagggtaaatgctcatcttaaacctcactagagggaagtcttctcaagtttcaagcaagaccatttacttaatgtgaagttttggaaagttataaaggtgtatgttttagccatatgattttaattttaattttgcttcttttaggttcgttcttatttaaagcaatatgattgtgtgactccttgtagttacacttgtgtttcaatcagatcagattgttgtatttattccactattttgcatttaaatgataacataaaagatataaaaaatttaaaactgctatttttcttatagaagagaaaatgggtgttggtgattgtattttaattatttaagcgtctctgtttacctgcctaggaaaacattttatggcagtcttatgtgcaaagatcgtaaaaggacaaaaaatttaaactgcttataataatccaggagttgcattatagccagtagtaaaaataataataataataataaaaccatgtctatagctgtagatgggcttcacatctgtaaagcaatcaattgtatatttttgtgatgtgtaccatactgtgtgctccagcaaatgtccatttgtgtaaatgtatttattttatattgtatatattgttaaatgcaaaaaggagatatgattctgtaactccaatcagttcagatgtgtaactcaaattattatgcctttcaggatgatggtagagcaatattaaacaagcttccacttt

SEQ ID NO: 130724 - DNA, 5363 bp, Homo sapiens
  Payload ID: 5556
  Gene Symbol: ESRRG
  Gene Name: estrogen-related receptor gamma
  Uniprot ID: P62508
  ENST ID: ENST00000361525
  CDS Start-End: 363-1670
aaaggaggcgtgtgtaagatgtgcaatgttcctgcatgggggttttgtagactttcatagccaaagaaaccggcttcggcttctttaaaatccccgacgactcacctgattaacctgctgcagttctgaccctgccaagagctgacaatttactggttcatcaatgaaacaatattaaattatgaagatgtaaggaaaaaatcctacgctaacactgtcgcagtttgaaagctttaaaaagttgaagtctattggaaaccttcttataagaaaccttcctagtcagagaattcaactttcttcttttcttcattcatgaaaatgcagatccactgagaaagggaataaggcttctctgcagaatgtcaaacaaagatcgacacattgattccagctgttcgtccttcatcaagacggaaccttccagcccagcctccctgacggacagcgtcaaccaccacagccctggtggctcttcagacgccagtgggagctacagttcaaccatgaatggccatcagaacggacttgactcgccacctctctacccttctgctcctatcctgggaggtagtgggcctgtcaggaaactgtatgatgactgctccagcaccattgttgaagatccccagaccaagtgtgaatacatgctcaactcgatgcccaagagactgtgtttagtgtgtggtgacatcgcttctgggtaccactatggggtagcatcatgtgaagcctgcaaggcattcttcaagaggacaattcaaggcaatatagaatacagctgccctgccacgaatgaatgtgaaatcacaaagcgcagacgtaaatcctgccaggcttgccgcttcatgaagtgtttaaaagtgggcatgctgaaagaaggggtgcgtcttgacagagtacgtggaggtcggcagaagtacaagcgcaggatagatgcggagaacagcccatacctgaaccctcagctggttcagccagccaaaaagccatataacaagattgtctcacatttgttggtggctgaaccggagaagatctatgccatgcctgaccctactgtccccgacagtgacatcaaagccctcactacactgtgtgacttggccgaccgagagttggtggttatcattggatgggcgaagcatattccaggcttctccacgctgtccctggcggaccagatgagccttctgcagagtgcttggatggaaattttgatccttggtgtcgtataccggtctctttcgtttgaggatgaacttgtctatgcagacgattatataatggacgaagaccagtccaaattagcaggccttcttgatctaaataatgctatcctgcagctggtaaagaaatacaagagcatgaagctggaaaaagaagaatttgtcaccctcaaagctatagctcttgctaattcagactccatgcacatagaagatgttgaagccgttcagaagcttcaggatgtcttacatgaagcgctgcaggattatgaagctggccagcacatggaagaccctcgtcgagctggcaagatgctgatgacactgccactcctgaggcagacctctaccaaggccgtgcagcatttctacaacatcaaactagaaggcaaagtcccaatgcacaaactttttttggaaatgttggaggccaaggtctgactaaaagctccctgggccttcccatccttcatgttgaaaaagggaaaataaacccaagagtgatgtcgaagaaacttagagtttagttaacaacatcaaaaatcaacagactgcactgataatttagcagcaagactatgaagcagctttcagattcctccataggttcctgatgagtttctttctactttctccatcatcttctttcctctttcttcccacatttctctttctctttattttttctccttttcttctttcacctcccttatttctttgcttctttcattcctagttcccattctcctttattttcttcccgtctgcctgccttctttcttttctttacctactctcattcctctcttttctcatccttccccttttttctaaatttgaaatagctttagtttaaaaaaaaatcctcccttccccctttcctttccctttctttcctttttccctttccttttccctttcctttcctttcctcttgaccttctttccatctttctttttcttccttctgctgctgaacttttaaaagaggtctctaactgaagagagatggaagccagccctgccaaaggatggagatccataatatggatgccagtgaacttattgtgaaccatactgtccccaatgactaaggaatcaaagagagagaaccaacgttcctaaaagtacagtgcaacatatacaaattgactgagtgcagtattagatttcatgggagcagcctctaattagacaacttaagcaacgttgcatcggctgcttcttatcattgcttttccatctagatcagttacagccatttgattccttaattgttttttcaagtcttccaggtatttgttagtttagctactatgtaactttttcagggaatagtttaagctttattcattcatgcaatactaaagagaaataagaatactgcaattttgtgctggctttgaacaattacgaacaataatgaaggacaaatgaatcctgaaggaagatttttaaaaatgttttgtttcttcttacaaatggagatttttttgtaccagctttaccacttttcagccatttattaatatgggaatttaacttactcaagcaatagttgaagggaaggtgcatattatcacggatgcaatttatgttgtgtgccagtctggtcccaaacatcaatttcttaacatgagctccagtttacctaaatgttcactgacacaaaggatgagattacacctacagtgactctgagtagtcacatatataagcactgcacatgagatatagatccgtagaattgtcaggagtgcacctctctacttgggaggtacaattgccatatgatttctagctgccatggtggttaggaatgtgatactgcctgtttgcaaagtcacagaccttgcctcagaaggagctgtgagccagtattcatttaagaggcaataaggcaaatgccagaattaaaaaaaaaaatcatcaaagacagaaaatgcctgaccaaattctaaaacctaatccatataagtttattcatttaggaatgttcgtttaaattaatctgcagtttttaccaagagctaagccaatatatgtgcttttcaaccagtattgtcacagcatgaaagtcaagtcaggttccagactgttaagaggtgtaatctaatgaagaaatcaattagatgccccgaaatctacagtcgctgaataaccaataaacagtaacctccatcaaatgctataccaatggaccagtgttagtagctgctccctgtattatgtgaacagtcttattctatgtacacagatgtaattaaaattgtaatcctaacaaacaaaagaaatgtagttcagcttttcaatgtttcatgtttgctgtgcttttctgaattttatgttgcattcaaagactgttgtcttgttcttgtggtgtttggattcttgtggtgtgtgcttttagacacagggtagaattagagacaatattggatgtacaattcctcaggagactacagtagtatattctattccttaccagtaataaggttcttcctaataataattaagagattgaaactccaaacaagtattcattatgaacagatacacatcaaaatcataataatattttcaaaacaaggaataatttctctaatggtttattatagaataccaatgtatagcttagaaataaaactttgaatatttcaagaatatagataagtctaatttttaaatgctgtatatatggctttcactcaatcatctctcagatgttgttattaactcgctctgtgttgttgcaaaactttttggtgcagattcgtttccaaaactattgctactttgtgtgctttaaacaaaataccttgggttgatgaaacatcaacccagtgctaggaatactgtgtatctatcattagctatatgggactatattgtagattgtggtttctcagtagagaagtgactgtagtgtgattctagataaatcatcattagcaattcattcagatggtcaataacttgaaatttatagctgtgataggagttcagaaattggcacatccctttaaaaataacaacagaaaatacaactcctgggaaaaaaggtgctgattctataagattatttatatatgtaagtgtttaaaaagattattttccagaaagtttgtgcagggtttaagttgctactattcaactacactatatataaataaaatatatacaatatatacattgttttcactgtatcacattaaagtacttgggcttcagaagtaagagccaaccaactgaaaacctgagatggagatatgttcaaagaatgagatacaattttttagttttcagtttaagtaactctcagcattacaaaagagtaagtatctcacaaataggaaataaaactaaaacgtggatttaaaaagaactgcacgggctttagggtaaatgctcatcttaaacctcactagagggaagtcttctcaagtttcaagcaagaccatttacttaatgtgaagttttggaaagttataaaggtgtatgttttagccatatgattttaattttaattttgcttcttttaggttcgttcttatttaaagcaatatgattgtgtgactccttgtagttacacttgtgtttcaatcagatcagattgttgtatttattccactattttgcatttaaatgataacataaaagatataaaaaatttaaaactgctatttttcttatagaagagaaaatgggtgttggtgattgtattttaattatttaagcgtctctgtttacctgcctaggaaaacattttatggcagtcttatgtgcaaagatcgtaaaaggacaaaaaatttaaactgcttataataatccaggagttgcattatagccagtagtaaaaataataataataataataaaaccatgtctatagctgtagatgggcttcacatctgtaaagcaatcaattgtatatttttgtgatgtgtaccatactgtgtgctccagcaaatgtccatttgtgtaaatgtatttattttatattgtatatattgttaaatgcaaaaaggagatatgattctgtaactccaatcagttcagatgtgtaactcaaattattatgcctttcaggatgatggtagagcaatattaaacaagcttccacttttgactgct

SEQ ID NO: 130725 - DNA, 5365 bp, Homo sapiens
  Payload ID: 5556
  Gene Symbol: ESRRG
  Gene Name: estrogen-related receptor gamma
  Uniprot ID: P62508
  ENST ID: ENST00000366937
  CDS Start-End: 268-1680
aagtccttgattaggagagtgtgagagctttggtcccaactggctgtgcctataggcttgtcactaggagaacatttgtgttaattgcactgtgctctgtcaaggaaactttgatttatagctggggtgcacaaataatggttgccggtcgcacatggattcggtagaactttgccttcctgaatctttttccctgcactacgaggaagaaactgatgtaaagttcccatcatgaatgtaattaggaattgtgcatttagatcctgaatgtggcgagaatgtgattggggtcttggagcagtcaagtctgatctggcctgtgttccttcagctaaaaggcttctctgcagaatgtcaaacaaagatcgacacattgattccagctgttcgtccttcatcaagacggaaccttccagcccagcctccctgacggacagcgtcaaccaccacagccctggtggctcttcagacgccagtgggagctacagttcaaccatgaatggccatcagaacggacttgactcgccacctctctacccttctgctcctatcctgggaggtagtgggcctgtcaggaaactgtatgatgactgctccagcaccattgttgaagatccccagaccaagtgtgaatacatgctcaactcgatgcccaagagactgtgtttagtgtgtggtgacatcgcttctgggtaccactatggggtagcatcatgtgaagcctgcaaggcattcttcaagaggacaattcaaggcaatatagaatacagctgccctgccacgaatgaatgtgaaatcacaaagcgcagacgtaaatcctgccaggcttgccgcttcatgaagtgtttaaaagtgggcatgctgaaagaaggggtgcgtcttgacagagtacgtggaggtcggcagaagtacaagcgcaggatagatgcggagaacagcccatacctgaaccctcagctggttcagccagccaaaaagccattgctctggtctgatcctgcagataacaagattgtctcacatttgttggtggctgaaccggagaagatctatgccatgcctgaccctactgtccccgacagtgacatcaaagccctcactacactgtgtgacttggccgaccgagagttggtggttatcattggatgggcgaagcatattccaggcttctccacgctgtccctggcggaccagatgagccttctgcagagtgcttggatggaaattttgatccttggtgtcgtataccggtctctttcgtttgaggatgaacttgtctatgcagacgattatataatggacgaagaccagtccaaattagcaggccttcttgatctaaataatgctatcctgcagctggtaaagaaatacaagagcatgaagctggaaaaagaagaatttgtcaccctcaaagctatagctcttgctaattcagactccatgcacatagaagatgttgaagccgttcagaagcttcaggatgtcttacatgaagcgctgcaggattatgaagctggccagcacatggaagaccctcgtcgagctggcaagatgctgatgacactgccactcctgaggcagacctctaccaaggccgtgcagcatttctacaacatcaaactagaaggcaaagtcccaatgcacaaactttttttggaaatgttggaggccaaggtctgactaaaagctccctgggccttcccatccttcatgttgaaaaagggaaaataaacccaagagtgatgtcgaagaaacttagagtttagttaacaacatcaaaaatcaacagactgcactgataatttagcagcaagactatgaagcagctttcagattcctccataggttcctgatgagtttctttctactttctccatcatcttctttcctctttcttcccacatttctctttctctttattttttctccttttcttctttcacctcccttatttctttgcttctttcattcctagttcccattctcctttattttcttcccgtctgcctgccttctttcttttctttacctactctcattcctctcttttctcatccttccccttttttctaaatttgaaatagctttagtttaaaaaaaaatcctcccttccccctttcctttccctttctttcctttttccctttccttttccctttcctttcctttcctcttgaccttctttccatctttctttttcttccttctgctgctgaacttttaaaagaggtctctaactgaagagagatggaagccagccctgccaaaggatggagatccataatatggatgccagtgaacttattgtgaaccatactgtccccaatgactaaggaatcaaagagagagaaccaacgttcctaaaagtacagtgcaacatatacaaattgactgagtgcagtattagatttcatgggagcagcctctaattagacaacttaagcaacgttgcatcggctgcttcttatcattgcttttccatctagatcagttacagccatttgattccttaattgttttttcaagtcttccaggtatttgttagtttagctactatgtaactttttcagggaatagtttaagctttattcattcatgcaatactaaagagaaataagaatactgcaattttgtgctggctttgaacaattacgaacaataatgaaggacaaatgaatcctgaaggaagatttttaaaaatgttttgtttcttcttacaaatggagatttttttgtaccagctttaccacttttcagccatttattaatatgggaatttaacttactcaagcaatagttgaagggaaggtgcatattatcacggatgcaatttatgttgtgtgccagtctggtcccaaacatcaatttcttaacatgagctccagtttacctaaatgttcactgacacaaaggatgagattacacctacagtgactctgagtagtcacatatataagcactgcacatgagatatagatccgtagaattgtcaggagtgcacctctctacttgggaggtacaattgccatatgatttctagctgccatggtggttaggaatgtgatactgcctgtttgcaaagtcacagaccttgcctcagaaggagctgtgagccagtattcatttaagaggcaataaggcaaatgccagaattaaaaaaaaaaatcatcaaagacagaaaatgcctgaccaaattctaaaacctaatccatataagtttattcatttaggaatgttcgtttaaattaatctgcagtttttaccaagagctaagccaatatatgtgcttttcaaccagtattgtcacagcatgaaagtcaagtcaggttccagactgttaagaggtgtaatctaatgaagaaatcaattagatgccccgaaatctacagtcgctgaataaccaataaacagtaacctccatcaaatgctataccaatggaccagtgttagtagctgctccctgtattatgtgaacagtcttattctatgtacacagatgtaattaaaattgtaatcctaacaaacaaaagaaatgtagttcagcttttcaatgtttcatgtttgctgtgcttttctgaattttatgttgcattcaaagactgttgtcttgttcttgtggtgtttggattcttgtggtgtgtgcttttagacacagggtagaattagagacaatattggatgtacaattcctcaggagactacagtagtatattctattccttaccagtaataaggttcttcctaataataattaagagattgaaactccaaacaagtattcattatgaacagatacacatcaaaatcataataatattttcaaaacaaggaataatttctctaatggtttattatagaataccaatgtatagcttagaaataaaactttgaatatttcaagaatatagataagtctaatttttaaatgctgtatatatggctttcactcaatcatctctcagatgttgttattaactcgctctgtgttgttgcaaaactttttggtgcagattcgtttccaaaactattgctactttgtgtgctttaaacaaaataccttgggttgatgaaacatcaacccagtgctaggaatactgtgtatctatcattagctatatgggactatattgtagattgtggtttctcagtagagaagtgactgtagtgtgattctagataaatcatcattagcaattcattcagatggtcaataacttgaaatttatagctgtgataggagttcagaaattggcacatccctttaaaaataacaacagaaaatacaactcctgggaaaaaaggtgctgattctataagattatttatatatgtaagtgtttaaaaagattattttccagaaagtttgtgcagggtttaagttgctactattcaactacactatatataaataaaatatatacaatatatacattgttttcactgtatcacattaaagtacttgggcttcagaagtaagagccaaccaactgaaaacctgagatggagatatgttcaaagaatgagatacaattttttagttttcagtttaagtaactctcagcattacaaaagagtaagtatctcacaaataggaaataaaactaaaacgtggatttaaaaagaactgcacgggctttagggtaaatgctcatcttaaacctcactagagggaagtcttctcaagtttcaagcaagaccatttacttaatgtgaagttttggaaagttataaaggtgtatgttttagccatatgattttaattttaattttgcttcttttaggttcgttcttatttaaagcaatatgattgtgtgactccttgtagttacacttgtgtttcaatcagatcagattgttgtatttattccactattttgcatttaaatgataacataaaagatataaaaaatttaaaactgctatttttcttatagaagagaaaatgggtgttggtgattgtattttaattatttaagcgtctctgtttacctgcctaggaaaacattttatggcagtcttatgtgcaaagatcgtaaaaggacaaaaaatttaaactgcttataataatccaggagttgcattatagccagtagtaaaaataataataataataataaaaccatgtctatagctgtagatgggcttcacatctgtaaagcaatcaattgtatatttttgtgatgtgtaccatactgtgtgctccagcaaatgtccatttgtgtaaatgtatttattttatattgtatatattgttaaatgcaaaaaggagatatgattctgtaactccaatcagttcagatgtgtaactcaaattattatgcctttcaggatgatggtagagcaatattaaacaagcttccacttt

SEQ ID NO: 130726 - DNA, 5274 bp, Homo sapiens
  Payload ID: 5556
  Gene Symbol: ESRRG
  Gene Name: estrogen-related receptor gamma
  Uniprot ID: P62508
  ENST ID: ENST00000366938
  CDS Start-End: 282-1589
agctgacaatttactggttcatcaatgaaacaatattaaattatgaagatgtaaggaaaaaatcctacgctaacactgtcgcagtttgaaagacttgaatgagacctgcctcatcagtcatgggatcatagtgtcacagatggaaaagcaactatcagctgaattgtactgaactacacacttggctaattcatcttattgctctacacatctaaaggaaggctcattctgttcttggagtctagacagcatcaggagttgggctcaggcttctctgcagaatgtcaaacaaagatcgacacattgattccagctgttcgtccttcatcaagacggaaccttccagcccagcctccctgacggacagcgtcaaccaccacagccctggtggctcttcagacgccagtgggagctacagttcaaccatgaatggccatcagaacggacttgactcgccacctctctacccttctgctcctatcctgggaggtagtgggcctgtcaggaaactgtatgatgactgctccagcaccattgttgaagatccccagaccaagtgtgaatacatgctcaactcgatgcccaagagactgtgtttagtgtgtggtgacatcgcttctgggtaccactatggggtagcatcatgtgaagcctgcaaggcattcttcaagaggacaattcaaggcaatatagaatacagctgccctgccacgaatgaatgtgaaatcacaaagcgcagacgtaaatcctgccaggcttgccgcttcatgaagtgtttaaaagtgggcatgctgaaagaaggggtgcgtcttgacagagtacgtggaggtcggcagaagtacaagcgcaggatagatgcggagaacagcccatacctgaaccctcagctggttcagccagccaaaaagccatataacaagattgtctcacatttgttggtggctgaaccggagaagatctatgccatgcctgaccctactgtccccgacagtgacatcaaagccctcactacactgtgtgacttggccgaccgagagttggtggttatcattggatgggcgaagcatattccaggcttctccacgctgtccctggcggaccagatgagccttctgcagagtgcttggatggaaattttgatccttggtgtcgtataccggtctctttcgtttgaggatgaacttgtctatgcagacgattatataatggacgaagaccagtccaaattagcaggccttcttgatctaaataatgctatcctgcagctggtaaagaaatacaagagcatgaagctggaaaaagaagaatttgtcaccctcaaagctatagctcttgctaattcagactccatgcacatagaagatgttgaagccgttcagaagcttcaggatgtcttacatgaagcgctgcaggattatgaagctggccagcacatggaagaccctcgtcgagctggcaagatgctgatgacactgccactcctgaggcagacctctaccaaggccgtgcagcatttctacaacatcaaactagaaggcaaagtcccaatgcacaaactttttttggaaatgttggaggccaaggtctgactaaaagctccctgggccttcccatccttcatgttgaaaaagggaaaataaacccaagagtgatgtcgaagaaacttagagtttagttaacaacatcaaaaatcaacagactgcactgataatttagcagcaagactatgaagcagctttcagattcctccataggttcctgatgagtttctttctactttctccatcatcttctttcctctttcttcccacatttctctttctctttattttttctccttttcttctttcacctcccttatttctttgcttctttcattcctagttcccattctcctttattttcttcccgtctgcctgccttctttcttttctttacctactctcattcctctcttttctcatccttccccttttttctaaatttgaaatagctttagtttaaaaaaaaatcctcccttccccctttcctttccctttctttcctttttccctttccttttccctttcctttcctttcctcttgaccttctttccatctttctttttcttccttctgctgctgaacttttaaaagaggtctctaactgaagagagatggaagccagccctgccaaaggatggagatccataatatggatgccagtgaacttattgtgaaccatactgtccccaatgactaaggaatcaaagagagagaaccaacgttcctaaaagtacagtgcaacatatacaaattgactgagtgcagtattagatttcatgggagcagcctctaattagacaacttaagcaacgttgcatcggctgcttcttatcattgcttttccatctagatcagttacagccatttgattccttaattgttttttcaagtcttccaggtatttgttagtttagctactatgtaactttttcagggaatagtttaagctttattcattcatgcaatactaaagagaaataagaatactgcaattttgtgctggctttgaacaattacgaacaataatgaaggacaaatgaatcctgaaggaagatttttaaaaatgttttgtttcttcttacaaatggagatttttttgtaccagctttaccacttttcagccatttattaatatgggaatttaacttactcaagcaatagttgaagggaaggtgcatattatcacggatgcaatttatgttgtgtgccagtctggtcccaaacatcaatttcttaacatgagctccagtttacctaaatgttcactgacacaaaggatgagattacacctacagtgactctgagtagtcacatatataagcactgcacatgagatatagatccgtagaattgtcaggagtgcacctctctacttgggaggtacaattgccatatgatttctagctgccatggtggttaggaatgtgatactgcctgtttgcaaagtcacagaccttgcctcagaaggagctgtgagccagtattcatttaagaggcaataaggcaaatgccagaattaaaaaaaaaaatcatcaaagacagaaaatgcctgaccaaattctaaaacctaatccatataagtttattcatttaggaatgttcgtttaaattaatctgcagtttttaccaagagctaagccaatatatgtgcttttcaaccagtattgtcacagcatgaaagtcaagtcaggttccagactgttaagaggtgtaatctaatgaagaaatcaattagatgccccgaaatctacagtcgctgaataaccaataaacagtaacctccatcaaatgctataccaatggaccagtgttagtagctgctccctgtattatgtgaacagtcttattctatgtacacagatgtaattaaaattgtaatcctaacaaacaaaagaaatgtagttcagcttttcaatgtttcatgtttgctgtgcttttctgaattttatgttgcattcaaagactgttgtcttgttcttgtggtgtttggattcttgtggtgtgtgcttttagacacagggtagaattagagacaatattggatgtacaattcctcaggagactacagtagtatattctattccttaccagtaataaggttcttcctaataataattaagagattgaaactccaaacaagtattcattatgaacagatacacatcaaaatcataataatattttcaaaacaaggaataatttctctaatggtttattatagaataccaatgtatagcttagaaataaaactttgaatatttcaagaatatagataagtctaatttttaaatgctgtatatatggctttcactcaatcatctctcagatgttgttattaactcgctctgtgttgttgcaaaactttttggtgcagattcgtttccaaaactattgctactttgtgtgctttaaacaaaataccttgggttgatgaaacatcaacccagtgctaggaatactgtgtatctatcattagctatatgggactatattgtagattgtggtttctcagtagagaagtgactgtagtgtgattctagataaatcatcattagcaattcattcagatggtcaataacttgaaatttatagctgtgataggagttcagaaattggcacatccctttaaaaataacaacagaaaatacaactcctgggaaaaaaggtgctgattctataagattatttatatatgtaagtgtttaaaaagattattttccagaaagtttgtgcagggtttaagttgctactattcaactacactatatataaataaaatatatacaatatatacattgttttcactgtatcacattaaagtacttgggcttcagaagtaagagccaaccaactgaaaacctgagatggagatatgttcaaagaatgagatacaattttttagttttcagtttaagtaactctcagcattacaaaagagtaagtatctcacaaataggaaataaaactaaaacgtggatttaaaaagaactgcacgggctttagggtaaatgctcatcttaaacctcactagagggaagtcttctcaagtttcaagcaagaccatttacttaatgtgaagttttggaaagttataaaggtgtatgttttagccatatgattttaattttaattttgcttcttttaggttcgttcttatttaaagcaatatgattgtgtgactccttgtagttacacttgtgtttcaatcagatcagattgttgtatttattccactattttgcatttaaatgataacataaaagatataaaaaatttaaaactgctatttttcttatagaagagaaaatgggtgttggtgattgtattttaattatttaagcgtctctgtttacctgcctaggaaaacattttatggcagtcttatgtgcaaagatcgtaaaaggacaaaaaatttaaactgcttataataatccaggagttgcattatagccagtagtaaaaataataataataataataaaaccatgtctatagctgtagatgggcttcacatctgtaaagcaatcaattgtatatttttgtgatgtgtaccatactgtgtgctccagcaaatgtccatttgtgtaaatgtatttattttatattgtatatattgttaaatgcaaaaaggagatatgattctgtaactccaatcagttcagatgtgtaactcaaattattatgcctttcaggatgatggtagagcaatattaaacaagcttccacttt

SEQ ID NO: 130727 - DNA, 5314 bp, Homo sapiens
  Payload ID: 5556
  Gene Symbol: ESRRG
  Gene Name: estrogen-related receptor gamma
  Uniprot ID: P62508
  ENST ID: ENST00000366940
  CDS Start-End: 319-1626
ggagggcgagggcgggctcctctggaggcggcgggctccaggccgggctccctaaacgggtcagcaattggagcgggaaggccggacagagacagggtcttgctttgtcacccaggctggagtgcagtgccacaatcagagcttactcctgccttgaactcctgggcttcagggatcctgctgcctcggccctccaagcagctgagactacagagctgacaatttactggttcatcaatgaaacaatattaaattatgaagatgtaaggaaaaaatcctacgctaacactgtcgcagtttgaaaggcttctctgcagaatgtcaaacaaagatcgacacattgattccagctgttcgtccttcatcaagacggaaccttccagcccagcctccctgacggacagcgtcaaccaccacagccctggtggctcttcagacgccagtgggagctacagttcaaccatgaatggccatcagaacggacttgactcgccacctctctacccttctgctcctatcctgggaggtagtgggcctgtcaggaaactgtatgatgactgctccagcaccattgttgaagatccccagaccaagtgtgaatacatgctcaactcgatgcccaagagactgtgtttagtgtgtggtgacatcgcttctgggtaccactatggggtagcatcatgtgaagcctgcaaggcattcttcaagaggacaattcaaggcaatatagaatacagctgccctgccacgaatgaatgtgaaatcacaaagcgcagacgtaaatcctgccaggcttgccgcttcatgaagtgtttaaaagtgggcatgctgaaagaaggggtgcgtcttgacagagtacgtggaggtcggcagaagtacaagcgcaggatagatgcggagaacagcccatacctgaaccctcagctggttcagccagccaaaaagccatataacaagattgtctcacatttgttggtggctgaaccggagaagatctatgccatgcctgaccctactgtccccgacagtgacatcaaagccctcactacactgtgtgacttggccgaccgagagttggtggttatcattggatgggcgaagcatattccaggcttctccacgctgtccctggcggaccagatgagccttctgcagagtgcttggatggaaattttgatccttggtgtcgtataccggtctctttcgtttgaggatgaacttgtctatgcagacgattatataatggacgaagaccagtccaaattagcaggccttcttgatctaaataatgctatcctgcagctggtaaagaaatacaagagcatgaagctggaaaaagaagaatttgtcaccctcaaagctatagctcttgctaattcagactccatgcacatagaagatgttgaagccgttcagaagcttcaggatgtcttacatgaagcgctgcaggattatgaagctggccagcacatggaagaccctcgtcgagctggcaagatgctgatgacactgccactcctgaggcagacctctaccaaggccgtgcagcatttctacaacatcaaactagaaggcaaagtcccaatgcacaaactttttttggaaatgttggaggccaaggtctgactaaaagctccctgggccttcccatccttcatgttgaaaaagggaaaataaacccaagagtgatgtcgaagaaacttagagtttagttaacaacatcaaaaatcaacagactgcactgataatttagcagcaagactatgaagcagctttcagattcctccataggttcctgatgagtttctttctactttctccatcatcttctttcctctttcttcccacatttctctttctctttattttttctccttttcttctttcacctcccttatttctttgcttctttcattcctagttcccattctcctttattttcttcccgtctgcctgccttctttcttttctttacctactctcattcctctcttttctcatccttccccttttttctaaatttgaaatagctttagtttaaaaaaaaatcctcccttccccctttcctttccctttctttcctttttccctttccttttccctttcctttcctttcctcttgaccttctttccatctttctttttcttccttctgctgctgaacttttaaaagaggtctctaactgaagagagatggaagccagccctgccaaaggatggagatccataatatggatgccagtgaacttattgtgaaccatactgtccccaatgactaaggaatcaaagagagagaaccaacgttcctaaaagtacagtgcaacatatacaaattgactgagtgcagtattagatttcatgggagcagcctctaattagacaacttaagcaacgttgcatcggctgcttcttatcattgcttttccatctagatcagttacagccatttgattccttaattgttttttcaagtcttccaggtatttgttagtttagctactatgtaactttttcagggaatagtttaagctttattcattcatgcaatactaaagagaaataagaatactgcaattttgtgctggctttgaacaattacgaacaataatgaaggacaaatgaatcctgaaggaagatttttaaaaatgttttgtttcttcttacaaatggagatttttttgtaccagctttaccacttttcagccatttattaatatgggaatttaacttactcaagcaatagttgaagggaaggtgcatattatcacggatgcaatttatgttgtgtgccagtctggtcccaaacatcaatttcttaacatgagctccagtttacctaaatgttcactgacacaaaggatgagattacacctacagtgactctgagtagtcacatatataagcactgcacatgagatatagatccgtagaattgtcaggagtgcacctctctacttgggaggtacaattgccatatgatttctagctgccatggtggttaggaatgtgatactgcctgtttgcaaagtcacagaccttgcctcagaaggagctgtgagccagtattcatttaagaggcaataaggcaaatgccagaattaaaaaaaaaaatcatcaaagacagaaaatgcctgaccaaattctaaaacctaatccatataagtttattcatttaggaatgttcgtttaaattaatctgcagtttttaccaagagctaagccaatatatgtgcttttcaaccagtattgtcacagcatgaaagtcaagtcaggttccagactgttaagaggtgtaatctaatgaagaaatcaattagatgccccgaaatctacagtcgctgaataaccaataaacagtaacctccatcaaatgctataccaatggaccagtgttagtagctgctccctgtattatgtgaacagtcttattctatgtacacagatgtaattaaaattgtaatcctaacaaacaaaagaaatgtagttcagcttttcaatgtttcatgtttgctgtgcttttctgaattttatgttgcattcaaagactgttgtcttgttcttgtggtgtttggattcttgtggtgtgtgcttttagacacagggtagaattagagacaatattggatgtacaattcctcaggagactacagtagtatattctattccttaccagtaataaggttcttcctaataataattaagagattgaaactccaaacaagtattcattatgaacagatacacatcaaaatcataataatattttcaaaacaaggaataatttctctaatggtttattatagaataccaatgtatagcttagaaataaaactttgaatatttcaagaatatagataagtctaatttttaaatgctgtatatatggctttcactcaatcatctctcagatgttgttattaactcgctctgtgttgttgcaaaactttttggtgcagattcgtttccaaaactattgctactttgtgtgctttaaacaaaataccttgggttgatgaaacatcaacccagtgctaggaatactgtgtatctatcattagctatatgggactatattgtagattgtggtttctcagtagagaagtgactgtagtgtgattctagataaatcatcattagcaattcattcagatggtcaataacttgaaatttatagctgtgataggagttcagaaattggcacatccctttaaaaataacaacagaaaatacaactcctgggaaaaaaggtgctgattctataagattatttatatatgtaagtgtttaaaaagattattttccagaaagtttgtgcagggtttaagttgctactattcaactacactatatataaataaaatatatacaatatatacattgttttcactgtatcacattaaagtacttgggcttcagaagtaagagccaaccaactgaaaacctgagatggagatatgttcaaagaatgagatacaattttttagttttcagtttaagtaactctcagcattacaaaagagtaagtatctcacaaataggaaataaaactaaaacgtggatttaaaaagaactgcacgggctttagggtaaatgctcatcttaaacctcactagagggaagtcttctcaagtttcaagcaagaccatttacttaatgtgaagttttggaaagttataaaggtgtatgttttagccatatgattttaattttaattttgcttcttttaggttcgttcttatttaaagcaatatgattgtgtgactccttgtagttacacttgtgtttcaatcagatcagattgttgtatttattccactattttgcatttaaatgataacataaaagatataaaaaatttaaaactgctatttttcttatagaagagaaaatgggtgttggtgattgtattttaattatttaagcgtctctgtttacctgcctaggaaaacattttatggcagtcttatgtgcaaagatcgtaaaaggacaaaaaatttaaactgcttataataatccaggagttgcattatagccagtagtaaaaataataataataataataaaaccatgtctatagctgtagatgggcttcacatctgtaaagcaatcaattgtatatttttgtgatgtgtaccatactgtgtgctccagcaaatgtccatttgtgtaaatgtatttattttatattgtatatattgttaaatgcaaaaaggagatatgattctgtaactccaatcagttcagatgtgtaactcaaattattatgcctttcaggatgatggtagagcaatattaaacaagcttccacttttga

SEQ ID NO: 130728 - DNA, 5542 bp, Homo sapiens
  Payload ID: 5556
  Gene Symbol: ESRRG
  Gene Name: estrogen-related receptor gamma
  Uniprot ID: P62508
  ENST ID: ENST00000391890
  CDS Start-End: 542-1849
aagctccaatcggggctttaagtccttgattaggagagtgtgagagctttggtcccaactggctgtgcctataggcttgtcactaggagaacatttgtgttaattgcactgtgctctgtcaaggaaactttgatttatagctggggtgcacaaataatggttgccggtcgcacatggattcggtagaactttgccttcctgaatctttttccctgcactacgaggaagagtagacttgaatgagacctgcctcatcagtcatgggatcatagtgtcacagatggaaaagcaactatcagctgaattgtactgaactacacacttggctaattcatcttattgctctacacatctaaaggaaggctcattctgttcttggagtctagacagcatcaggagttgggctcagtgaacaaaactttaatgtctagagcatttatgagggttttaatgattggaaaatctatcctgagaatgtggtcaccatatgtgacagccttgctttctatcttgtcttcagtttctggggcttctctgcagaatgtcaaacaaagatcgacacattgattccagctgttcgtccttcatcaagacggaaccttccagcccagcctccctgacggacagcgtcaaccaccacagccctggtggctcttcagacgccagtgggagctacagttcaaccatgaatggccatcagaacggacttgactcgccacctctctacccttctgctcctatcctgggaggtagtgggcctgtcaggaaactgtatgatgactgctccagcaccattgttgaagatccccagaccaagtgtgaatacatgctcaactcgatgcccaagagactgtgtttagtgtgtggtgacatcgcttctgggtaccactatggggtagcatcatgtgaagcctgcaaggcattcttcaagaggacaattcaaggcaatatagaatacagctgccctgccacgaatgaatgtgaaatcacaaagcgcagacgtaaatcctgccaggcttgccgcttcatgaagtgtttaaaagtgggcatgctgaaagaaggggtgcgtcttgacagagtacgtggaggtcggcagaagtacaagcgcaggatagatgcggagaacagcccatacctgaaccctcagctggttcagccagccaaaaagccatataacaagattgtctcacatttgttggtggctgaaccggagaagatctatgccatgcctgaccctactgtccccgacagtgacatcaaagccctcactacactgtgtgacttggccgaccgagagttggtggttatcattggatgggcgaagcatattccaggcttctccacgctgtccctggcggaccagatgagccttctgcagagtgcttggatggaaattttgatccttggtgtcgtataccggtctctttcgtttgaggatgaacttgtctatgcagacgattatataatggacgaagaccagtccaaattagcaggccttcttgatctaaataatgctatcctgcagctggtaaagaaatacaagagcatgaagctggaaaaagaagaatttgtcaccctcaaagctatagctcttgctaattcagactccatgcacatagaagatgttgaagccgttcagaagcttcaggatgtcttacatgaagcgctgcaggattatgaagctggccagcacatggaagaccctcgtcgagctggcaagatgctgatgacactgccactcctgaggcagacctctaccaaggccgtgcagcatttctacaacatcaaactagaaggcaaagtcccaatgcacaaactttttttggaaatgttggaggccaaggtctgactaaaagctccctgggccttcccatccttcatgttgaaaaagggaaaataaacccaagagtgatgtcgaagaaacttagagtttagttaacaacatcaaaaatcaacagactgcactgataatttagcagcaagactatgaagcagctttcagattcctccataggttcctgatgagtttctttctactttctccatcatcttctttcctctttcttcccacatttctctttctctttattttttctccttttcttctttcacctcccttatttctttgcttctttcattcctagttcccattctcctttattttcttcccgtctgcctgccttctttcttttctttacctactctcattcctctcttttctcatccttccccttttttctaaatttgaaatagctttagtttaaaaaaaaatcctcccttccccctttcctttccctttctttcctttttccctttccttttccctttcctttcctttcctcttgaccttctttccatctttctttttcttccttctgctgctgaacttttaaaagaggtctctaactgaagagagatggaagccagccctgccaaaggatggagatccataatatggatgccagtgaacttattgtgaaccatactgtccccaatgactaaggaatcaaagagagagaaccaacgttcctaaaagtacagtgcaacatatacaaattgactgagtgcagtattagatttcatgggagcagcctctaattagacaacttaagcaacgttgcatcggctgcttcttatcattgcttttccatctagatcagttacagccatttgattccttaattgttttttcaagtcttccaggtatttgttagtttagctactatgtaactttttcagggaatagtttaagctttattcattcatgcaatactaaagagaaataagaatactgcaattttgtgctggctttgaacaattacgaacaataatgaaggacaaatgaatcctgaaggaagatttttaaaaatgttttgtttcttcttacaaatggagatttttttgtaccagctttaccacttttcagccatttattaatatgggaatttaacttactcaagcaatagttgaagggaaggtgcatattatcacggatgcaatttatgttgtgtgccagtctggtcccaaacatcaatttcttaacatgagctccagtttacctaaatgttcactgacacaaaggatgagattacacctacagtgactctgagtagtcacatatataagcactgcacatgagatatagatccgtagaattgtcaggagtgcacctctctacttgggaggtacaattgccatatgatttctagctgccatggtggttaggaatgtgatactgcctgtttgcaaagtcacagaccttgcctcagaaggagctgtgagccagtattcatttaagaggcaataaggcaaatgccagaattaaaaaaaaaaatcatcaaagacagaaaatgcctgaccaaattctaaaacctaatccatataagtttattcatttaggaatgttcgtttaaattaatctgcagtttttaccaagagctaagccaatatatgtgcttttcaaccagtattgtcacagcatgaaagtcaagtcaggttccagactgttaagaggtgtaatctaatgaagaaatcaattagatgccccgaaatctacagtcgctgaataaccaataaacagtaacctccatcaaatgctataccaatggaccagtgttagtagctgctccctgtattatgtgaacagtcttattctatgtacacagatgtaattaaaattgtaatcctaacaaacaaaagaaatgtagttcagcttttcaatgtttcatgtttgctgtgcttttctgaattttatgttgcattcaaagactgttgtcttgttcttgtggtgtttggattcttgtggtgtgtgcttttagacacagggtagaattagagacaatattggatgtacaattcctcaggagactacagtagtatattctattccttaccagtaataaggttcttcctaataataattaagagattgaaactccaaacaagtattcattatgaacagatacacatcaaaatcataataatattttcaaaacaaggaataatttctctaatggtttattatagaataccaatgtatagcttagaaataaaactttgaatatttcaagaatatagataagtctaatttttaaatgctgtatatatggctttcactcaatcatctctcagatgttgttattaactcgctctgtgttgttgcaaaactttttggtgcagattcgtttccaaaactattgctactttgtgtgctttaaacaaaataccttgggttgatgaaacatcaacccagtgctaggaatactgtgtatctatcattagctatatgggactatattgtagattgtggtttctcagtagagaagtgactgtagtgtgattctagataaatcatcattagcaattcattcagatggtcaataacttgaaatttatagctgtgataggagttcagaaattggcacatccctttaaaaataacaacagaaaatacaactcctgggaaaaaaggtgctgattctataagattatttatatatgtaagtgtttaaaaagattattttccagaaagtttgtgcagggtttaagttgctactattcaactacactatatataaataaaatatatacaatatatacattgttttcactgtatcacattaaagtacttgggcttcagaagtaagagccaaccaactgaaaacctgagatggagatatgttcaaagaatgagatacaattttttagttttcagtttaagtaactctcagcattacaaaagagtaagtatctcacaaataggaaataaaactaaaacgtggatttaaaaagaactgcacgggctttagggtaaatgctcatcttaaacctcactagagggaagtcttctcaagtttcaagcaagaccatttacttaatgtgaagttttggaaagttataaaggtgtatgttttagccatatgattttaattttaattttgcttcttttaggttcgttcttatttaaagcaatatgattgtgtgactccttgtagttacacttgtgtttcaatcagatcagattgttgtatttattccactattttgcatttaaatgataacataaaagatataaaaaatttaaaactgctatttttcttatagaagagaaaatgggtgttggtgattgtattttaattatttaagcgtctctgtttacctgcctaggaaaacattttatggcagtcttatgtgcaaagatcgtaaaaggacaaaaaatttaaactgcttataataatccaggagttgcattatagccagtagtaaaaataataataataataataaaaccatgtctatagctgtagatgggcttcacatctgtaaagcaatcaattgtatatttttgtgatgtgtaccatactgtgtgctccagcaaatgtccatttgtgtaaatgtatttattttatattgtatatattgttaaatgcaaaaaggagatatgattctgtaactccaatcagttcagatgtgtaactcaaattattatgcctttcaggatgatggtagagcaatattaaacaagcttccacttttgactgct

SEQ ID NO: 130729 - DNA, 5216 bp, Homo sapiens
  Payload ID: 5556
  Gene Symbol: ESRRG
  Gene Name: estrogen-related receptor gamma
  Uniprot ID: P62508
  ENST ID: ENST00000408911
  CDS Start-End: 155-1531
aagtccttgattaggagagtgtgagagctttggtcccaactggctgtgcctataggcttgtcactaggagaacatttgtgttaattgcactgtgctctgtcaaggaaactttgatttatagctggggtgcacaaataatggttgccggtcgcacatggattcggtagaactttgccttcctgaatctttttccctgcactacgaggaagagcttctctgcagaatgtcaaacaaagatcgacacattgattccagctgttcgtccttcatcaagacggaaccttccagcccagcctccctgacggacagcgtcaaccaccacagccctggtggctcttcagacgccagtgggagctacagttcaaccatgaatggccatcagaacggacttgactcgccacctctctacccttctgctcctatcctgggaggtagtgggcctgtcaggaaactgtatgatgactgctccagcaccattgttgaagatccccagaccaagtgtgaatacatgctcaactcgatgcccaagagactgtgtttagtgtgtggtgacatcgcttctgggtaccactatggggtagcatcatgtgaagcctgcaaggcattcttcaagaggacaattcaaggcaatatagaatacagctgccctgccacgaatgaatgtgaaatcacaaagcgcagacgtaaatcctgccaggcttgccgcttcatgaagtgtttaaaagtgggcatgctgaaagaaggggtgcgtcttgacagagtacgtggaggtcggcagaagtacaagcgcaggatagatgcggagaacagcccatacctgaaccctcagctggttcagccagccaaaaagccatataacaagattgtctcacatttgttggtggctgaaccggagaagatctatgccatgcctgaccctactgtccccgacagtgacatcaaagccctcactacactgtgtgacttggccgaccgagagttggtggttatcattggatgggcgaagcatattccaggcttctccacgctgtccctggcggaccagatgagccttctgcagagtgcttggatggaaattttgatccttggtgtcgtataccggtctctttcgtttgaggatgaacttgtctatgcagacgattatataatggacgaagaccagtccaaattagcaggccttcttgatctaaataatgctatcctgcagctggtaaagaaatacaagagcatgaagctggaaaaagaagaatttgtcaccctcaaagctatagctcttgctaattcagactccatgcacatagaagatgttgaagccgttcagaagcttcaggatgtcttacatgaagcgctgcaggattatgaagctggccagcacatggaagaccctcgtcgagctggcaagatgctgatgacactgccactcctgaggcagacctctaccaaggccgtgcagcatttctacaacatcaaactagaaggcaaagtcccaatgcacaaactttttttggaaatgttggaggccaaggtctgactaaaagctccctgggccttcccatccttcatgttgaaaaagggaaaataaacccaagagtgatgtcgaagaaacttagagtttagttaacaacatcaaaaatcaacagactgcactgataatttagcagcaagactatgaagcagctttcagattcctccataggttcctgatgagtttctttctactttctccatcatcttctttcctctttcttcccacatttctctttctctttattttttctccttttcttctttcacctcccttatttctttgcttctttcattcctagttcccattctcctttattttcttcccgtctgcctgccttctttcttttctttacctactctcattcctctcttttctcatccttccccttttttctaaatttgaaatagctttagtttaaaaaaaaatcctcccttccccctttcctttccctttctttcctttttccctttccttttccctttcctttcctttcctcttgaccttctttccatctttctttttcttccttctgctgctgaacttttaaaagaggtctctaactgaagagagatggaagccagccctgccaaaggatggagatccataatatggatgccagtgaacttattgtgaaccatactgtccccaatgactaaggaatcaaagagagagaaccaacgttcctaaaagtacagtgcaacatatacaaattgactgagtgcagtattagatttcatgggagcagcctctaattagacaacttaagcaacgttgcatcggctgcttcttatcattgcttttccatctagatcagttacagccatttgattccttaattgttttttcaagtcttccaggtatttgttagtttagctactatgtaactttttcagggaatagtttaagctttattcattcatgcaatactaaagagaaataagaatactgcaattttgtgctggctttgaacaattacgaacaataatgaaggacaaatgaatcctgaaggaagatttttaaaaatgttttgtttcttcttacaaatggagatttttttgtaccagctttaccacttttcagccatttattaatatgggaatttaacttactcaagcaatagttgaagggaaggtgcatattatcacggatgcaatttatgttgtgtgccagtctggtcccaaacatcaatttcttaacatgagctccagtttacctaaatgttcactgacacaaaggatgagattacacctacagtgactctgagtagtcacatatataagcactgcacatgagatatagatccgtagaattgtcaggagtgcacctctctacttgggaggtacaattgccatatgatttctagctgccatggtggttaggaatgtgatactgcctgtttgcaaagtcacagaccttgcctcagaaggagctgtgagccagtattcatttaagaggcaataaggcaaatgccagaattaaaaaaaaaaatcatcaaagacagaaaatgcctgaccaaattctaaaacctaatccatataagtttattcatttaggaatgttcgtttaaattaatctgcagtttttaccaagagctaagccaatatatgtgcttttcaaccagtattgtcacagcatgaaagtcaagtcaggttccagactgttaagaggtgtaatctaatgaagaaatcaattagatgccccgaaatctacagtcgctgaataaccaataaacagtaacctccatcaaatgctataccaatggaccagtgttagtagctgctccctgtattatgtgaacagtcttattctatgtacacagatgtaattaaaattgtaatcctaacaaacaaaagaaatgtagttcagcttttcaatgtttcatgtttgctgtgcttttctgaattttatgttgcattcaaagactgttgtcttgttcttgtggtgtttggattcttgtggtgtgtgcttttagacacagggtagaattagagacaatattggatgtacaattcctcaggagactacagtagtatattctattccttaccagtaataaggttcttcctaataataattaagagattgaaactccaaacaagtattcattatgaacagatacacatcaaaatcataataatattttcaaaacaaggaataatttctctaatggtttattatagaataccaatgtatagcttagaaataaaactttgaatatttcaagaatatagataagtctaatttttaaatgctgtatatatggctttcactcaatcatctctcagatgttgttattaactcgctctgtgttgttgcaaaactttttggtgcagattcgtttccaaaactattgctactttgtgtgctttaaacaaaataccttgggttgatgaaacatcaacccagtgctaggaatactgtgtatctatcattagctatatgggactatattgtagattgtggtttctcagtagagaagtgactgtagtgtgattctagataaatcatcattagcaattcattcagatggtcaataacttgaaatttatagctgtgataggagttcagaaattggcacatccctttaaaaataacaacagaaaatacaactcctgggaaaaaaggtgctgattctataagattatttatatatgtaagtgtttaaaaagattattttccagaaagtttgtgcagggtttaagttgctactattcaactacactatatataaataaaatatatacaatatatacattgttttcactgtatcacattaaagtacttgggcttcagaagtaagagccaaccaactgaaaacctgagatggagatatgttcaaagaatgagatacaattttttagttttcagtttaagtaactctcagcattacaaaagagtaagtatctcacaaataggaaataaaactaaaacgtggatttaaaaagaactgcacgggctttagggtaaatgctcatcttaaacctcactagagggaagtcttctcaagtttcaagcaagaccatttacttaatgtgaagttttggaaagttataaaggtgtatgttttagccatatgattttaattttaattttgcttcttttaggttcgttcttatttaaagcaatatgattgtgtgactccttgtagttacacttgtgtttcaatcagatcagattgttgtatttattccactattttgcatttaaatgataacataaaagatataaaaaatttaaaactgctatttttcttatagaagagaaaatgggtgttggtgattgtattttaattatttaagcgtctctgtttacctgcctaggaaaacattttatggcagtcttatgtgcaaagatcgtaaaaggacaaaaaatttaaactgcttataataatccaggagttgcattatagccagtagtaaaaataataataataataataaaaccatgtctatagctgtagatgggcttcacatctgtaaagcaatcaattgtatatttttgtgatgtgtaccatactgtgtgctccagcaaatgtccatttgtgtaaatgtatttattttatattgtatatattgttaaatgcaaaaaggagatatgattctgtaactccaatcagttcagatgtgtaactcaaattattatgcctttcaggatgatggtagagcaatattaaacaagcttccacttt

SEQ ID NO: 130730 - DNA, 2074 bp, Homo sapiens
  Payload ID: 5556
  Gene Symbol: ESRRG
  Gene Name: estrogen-related receptor gamma
  Uniprot ID: P62508
  ENST ID: ENST00000493748
  CDS Start-End: 616-1923
attctgggcaaagtgtggtgacttgtggattttcactgtgacgatgttgctacacggtccttcacttggagttagtgcaacaaggagacatctgagcttaaaatttatgaaacatctaaagaaatcaagctttatataggatcaccgttgtgggttgaattgtgtatccccaaaagatgttgaagtcctgaccacctccctataccttacaatatagccttttacggaagtagggtctttgcagaagatcaagttaagatgaaatcatttgattgggccctagttcaatatatcttatgtccttataaaaggagacaatttggacacagggacaaggggagaatgccacataaagattggaattatgctgccataagccaaggaactccaaagatcgctggcaagctgctaaaagctagcacagattcatggaacagagtctccgtcatagcctacaaaaggaatcaaccctgctgacatcttgatttcagacttctagcctccagaactagctgacaatttactggttcatcaatgaaacaatattaaattatgaagatgtaaggaaaaaatcctacgctaacactgtcgcagtttgaaaggcttctctgcagaatgtcaaacaaagatcgacacattgattccagctgttcgtccttcatcaagacggaaccttccagcccagcctccctgacggacagcgtcaaccaccacagccctggtggctcttcagacgccagtgggagctacagttcaaccatgaatggccatcagaacggacttgactcgccacctctctacccttctgctcctatcctgggaggtagtgggcctgtcaggaaactgtatgatgactgctccagcaccattgttgaagatccccagaccaagtgtgaatacatgctcaactcgatgcccaagagactgtgtttagtgtgtggtgacatcgcttctgggtaccactatggggtagcatcatgtgaagcctgcaaggcattcttcaagaggacaattcaaggcaatatagaatacagctgccctgccacgaatgaatgtgaaatcacaaagcgcagacgtaaatcctgccaggcttgccgcttcatgaagtgtttaaaagtgggcatgctgaaagaaggggtgcgtcttgacagagtacgtggaggtcggcagaagtacaagcgcaggatagatgcggagaacagcccatacctgaaccctcagctggttcagccagccaaaaagccatataacaagattgtctcacatttgttggtggctgaaccggagaagatctatgccatgcctgaccctactgtccccgacagtgacatcaaagccctcactacactgtgtgacttggccgaccgagagttggtggttatcattggatgggcgaagcatattccaggcttctccacgctgtccctggcggaccagatgagccttctgcagagtgcttggatggaaattttgatccttggtgtcgtataccggtctctttcgtttgaggatgaacttgtctatgcagacgattatataatggacgaagaccagtccaaattagcaggccttcttgatctaaataatgctatcctgcagctggtaaagaaatacaagagcatgaagctggaaaaagaagaatttgtcaccctcaaagctatagctcttgctaattcagactccatgcacatagaagatgttgaagccgttcagaagcttcaggatgtcttacatgaagcgctgcaggattatgaagctggccagcacatggaagaccctcgtcgagctggcaagatgctgatgacactgccactcctgaggcagacctctaccaaggccgtgcagcatttctacaacatcaaactagaaggcaaagtcccaatgcacaaactttttttggaaatgttggaggccaaggtctgactaaaagctccctgggccttcccatccttcatgttgaaaaagggaaaataaacccaagagtgatgtcgaagaaacttagagtttagttaacaacatcaaaaatcaacagactgcactgataatttagcagcaagactatgaagcagctttc

SEQ ID NO: 130731 - DNA, 583 bp, Homo sapiens
  Payload ID: 5556
  Gene Symbol: ESRRG
  Gene Name: estrogen-related receptor gamma
  ENST ID: ENST00000469486
  CDS Start-End: 306-583
aactggctgtgcctataggcttgtcactaggagaacatttgtgttaattgcactgtgctctgtcaaggaaactttgatttatagctggggtgcacaaataatggttgccggtcgcacatggattcggtagaactttgccttcctgaatctttttccctgcactacgaggaagatgaacaaaactttaatgtctagagcatttatgagggttttaatgattggaaaatctatcctgagaatgtggtcaccatatgtgacagccttgctttctatcttgtcttcagtttctggggcttctctgcagaatgtcaaacaaagatcgacacattgattccagctgttcgtccttcatcaagacggaaccttccagcccagcctccctgacggacagcgtcaaccaccacagccctggtggctcttcagacgccagtgggagctacagttcaaccatgaatggccatcagaacggacttgactcgccacctctctacccttctgctcctatcctgggaggtagtgggcctgtcaggaaactgtatgatgactgctccagcaccattgttgaagatccccagaccaagtg

SEQ ID NO: 130732 - DNA, 3359 bp, Homo sapiens
  Payload ID: 5556
  Gene Symbol: ESRRG
  Gene Name: estrogen-related receptor gamma
  Uniprot ID: P62508
  ENST ID: ENST00000463665
  CDS Start-End: 684-1874
aggtcccactctgtgcttccatggagaagggcggccaatgtgattctgggcaaagtgtggtgacttgtggattttcactgtgacgatgttgctacacggtccttcacttggagttagtgcaacaaggagacatctgagcttaaaatttatgaaacatctaaagaaatcaagctttatataggatcaccgttgtgggttgaattgtgtatccccaaaagatgttgaagtcctgaccacctccctataccttacaatatagccttttacggaagtagggtctttgcagaagatcaagttaagatgaaatcatttgattgggccctagttcaatatatcttatgtccttataaaaggagacaatttggacacagggacaaggggagaatgccacataaagattggaattatgctgccataagccaaggaactccaaagatcgctggcaagctgctaaaagctagcacagattcatggaacagagtctccgtcatagcctacaaaaggaatcaaccctgctgacatcttgatttcagacttctagcctccagaactctttaaaaagttgaagtctattggaaaccttcttataagaaaccttcctagtcagagaattcaactttcttcttttcttcattcatgaaaatgcagatccactgagaaagggaataaggcttctctgcagaatgtcaaacaaagatcgacacattgattccagctgttcgtccttcatcaagacggaaccttccagcccagcctccctgacggacagcgtcaaccaccacagccctggtggctcttcagacgccagtgggagctacagttcaaccatgaatggccatcagaacggacttgactcgccacctctctacccttctgctcctatcctgggaggtagtgggcctgtcaggaaactgtatgatgactgctccagcaccattgttgaagatccccagaccaagtgtgaatacatgctcaactcgatgcccaagagactgtgtttagtgtgtggtgacatcgcttctgggtaccactatggggtagcatcatgtgaagcctgcaaggcattcttcaagaggacaattcaaggggtgcgtcttgacagagtacgtggaggtcggcagaagtacaagcgcaggatagatgcggagaacagcccatacctgaaccctcagctggttcagccagccaaaaagccatataacaagattgtctcacatttgttggtggctgaaccggagaagatctatgccatgcctgaccctactgtccccgacagtgacatcaaagccctcactacactgtgtgacttggccgaccgagagttggtggttatcattggatgggcgaagcatattccaggcttctccacgctgtccctggcggaccagatgagccttctgcagagtgcttggatggaaattttgatccttggtgtcgtataccggtctctttcgtttgaggatgaacttgtctatgcagacgattatataatggacgaagaccagtccaaattagcaggccttcttgatctaaataatgctatcctgcagctggtaaagaaatacaagagcatgaagctggaaaaagaagaatttgtcaccctcaaagctatagctcttgctaattcagactccatgcacatagaagatgttgaagccgttcagaagcttcaggatgtcttacatgaagcgctgcaggattatgaagctggccagcacatggaagaccctcgtcgagctggcaagatgctgatgacactgccactcctgaggcagacctctaccaaggccgtgcagcatttctacaacatcaaactagaaggcaaagtcccaatgcacaaactttttttggaaatgttggaggccaaggtctgactaaaagctccctgggccttcccatccttcatgttgaaaaagggaaaataaacccaagagtgatgtcgaagaaacttagagtttagttaacaacatcaaaaatcaacagactgcactgataatttagcagcaagactatgaagcagctttcagattcctccataggttcctgatgagtttctttctactttctccatcatcttctttcctctttcttcccacatttctctttctctttattttttctccttttcttctttcacctcccttatttctttgcttctttcattcctagttcccattctcctttattttcttcccgtctgcctgccttctttcttttctttacctactctcattcctctcttttctcatccttccccttttttctaaatttgaaatagctttagtttaaaaaaaaatcctcccttccccctttcctttccctttctttcctttttccctttccttttccctttcctttcctttcctcttgaccttctttccatctttctttttcttccttctgctgctgaacttttaaaagaggtctctaactgaagagagatggaagccagccctgccaaaggatggagatccataatatggatgccagtgaacttattgtgaaccatactgtccccaatgactaaggaatcaaagagagagaaccaacgttcctaaaagtacagtgcaacatatacaaattgactgagtgcagtattagatttcatgggagcagcctctaattagacaacttaagcaacgttgcatcggctgcttcttatcattgcttttccatctagatcagttacagccatttgattccttaattgttttttcaagtcttccaggtatttgttagtttagctactatgtaactttttcagggaatagtttaagctttattcattcatgcaatactaaagagaaataagaatactgcaattttgtgctggctttgaacaattacgaacaataatgaaggacaaatgaatcctgaaggaagatttttaaaaatgttttgtttcttcttacaaatggagatttttttgtaccagctttaccacttttcagccatttattaatatgggaatttaacttactcaagcaatagttgaagggaaggtgcatattatcacggatgcaatttatgttgtgtgccagtctggtcccaaacatcaatttcttaacatgagctccagtttacctaaatgttcactgacacaaaggatgagattacacctacagtgactctgagtagtcacatatataagcactgcacatgagatatagatccgtagaattgtcaggagtgcacctctctacttgggaggtacaattgccatatgatttctagctgccatggtggttaggaatgtgatactgcctgtttgcaaagtcacagaccttgcctcagaaggagctgtgagccagtattcatttaagaggcaataaggcaaatgccagaattaaaaaaaaaaa

SEQ ID NO: 130733 - DNA, 584 bp, Homo sapiens
  Payload ID: 5556
  Gene Symbol: ESRRG
  Gene Name: estrogen-related receptor gamma
  ENST ID: ENST00000481543
  CDS Start-End: 434-584
tttggtcccaactggctgtgcctataggcttgtcactaggagaacatttgtgttaattgcactgtgctctgtcaaggaaactttgatttatagctggggtgcacaaataatggttgccggtcgcacatggattcggtagaactttgccttcctgaatctttttccctgcactacgaggaagactggacaacacctgataccaacaatataatgtcacctctgctatagatcacccaagaccagctgcatttacatccagatgttaactactgcagactaagctattaagagtttaacaaatacaagcactggctgagcttcagaccttccatcgaaatgcagaccactttgaacatcagcacgtgcatgtgggaattcaaactcctgacggttcattcacgatcacacatttacctggatgcttctctgcagaatgtcaaacaaagatcgacacattgattccagctgttcgtccttcatcaagacggaaccttccagcccagcctccctgacggacagcgtcaaccaccacagccctggtggctcttcagacgccagtgggagctacagttcaaccatgaatg

SEQ ID NO: 130734 - DNA, 3015 bp, Homo sapiens
  Payload ID: 5556
  Gene Symbol: ESRRG
  Gene Name: estrogen-related receptor gamma
  Uniprot ID: P62508
  ENST ID: ENST00000487276
  CDS Start-End: 259-1566
tgacaatttactggttcatcaatgaaacaatattaaattatgaagatgtaaggaaaaaatcctacgctaacactgtcgcagtttgaaaggtccgtgagagaaaagttaattatgatgttatttcaaactttaaaaagttgaagtctattggaaaccttcttataagaaaccttcctagtcagagaattcaactttcttcttttcttcattcatgaaaatgcagatccactgagaaagggaataaggcttctctgcagaatgtcaaacaaagatcgacacattgattccagctgttcgtccttcatcaagacggaaccttccagcccagcctccctgacggacagcgtcaaccaccacagccctggtggctcttcagacgccagtgggagctacagttcaaccatgaatggccatcagaacggacttgactcgccacctctctacccttctgctcctatcctgggaggtagtgggcctgtcaggaaactgtatgatgactgctccagcaccattgttgaagatccccagaccaagtgtgaatacatgctcaactcgatgcccaagagactgtgtttagtgtgtggtgacatcgcttctgggtaccactatggggtagcatcatgtgaagcctgcaaggcattcttcaagaggacaattcaaggcaatatagaatacagctgccctgccacgaatgaatgtgaaatcacaaagcgcagacgtaaatcctgccaggcttgccgcttcatgaagtgtttaaaagtgggcatgctgaaagaaggggtgcgtcttgacagagtacgtggaggtcggcagaagtacaagcgcaggatagatgcggagaacagcccatacctgaaccctcagctggttcagccagccaaaaagccatataacaagattgtctcacatttgttggtggctgaaccggagaagatctatgccatgcctgaccctactgtccccgacagtgacatcaaagccctcactacactgtgtgacttggccgaccgagagttggtggttatcattggatgggcgaagcatattccaggcttctccacgctgtccctggcggaccagatgagccttctgcagagtgcttggatggaaattttgatccttggtgtcgtataccggtctctttcgtttgaggatgaacttgtctatgcagacgattatataatggacgaagaccagtccaaattagcaggccttcttgatctaaataatgctatcctgcagctggtaaagaaatacaagagcatgaagctggaaaaagaagaatttgtcaccctcaaagctatagctcttgctaattcagactccatgcacatagaagatgttgaagccgttcagaagcttcaggatgtcttacatgaagcgctgcaggattatgaagctggccagcacatggaagaccctcgtcgagctggcaagatgctgatgacactgccactcctgaggcagacctctaccaaggccgtgcagcatttctacaacatcaaactagaaggcaaagtcccaatgcacaaactttttttggaaatgttggaggccaaggtctgactaaaagctccctgggccttcccatccttcatgttgaaaaagggaaaataaacccaagagtgatgtcgaagaaacttagagtttagttaacaacatcaaaaatcaacagactgcactgataatttagcagcaagactatgaagcagctttcagattcctccataggttcctgatgagtttctttctactttctccatcatcttctttcctctttcttcccacatttctctttctctttattttttctccttttcttctttcacctcccttatttctttgcttctttcattcctagttcccattctcctttattttcttcccgtctgcctgccttctttcttttctttacctactctcattcctctcttttctcatccttccccttttttctaaatttgaaatagctttagtttaaaaaaaaatcctcccttccccctttcctttccctttctttcctttttccctttccttttccctttcctttcctttcctcttgaccttctttccatctttctttttcttccttctgctgctgaacttttaaaagaggtctctaactgaagagagatggaagccagccctgccaaaggatggagatccataatatggatgccagtgaacttattgtgaaccatactgtccccaatgactaaggaatcaaagagagagaaccaacgttcctaaaagtacagtgcaacatatacaaattgactgagtgcagtattagatttcatgggagcagcctctaattagacaacttaagcaacgttgcatcggctgcttcttatcattgcttttccatctagatcagttacagccatttgattccttaattgttttttcaagtcttccaggtatttgttagtttagctactatgtaactttttcagggaatagtttaagctttattcattcatgcaatactaaagagaaataagaatactgcaattttgtgctggctttgaacaattacgaacaataatgaaggacaaatgaatcctgaaggaagatttttaaaaatgttttgtttcttcttacaaatggagatttttttgtaccagctttaccacttttcagccatttattaatatgggaatttaacttactcaagcaatagttgaagggaaggtgcatattatcacggatgcaatttatgttgtgtgccagtctggtcccaaacatcaatttcttaacatgagctccagtttacctaaatgttcactgacacaaaggatgagattacacctacagtgactctgagtagtcacatatataagcactgcacatgagatatagatccgtagaattgtcaggagtgcacctctctacttgggaggtacaattgccatatgatttctagctgccatggtggttaggaatgtgatactgcctgtttgcaaagtcacagaccttgcctcagaaggagctgtgagccagtattcatttaag

SEQ ID NO: 130735 - DNA, 1464 bp, Homo sapiens
  Payload ID: 5556
  Gene Symbol: ESRRG
  Gene Name: estrogen-related receptor gamma
  ENST ID: ENST00000475275
  CDS Start-End: 402-1464
ctggggtgcacaaataatggttgccggtcgcacatggattcggtagaactttgccttcctgaatctttttccctgcactacgaggaagagtagacttgaatgagacctgcctcatcagtcatgggatcatagtgtcacagatggaaaagcaactatcagctgaattgtactgaactacacacttggctaattcatcttattgctctacacatctaaaggaaggctcattctgttcttggagtctagacagcatcaggagttgggctcagtgaacaaaactttaatgtctagagcatttatgagggttttaatgattggaaaatctatcctgagaatgtggtcaccatatgtgacagccttgctttctatcttgtcttcagtttctggggcttctctgcagaatgtcaaacaaagatcgacacattgattccagctgttcgtccttcatcaagacggaaccttccagcccagcctccctgacggacagcgtcaaccaccacagccctggtggctcttcagacgccagtgggagctacagttcaaccatgaatggccatcagaacggacttgactcgccacctctctacccttctgctcctatcctgggaggtagtgggcctgtcaggaaactgtatgatgactgctccagcaccattgttgaagatccccagaccaagtgtgaatacatgctcaactcgatgcccaagagactgtgtttagtgtgtggtgacatcgcttctgggtaccactatggggtagcatcatgtgaagcctgcaaggcattcttcaagaggacaattcaaggcaatatagaatacagctgccctgccacgaatgaatgtgaaatcacaaagcgcagacgtaaatcctgccaggcttgccgcttcatgaagtgtttaaaagtgggcatgctgaaagaaggggtgcgtcttgacagagtacgtggaggtcggcagaagtacaagcgcaggatagatgcggagaacagcccatacctgaaccctcagctggttcagccagccaaaaagccatataacaagattgtctcacatttgttggtggctgaaccggagaagatctatgccatgcctgaccctactgtccccgacagtgacatcaaagccctcactacactgtgtgacttggccgaccgagagttggtggttatcattggatgggcgaagcatattccaggcttctccacgctgtccctggcggaccagatgagccttctgcagagtgcttggatggaaattttgatccttggtgtcgtataccggtctctttcgtttgaggatgaacttgtctatgcagacgattatataatggacgaagaccagtccaaattagcaggccttcttgatctaaataatgctatcctgcagctggtaaagaaatacaagagcatgaagctggaaaaagaagaatttgtcaccctcaaagctatagctcttgctaattcag

SEQ ID NO: 130736 - DNA, 5304 bp, Homo sapiens
  Payload ID: 5556
  Gene Symbol: ESRRG
  Gene Name: estrogen-related receptor gamma
  Uniprot ID: P62508
  ENST ID: ENST00000493603
  CDS Start-End: 312-1619
gagggcgagggcgggctcctctggaggcggcgggctccaggccgggctccctaaacgggtcagcaattggagcgggaaggccggacagagctgacaatttactggttcatcaatgaaacaatattaaattatgaagatgtaaggaaaaaatcctacgctaacactgtcgcagtttgaaagctttaaaaagttgaagtctattggaaaccttcttataagaaaccttcctagtcagagaattcaactttcttcttttcttcattcatgaaaatgcagatccactgagaaagggaataaggcttctctgcagaatgtcaaacaaagatcgacacattgattccagctgttcgtccttcatcaagacggaaccttccagcccagcctccctgacggacagcgtcaaccaccacagccctggtggctcttcagacgccagtgggagctacagttcaaccatgaatggccatcagaacggacttgactcgccacctctctacccttctgctcctatcctgggaggtagtgggcctgtcaggaaactgtatgatgactgctccagcaccattgttgaagatccccagaccaagtgtgaatacatgctcaactcgatgcccaagagactgtgtttagtgtgtggtgacatcgcttctgggtaccactatggggtagcatcatgtgaagcctgcaaggcattcttcaagaggacaattcaaggcaatatagaatacagctgccctgccacgaatgaatgtgaaatcacaaagcgcagacgtaaatcctgccaggcttgccgcttcatgaagtgtttaaaagtgggcatgctgaaagaaggggtgcgtcttgacagagtacgtggaggtcggcagaagtacaagcgcaggatagatgcggagaacagcccatacctgaaccctcagctggttcagccagccaaaaagccatataacaagattgtctcacatttgttggtggctgaaccggagaagatctatgccatgcctgaccctactgtccccgacagtgacatcaaagccctcactacactgtgtgacttggccgaccgagagttggtggttatcattggatgggcgaagcatattccaggcttctccacgctgtccctggcggaccagatgagccttctgcagagtgcttggatggaaattttgatccttggtgtcgtataccggtctctttcgtttgaggatgaacttgtctatgcagacgattatataatggacgaagaccagtccaaattagcaggccttcttgatctaaataatgctatcctgcagctggtaaagaaatacaagagcatgaagctggaaaaagaagaatttgtcaccctcaaagctatagctcttgctaattcagactccatgcacatagaagatgttgaagccgttcagaagcttcaggatgtcttacatgaagcgctgcaggattatgaagctggccagcacatggaagaccctcgtcgagctggcaagatgctgatgacactgccactcctgaggcagacctctaccaaggccgtgcagcatttctacaacatcaaactagaaggcaaagtcccaatgcacaaactttttttggaaatgttggaggccaaggtctgactaaaagctccctgggccttcccatccttcatgttgaaaaagggaaaataaacccaagagtgatgtcgaagaaacttagagtttagttaacaacatcaaaaatcaacagactgcactgataatttagcagcaagactatgaagcagctttcagattcctccataggttcctgatgagtttctttctactttctccatcatcttctttcctctttcttcccacatttctctttctctttattttttctccttttcttctttcacctcccttatttctttgcttctttcattcctagttcccattctcctttattttcttcccgtctgcctgccttctttcttttctttacctactctcattcctctcttttctcatccttccccttttttctaaatttgaaatagctttagtttaaaaaaaaatcctcccttccccctttcctttccctttctttcctttttccctttccttttccctttcctttcctttcctcttgaccttctttccatctttctttttcttccttctgctgctgaacttttaaaagaggtctctaactgaagagagatggaagccagccctgccaaaggatggagatccataatatggatgccagtgaacttattgtgaaccatactgtccccaatgactaaggaatcaaagagagagaaccaacgttcctaaaagtacagtgcaacatatacaaattgactgagtgcagtattagatttcatgggagcagcctctaattagacaacttaagcaacgttgcatcggctgcttcttatcattgcttttccatctagatcagttacagccatttgattccttaattgttttttcaagtcttccaggtatttgttagtttagctactatgtaactttttcagggaatagtttaagctttattcattcatgcaatactaaagagaaataagaatactgcaattttgtgctggctttgaacaattacgaacaataatgaaggacaaatgaatcctgaaggaagatttttaaaaatgttttgtttcttcttacaaatggagatttttttgtaccagctttaccacttttcagccatttattaatatgggaatttaacttactcaagcaatagttgaagggaaggtgcatattatcacggatgcaatttatgttgtgtgccagtctggtcccaaacatcaatttcttaacatgagctccagtttacctaaatgttcactgacacaaaggatgagattacacctacagtgactctgagtagtcacatatataagcactgcacatgagatatagatccgtagaattgtcaggagtgcacctctctacttgggaggtacaattgccatatgatttctagctgccatggtggttaggaatgtgatactgcctgtttgcaaagtcacagaccttgcctcagaaggagctgtgagccagtattcatttaagaggcaataaggcaaatgccagaattaaaaaaaaaaatcatcaaagacagaaaatgcctgaccaaattctaaaacctaatccatataagtttattcatttaggaatgttcgtttaaattaatctgcagtttttaccaagagctaagccaatatatgtgcttttcaaccagtattgtcacagcatgaaagtcaagtcaggttccagactgttaagaggtgtaatctaatgaagaaatcaattagatgccccgaaatctacagtcgctgaataaccaataaacagtaacctccatcaaatgctataccaatggaccagtgttagtagctgctccctgtattatgtgaacagtcttattctatgtacacagatgtaattaaaattgtaatcctaacaaacaaaagaaatgtagttcagcttttcaatgtttcatgtttgctgtgcttttctgaattttatgttgcattcaaagactgttgtcttgttcttgtggtgtttggattcttgtggtgtgtgcttttagacacagggtagaattagagacaatattggatgtacaattcctcaggagactacagtagtatattctattccttaccagtaataaggttcttcctaataataattaagagattgaaactccaaacaagtattcattatgaacagatacacatcaaaatcataataatattttcaaaacaaggaataatttctctaatggtttattatagaataccaatgtatagcttagaaataaaactttgaatatttcaagaatatagataagtctaatttttaaatgctgtatatatggctttcactcaatcatctctcagatgttgttattaactcgctctgtgttgttgcaaaactttttggtgcagattcgtttccaaaactattgctactttgtgtgctttaaacaaaataccttgggttgatgaaacatcaacccagtgctaggaatactgtgtatctatcattagctatatgggactatattgtagattgtggtttctcagtagagaagtgactgtagtgtgattctagataaatcatcattagcaattcattcagatggtcaataacttgaaatttatagctgtgataggagttcagaaattggcacatccctttaaaaataacaacagaaaatacaactcctgggaaaaaaggtgctgattctataagattatttatatatgtaagtgtttaaaaagattattttccagaaagtttgtgcagggtttaagttgctactattcaactacactatatataaataaaatatatacaatatatacattgttttcactgtatcacattaaagtacttgggcttcagaagtaagagccaaccaactgaaaacctgagatggagatatgttcaaagaatgagatacaattttttagttttcagtttaagtaactctcagcattacaaaagagtaagtatctcacaaataggaaataaaactaaaacgtggatttaaaaagaactgcacgggctttagggtaaatgctcatcttaaacctcactagagggaagtcttctcaagtttcaagcaagaccatttacttaatgtgaagttttggaaagttataaaggtgtatgttttagccatatgattttaattttaattttgcttcttttaggttcgttcttatttaaagcaatatgattgtgtgactccttgtagttacacttgtgtttcaatcagatcagattgttgtatttattccactattttgcatttaaatgataacataaaagatataaaaaatttaaaactgctatttttcttatagaagagaaaatgggtgttggtgattgtattttaattatttaagcgtctctgtttacctgcctaggaaaacattttatggcagtcttatgtgcaaagatcgtaaaaggacaaaaaatttaaactgcttataataatccaggagttgcattatagccagtagtaaaaataataataataataataaaaccatgtctatagctgtagatgggcttcacatctgtaaagcaatcaattgtatatttttgtgatgtgtaccatactgtgtgctccagcaaatgtccatttgtgtaaatgtatttattttatattgtatatattgttaaatgcaaaaaggagatatgattctgtaactccaatcagttcagatgtgtaactcaaattattatgcctttcaggatgatggtagagcaatattaaacaagcttccacttt

SEQ ID NO: 130737 - DNA, 565 bp, Homo sapiens
  Payload ID: 5556
  Gene Symbol: ESRRG
  Gene Name: estrogen-related receptor gamma
  ENST ID: ENST00000459955
  CDS Start-End: 399-565
agtccttgattaggagagtgtgagagctttggtcccaactggctgtgcctataggcttgtcactaggagaacatttgtgttaattgcactgtgctctgtcaaggaaactttgatttatagctggggtgcacaaataatggttgccggtcgcacatggattcggtagaactttgccttcctgaatctttttccctgcactacgaggaagaacttgaatgagacctgcctcatcagtcatgggatcatagtgtcacagatggaaaagcaactatcagctgaattgtactgaactacacacttggctaattcatcttattgctctacacatctaaaggaaggctcattctgttcttggagtctagacagcatcaggagttgggctcaggcttctctgcagaatgtcaaacaaagatcgacacattgattccagctgttcgtccttcatcaagacggaaccttccagcccagcctccctgacggacagcgtcaaccaccacagccctggtggctcttcagacgccagtgggagctacagttcaaccatgaatggccatcagaacggact

SEQ ID NO: 130738 - DNA, 569 bp, Homo sapiens
  Payload ID: 5556
  Gene Symbol: ESRRG
  Gene Name: estrogen-related receptor gamma
  ENST ID: ENST00000586199
  CDS Start-End: 303-446
tcttcacacaggaagtttccttctctgttgtcagatttagcactgtgctcttgtcatcagatccgagccaggctccctgctgcacagtagagaggcttccttaagacatttgtccttgaaactgcaccaaactcttggaagaacccagaacgtagctgacaatttactggttcatcaatgaaacaatattaaattatgaagatgtaaggaaaaaatcctacgctaacactgtcgcagtttgaaagaactgatgtaaagttcccatcatgaatgtaattaggaattgtgcatttagatcctgaatgtggcgagaatgtgattggggtcttggagcagtcaagtctgatctggcctgtgttccttcagctaaaaggagagaacccctggcgagagaggagacaggtctgctgatgaatgcaaacagaaggagcagcatctgtgcatagaggaacgaagcagggtgcgtcttgacagagtacgtggaggtcggcagaagtacaagcgcaggatagatgcggagaacagcccatacctgaaccctcagctggttcagccagccaaaaagccat

SEQ ID NO: 130739 - DNA, 5194 bp, Homo sapiens
  Payload ID: 5556
  Gene Symbol: ESRRG
  Gene Name: estrogen-related receptor gamma
  Uniprot ID: P62508
  ENST ID: ENST00000616180
  CDS Start-End: 194-1501
atagacttgaatgagacctgcctcatcagtcatgggatcatagtgtcacagatggaaaagcaactatcagctgaattgtactgaactacacacttggctaattcatcttattgctctacacatctaaaggaaggctcattctgttcttggagtctagacagcatcaggagttgggctcaggcttctctgcagaatgtcaaacaaagatcgacacattgattccagctgttcgtccttcatcaagacggaaccttccagcccagcctccctgacggacagcgtcaaccaccacagccctggtggctcttcagacgccagtgggagctacagttcaaccatgaatggccatcagaacggacttgactcgccacctctctacccttctgctcctatcctgggaggtagtgggcctgtcaggaaactgtatgatgactgctccagcaccattgttgaagatccccagaccaagtgtgaatacatgctcaactcgatgcccaagagactgtgtttagtgtgtggtgacatcgcttctgggtaccactatggggtagcatcatgtgaagcctgcaaggcattcttcaagaggacaattcaaggcaatatagaatacagctgccctgccacgaatgaatgtgaaatcacaaagcgcagacgtaaatcctgccaggcttgccgcttcatgaagtgtttaaaagtgggcatgctgaaagaaggggtgcgtcttgacagagtacgtggaggtcggcagaagtacaagcgcaggatagatgcggagaacagcccatacctgaaccctcagctggttcagccagccaaaaagccatataacaagattgtctcacatttgttggtggctgaaccggagaagatctatgccatgcctgaccctactgtccccgacagtgacatcaaagccctcactacactgtgtgacttggccgaccgagagttggtggttatcattggatgggcgaagcatattccaggcttctccacgctgtccctggcggaccagatgagccttctgcagagtgcttggatggaaattttgatccttggtgtcgtataccggtctctttcgtttgaggatgaacttgtctatgcagacgattatataatggacgaagaccagtccaaattagcaggccttcttgatctaaataatgctatcctgcagctggtaaagaaatacaagagcatgaagctggaaaaagaagaatttgtcaccctcaaagctatagctcttgctaattcagactccatgcacatagaagatgttgaagccgttcagaagcttcaggatgtcttacatgaagcgctgcaggattatgaagctggccagcacatggaagaccctcgtcgagctggcaagatgctgatgacactgccactcctgaggcagacctctaccaaggccgtgcagcatttctacaacatcaaactagaaggcaaagtcccaatgcacaaactttttttggaaatgttggaggccaaggtctgactaaaagctccctgggccttcccatccttcatgttgaaaaagggaaaataaacccaagagtgatgtcgaagaaacttagagtttagttaacaacatcaaaaatcaacagactgcactgataatttagcagcaagactatgaagcagctttcagattcctccataggttcctgatgagtttctttctactttctccatcatcttctttcctctttcttcccacatttctctttctctttattttttctccttttcttctttcacctcccttatttctttgcttctttcattcctagttcccattctcctttattttcttcccgtctgcctgccttctttcttttctttacctactctcattcctctcttttctcatccttccccttttttctaaatttgaaatagctttagtttaaaaaaaaatcctcccttccccctttcctttccctttctttcctttttccctttccttttccctttcctttcctttcctcttgaccttctttccatctttctttttcttccttctgctgctgaacttttaaaagaggtctctaactgaagagagatggaagccagccctgccaaaggatggagatccataatatggatgccagtgaacttattgtgaaccatactgtccccaatgactaaggaatcaaagagagagaaccaacgttcctaaaagtacagtgcaacatatacaaattgactgagtgcagtattagatttcatgggagcagcctctaattagacaacttaagcaacgttgcatcggctgcttcttatcattgcttttccatctagatcagttacagccatttgattccttaattgttttttcaagtcttccaggtatttgttagtttagctactatgtaactttttcagggaatagtttaagctttattcattcatgcaatactaaagagaaataagaatactgcaattttgtgctggctttgaacaattacgaacaataatgaaggacaaatgaatcctgaaggaagatttttaaaaatgttttgtttcttcttacaaatggagatttttttgtaccagctttaccacttttcagccatttattaatatgggaatttaacttactcaagcaatagttgaagggaaggtgcatattatcacggatgcaatttatgttgtgtgccagtctggtcccaaacatcaatttcttaacatgagctccagtttacctaaatgttcactgacacaaaggatgagattacacctacagtgactctgagtagtcacatatataagcactgcacatgagatatagatccgtagaattgtcaggagtgcacctctctacttgggaggtacaattgccatatgatttctagctgccatggtggttaggaatgtgatactgcctgtttgcaaagtcacagaccttgcctcagaaggagctgtgagccagtattcatttaagaggcaataaggcaaatgccagaattaaaaaaaaaaatcatcaaagacagaaaatgcctgaccaaattctaaaacctaatccatataagtttattcatttaggaatgttcgtttaaattaatctgcagtttttaccaagagctaagccaatatatgtgcttttcaaccagtattgtcacagcatgaaagtcaagtcaggttccagactgttaagaggtgtaatctaatgaagaaatcaattagatgccccgaaatctacagtcgctgaataaccaataaacagtaacctccatcaaatgctataccaatggaccagtgttagtagctgctccctgtattatgtgaacagtcttattctatgtacacagatgtaattaaaattgtaatcctaacaaacaaaagaaatgtagttcagcttttcaatgtttcatgtttgctgtgcttttctgaattttatgttgcattcaaagactgttgtcttgttcttgtggtgtttggattcttgtggtgtgtgcttttagacacagggtagaattagagacaatattggatgtacaattcctcaggagactacagtagtatattctattccttaccagtaataaggttcttcctaataataattaagagattgaaactccaaacaagtattcattatgaacagatacacatcaaaatcataataatattttcaaaacaaggaataatttctctaatggtttattatagaataccaatgtatagcttagaaataaaactttgaatatttcaagaatatagataagtctaatttttaaatgctgtatatatggctttcactcaatcatctctcagatgttgttattaactcgctctgtgttgttgcaaaactttttggtgcagattcgtttccaaaactattgctactttgtgtgctttaaacaaaataccttgggttgatgaaacatcaacccagtgctaggaatactgtgtatctatcattagctatatgggactatattgtagattgtggtttctcagtagagaagtgactgtagtgtgattctagataaatcatcattagcaattcattcagatggtcaataacttgaaatttatagctgtgataggagttcagaaattggcacatccctttaaaaataacaacagaaaatacaactcctgggaaaaaaggtgctgattctataagattatttatatatgtaagtgtttaaaaagattattttccagaaagtttgtgcagggtttaagttgctactattcaactacactatatataaataaaatatatacaatatatacattgttttcactgtatcacattaaagtacttgggcttcagaagtaagagccaaccaactgaaaacctgagatggagatatgttcaaagaatgagatacaattttttagttttcagtttaagtaactctcagcattacaaaagagtaagtatctcacaaataggaaataaaactaaaacgtggatttaaaaagaactgcacgggctttagggtaaatgctcatcttaaacctcactagagggaagtcttctcaagtttcaagcaagaccatttacttaatgtgaagttttggaaagttataaaggtgtatgttttagccatatgattttaattttaattttgcttcttttaggttcgttcttatttaaagcaatatgattgtgtgactccttgtagttacacttgtgtttcaatcagatcagattgttgtatttattccactattttgcatttaaatgataacataaaagatataaaaaatttaaaactgctatttttcttatagaagagaaaatgggtgttggtgattgtattttaattatttaagcgtctctgtttacctgcctaggaaaacattttatggcagtcttatgtgcaaagatcgtaaaaggacaaaaaatttaaactgcttataataatccaggagttgcattatagccagtagtaaaaataataataataataataaaaccatgtctatagctgtagatgggcttcacatctgtaaagcaatcaattgtatatttttgtgatgtgtaccatactgtgtgctccagcaaatgtccatttgtgtaaatgtatttattttatattgtatatattgttaaatgcaaaaaggagatatgattctgtaactccaatcagttcagatgtgtaactcaaattattatgcctttcaggatgatggtagagcaatattaaacaagcttccacttttgactgct

SEQ ID NO: 130740 - DNA, 1495 bp, Homo sapiens
  Payload ID: 5557
  Gene Symbol: ESX1
  Gene Name: ESX homeobox 1
  Uniprot ID: Q8N693
  ENST ID: ENST00000372588
  CDS Start-End: 85-1305
agagccagttccaaccccgggatcgccgcggaaccacgcacagagtctgcagaagtgcacagctttatcgacagcgcttgaagcatggagtctcttcgcgggtacacccacagtgatattggctaccgcagcctggcagtcggcgaggacatcgaggaagtgaatgatgagaaacttaccgtgacctcgctgatggcaaggggaggagaggacgaggagaatacacggtccaaacctgagtacggaacagaagcggaaaacaacgttggcacggaagggtccgtcccctcggacgaccaagaccgtgagggtggcggcggccacgagccggagcaacagcaggaggagccgcccctgaccaagccggagcaacagcaggaggagccgcccctgctcgagctgaagcaagagcaggaggagccgccccagacgaccgtggaggggccacagccggcggaggggccacaaaccgctgagggaccacagcccccagagaggaaacgccgccgccgcaccgcgttcacgcagtttcagctgcaggagctagagaactttttcgatgaatctcaatatcccgacgttgtggcgcgagagagacttgcagcacgcctgaatttgactgaagacagagtgcaggtttggtttcagaacagaagagccaagtggaaacgaaatcagagggtgctaatgttgagaaacactgctactgctgacctggcccaccctttggacatgttcttgggtggggcctattatgctgctcctgctctggatcctgctttgtgtgttcatctggtgccacaactacctagaccacctgtgctgcctgtgccacctatgccacccaggccacccatggtccctatgccacccaggccacccatagcacctatgccacccatggcgcctgtgccacccggctcacgcatggcgcctgtgccacccgggccacgcatggcgcctgtgccaccctggccgcccatggcgcctgtgccaccctggccgcccatggcgcctgtgccaaccgggccgcccatggcgcctgtgccacccgggccgcccatggcgcgtgtgccacccgggccgcccatggcgcgtgtgccacccgggccgcccatggcgcctctgccacccgggccgcccatggcgcctctgccacccgggccgcccatggcgcctctgccacccgggccgcccatggcgcctctgccacccaggtcacatgtgcctcacactggcctggctcctgtacacatcacatgggcccctgtcatcaacagttattatgcatgtccctttttctaaagtaaggtattcataacagtttttccaaagttctttcctgccagatagaaattgtgcacagcacagcatcaagtaattcgttagatgcttgttaaatgaagtgggtaggtgaacaaagttaacgaatgccctgttatttttgtaggccacataattgtagtattttcaataaagatgtgacttaatagta

SEQ ID NO: 130741 - DNA, 7159 bp, Homo sapiens
  Payload ID: 5558
  Gene Symbol: ETNK1
  Gene Name: ethanolamine kinase 1
  Uniprot ID: Q9HBU6
  ENST ID: ENST00000266517
  CDS Start-End: 90-1448
gtgaccggaggcgagaaaccccgcctcggcaccctgacgcagcgcaggacccgccccgcgcgtgacgccagcgtcaggccagccccggcatgctctgcggccgcccgcggtccagctccgacaacaggaattttctccgagagcgggccgggctcagttcagctgctgtccagacccggatcggcaacagtgccgcctccagacgttctcctgccgctcgcccgcccgtcccagcgcccccagccctcccgcgagggcgccccgggacggaaggatccaccagtctgtcggcgcccgccgttctcgtggtcgccgtcgccgtcgtcgtggtggtagtctccgccgtcgcctgggccatggccaattacatccacgtccctcccggctccccggaggtgcccaagctgaacgtcaccgttcaggatcaggaggagcatcgctgccgggagggggccctgagcctcctgcaacacctgcggcctcactgggacccccaggaggtgaccctgcagctcttcacagatggaatcacaaataaacttattggctgttacgtgggaaacaccatggaggatgtagtcctggtgagaatttatggcaataagactgagttattagtcgatcgagatgaggaagtaaagagttttcgagtgttgcaggctcatgggtgtgcaccacaactctactgtaccttcaataatggactatgctatgaatttatacaaggagaagcactggatccaaagcatgtctgcaacccagccattttcaggctaatagctcgtcagcttgctaaaatccatgctattcatgcacacaatggctggatccccaaatctaatctttggctaaagatgggaaagtatttctctctcattcccacaggatttgcagatgaagacattaataaaaggttcctaagtgatatcccaagctctcagattctccaggaagagatgacttggatgaaggagattctttccaacctgggctcacctgttgtgctttgccataatgacctattgtgtaagaatataatctacaatgagaaacaaggtgatgtacagttcattgattatgaatattctggatacaactacctggcatatgatattggaaatcatttcaatgaatttgcaggtgtgagtgatgtagactatagtctgtatccagatagagaactacagagtcagtggctgcgtgcttaccttgaagcctacaaagaatttaagggctttgggactgaagttactgaaaaggaggtagaaatactcttcattcaagtcaatcagtttgcattggcttctcatttcttttggggattgtgggctttgattcaagccaaatactccactattgagtttgatttccttgggtatgcaattgttcgttttaaccagtactttaaaatgaagcctgaggttactgcattaaaagtgcctgagtaaagaagagatttaattattctccagtagctgagcaatgcttgtgaatcttttcttaagaaatcccaaaaagccaatattagttaaaattctgttgtttaatttggttatcttgctttataaattatgcctctaaacaatcaaatctatttttgaaatagactgaatgatgtcaagaaatatacctactgctatccgtatgtggtggattagaaatgtgttaaatctgcaaaaggtataaagatgtcagtttaatttctttgataatttaacctatgttgtatgtgaattatttattataaacttagcacgattctgtgactgtttttctctgtttcacgttcgttgagtgtaagcaatgaaaatgtcccaaataagttttttaagttttactttaataagattaatttcagtaaacattctagttgttcagtgtaacctttttatcttgatgcattgtaagtaaaatgaatcatttactcttgaaatgccagtcattgactgatgtagataatttaggattttcatataaaaatagctgtttaggaaggtgaaatacattcactgtctctgttggtggtacatcttgttgaattcaatattagaaagtatttctttttggggtaatataacttagaattaaatccctgtttctctatgtagtctggcagtataaatataaatatttaccatataatcttggaataagtattagttaatgttaccaaaatctgtattaaataatgttttcaaatgctaaatatggtcgttactattttcagttttaaaaattttatagtatcaaattgtttctaaccaaaaatttccttttacttctagagatgctttatgtttttgattattaaatagtcactagtattgctaatttttgaaacaaatacacaaaatttatcatatgtagaaataagaaaatattgtttaggttaattattttttacctatccagagtcattccttacatttcagtttcatgtttcattcctcacattttagtttcatgttttagtttgattctatgtttttagactgatagcaaatgattacttgatacatgtaagttcagcgttatatgttgaggcagttatataattaaataaggaacacttagggcattgatcttgtacacttaaaatctgacaaatgacaaaatgtgaattaagcataaatagtcatggcaggagggcttttgtttatttctcttgtttttgtttaactgtatttttaattttgtctggtggtaagagggaggtaattattgtatggaaagaagttagatctttcagatagataaataggcttcaggttttgaagtctgctctgtgtagttgagcagtcatggttaactttacttagaaaattagtctgacaagctttgcacttcggtcacataagtgcccatgtacaaagttggcttactggatctgcatattcaaaatatgcaactacaaatttatcctctgagaaatcttctgaggagtctaatgtattccaaatgacttaatattctcagacaaatgctttaaaatacttggattatctcaagatttttgaagctaataaagtaaatagaaacacaggccattttaaatggtaaattctagttacataaatataatcttaaagtatgtttgtatctgtaacagtgttagaccagatttggtttctacctccccaatgttataaatgttcacttttgtttttataaaccatattactgtaagatcaatagaactttgcctagttaagtgaatggaaccaattaaacaactagtagctttttataatgttagtgtgaacttgaaaaattgtttttggtggaatttttgtctgtggttagaacattttcataaaacagataaagaatgtgtaatactcttaattttttttttttttttttttttttttttgctttctgccttctaaagtgcaacagtatatatcttgtagaactgtgggaggagagaagataatttttctaccttactccatattcttacttcaaactattttgaatagaggttcactgagccattgctgatagactgtgcatagctactagctgtcacactattgtaggttttttggagagattcatagggaagtgaatgtaaccaggaataaaggctctcactttagctctgggactatgcagtggatcttgggaacaaaataagatatctaatctattttccccattctggctagattttggttgttgtgatgctcctacttcctgtataggtttttgggatcatggtgcaggctagtaataggattcagaattgcttcccttttatatcgaccatgtaagggattctaaaggagggtaaatctcaaagtgctctgaaatcatccctctaaaatctgtcctgtggtgtgctaagatgtctgttgcctttttatgttaagctaaggaacttgaatgccttacctaataactcaactagtagtaagctcattttgtaaatatgaaaatggctgtaagaagtggcattcatgtatattcaatgttagtcaatagaccatagtggcctggatgctttaacaagccaaattccgcaattttttttccttttttccccttcatacttgtatgatctcacctgaccagtgatttcttttcctcctaaccccatgctaccaccattttctggaaatcaaagagatgtggtagtaaatcatacagtacacacgatcatctgagatcaatatgagcacaaaactcatcaagtaggtctgcctggaatgtatataaaaaatgtaaataaaaatttgtaaattagtgtgaactgtatcttgcatatgagactgtgtattgttttgcattctcttcccttttgtagaaatttttctgtaaggaaatgattcagcttgttggttttagagtaaaaatagccaacagttgtggctacacagtgagatcacaggaactggaaatagggtttgtcggctttggttaatgtcagtactcatttatttagcctctcagtgcttaataagacttttctttattttttagttagccgttaggttttgtgaggttagattcctggaagcagtgaatttatacactgttatattaatagagctccgttctttgagtcatgattccaagctaaaggaaattaaaaatgtaatttaataatttcctatttttagggttgttaatttttttctacaaaaaaaccttgaaattttagatatcccaatgtgaatctaatttccatatatacagaaattagacaaataataagtctttagttcaacttaagcatatctcaaatgacttctctaaatttaaagttgatcatgataggatcataaaagacagaaaagacttaagtaatcttgtaatgacaattatttccatttttgctgaactaaaaatatttaacttcataaatatgttactacagcttccagatttaaagaaaaaaagtttcccccactctcaattaaaagttagaaccctccacttttaaaattatacaaatatttcttttttacattacacagaagccttctgtaccattttacgaatttctgtcttcataatataagtgaaaatactgtcatttcaattttctgctttaaattgtttttaataagcattccaaagtgatacagacttaagcttttaatcaatcagtcattcagttgatagacaaagttagcgatgctttatgctaggaaacttgttgacagtaacctgtgcgactttatgcagaagacaaatgctagtaattattatgcacagaggaaaaatcattttaagtatgtggtaaagcagcttcatctttcaaaattgatttgctctggtttttctttagtccattagattccagaatgtccttttactgggaatttagttatgtattaagataacctgttttcagttctttttgaaaagaagacattatttatattgaaccaccttattttaaaatttttaacttttatataccacttgtgtgattccagtgtcatgtcttgggtttgatgtcgttggacagaaaagtgtatcaattattttaaatgaatttttccccatgtttgaggcttagtctgtaaatgtgttgctgtaacagaaaatacttgggtatgcattacttgaatacttgaaaactgaaattaataagatgtattacataatgaattagatttctctgaacagtttttacactgaaaatcttcatttctggattgcagtttgaaatggaatgaagacctgaattatttgggtagaaaaaattatgatagtgcttataagaactgtaaactgttttaaactattttgtgtttgacgcatcaaacttcaagttttttgtaagtttctctcctgaaattttctttctcttctatactttatgcacttactatactactgatgtaataaaagagcagggttaaaaatattgtatctgtattcattgtgaatcctgtagcttttctagttaacaaaaaatcgctttctaaaatactcttaatcccattgttttggttaacatcttacccatttgttgtatttcaaatgccattaatcattttagtacaacacctatgtttataaaaatttgaaaacattacatattgtatttaaaactaattagtgaagagtaagaaaaaaactagccaacagaattgtaggtgatgcattagttaaatttcaaaactcataataaaggaactttcagagattggttgaaacccagtggtatccctgtaaattagctcctgtgactggaaaagaccccaaaaaggcagtagaggagattagtgtttacttgctgtggttgtggtgtgctgctacttaattataggtagtgacacactgaaattcttatttgtccaataatctgaagtagtttcctatatttatctgtactaaattgactataaattgagtctgcaaagaggaaactttttgactgtactgtatttaggagcctttgtacagcttggtcaaatttccatgatatgaagtatttgagttttaaaatatactgttattaaaaggaaaaagacatggccattattccatgtgcttaaatgataatttccttattcagtttcagaagaaaaagaatgaaattgggtaactgtcattgcgttagctttatgttgaattgggaaattgtggcataaagcttaaattcgtgtttatcaaatgtgaaccatagtagtataatgctgctttgtatataatgtaagtgctacaaatagtctcagcactgaaaatgtattgatacctcttaaatgaatgcaacttttgatgtaggtgttttgctatgcctcagaaaatatctgtctgagaatttgttaatctgtttgataatgaagatacttcctgttttcttgtttcatattttcatgttcaaaatttaagttttacatttttactactgttaatttaaataaaatttgttctgtggataaaatgaggttggcagtgaagaaaattaaaaacagcctcattcatgtaactggttaagtaaaaatacattttcactatgtgttcataaacttttaatgaagctgtttgtctttcagttcaaatataagtgatgtttaggctttatttctgttaataaggctttttaccattgattaaatgaaggaatgtatctttttgaagagatttatattctgtaaataaaaattcgttgtaacaataaagttgagttctaactaca

SEQ ID NO: 130742 - DNA, 1083 bp, Homo sapiens
  Payload ID: 5558
  Gene Symbol: ETNK1
  Gene Name: ethanolamine kinase 1
  Uniprot ID: Q9HBU6
  ENST ID: ENST00000335148
  CDS Start-End: 24-800
gccagcgtcaggccagccccggcatgctctgcggccgcccgcggtccagctccgacaacaggaattttctccgagagcgggccgggctcagttcagctgctgtccagacccggatcggcaacagtgccgcctccagacgttctcctgccgctcgcccgcccgtcccagcgcccccagccctcccgcgagggcgccccgggacggaaggatccaccagtctgtcggcgcccgccgttctcgtggtcgccgtcgccgtcgtcgtggtggtagtctccgccgtcgcctgggccatggccaattacatccacgtccctcccggctccccggaggtgcccaagctgaacgtcaccgttcaggatcaggaggagcatcgctgccgggagggggccctgagcctcctgcaacacctgcggcctcactgggacccccaggaggtgaccctgcagctcttcacagatggaatcacaaataaacttattggctgttacgtgggaaacaccatggaggatgtagtcctggtgagaatttatggcaataagactgagttattagtcgatcgagatgaggaagtaaagagttttcgagtgttgcaggctcatgggtgtgcaccacaactctactgtaccttcaataatggactatgctatgaatttatacaaggagaagcactggatccaaagcatgtctgcaacccagccattttcagtttatcatcgttgactctttgcaaaggaaaaactacaagatgttttggattaaccggctgcagagggtcaaggcttctgcttagttttttctagttagtgtttgagttgaagtgttatacatttcttactgccgattgcttattacttaattgttcatgttttcagagttcttgcctattaaaattttattaatttggttaacaattctttgttctttacgttgttcattatttaatttaatatattatgttttctataaagaataatgtcatatatgcttgatcatttttccaaaattgccagctttaaaaattctctttctgctcttgaaaactctagaaaatggtctggatttgaaaacagcattcataggtta

SEQ ID NO: 130743 - DNA, 617 bp, Homo sapiens
  Payload ID: 5558
  Gene Symbol: ETNK1
  Gene Name: ethanolamine kinase 1
  ENST ID: ENST00000545979
  CDS Start-End: 1-248
gtctgtcggcgcccgccgttctcgtggtcgccgtcgccgtcgtcgtggtggtagtctccgccgtcgcctgggccatggccaattacatccacgtccctcccggctccccggaggtgcccaagctgaacgtcaccgttcaggatcaggaggagcatcgctgccgggagggggccctgagcctcctgcaacacctgcggcctcactgggacccccaggaggtgaccctgcagaagccgctgcgtaagtgacggacccatccacggggggagattcctgctgatagttgcccctcctcccactccccagtccacggtcactgcaaaatgaacctttccactccccttgcacggggtcctcgtctacctcctcccctcccaccagtaatgcagtcattaatcctctctgatctttccttcctctcccctccccctgcgatgtgctttcattgatgcctcacactgcgttttgtcttcccaaaccctagcgtactcaattcccaaagtaatgaccacgaccatgcatcgctaggtcggttcttaggcagcaccacacacattgttttgtttgagtcgatatttctgaattattaaagtcgtcttactgaaattaatacctga

SEQ ID NO: 130744 - DNA, 1659 bp, Homo sapiens
  Payload ID: 5558
  Gene Symbol: ETNK1
  Gene Name: ethanolamine kinase 1
  ENST ID: ENST00000538218
  CDS Start-End: 1-1277
ccgacaacaggaattttctccgagagcgggccgggctcagttcagctgctgtccagacccggatcggcaacagtgccgcctccagacgttctcctgccgctcgcccgcccgtcccagcgcccccagccctcccgcgagggcgccccgggacggaaggatccaccagtctgtcggcgcccgccgttctcgtggtcgccgtcgccgtcgtcgtggtggtagtctccgccgtcgcctgggccatggccaattacatccacgtccctcccggctccccggaggtgcccaagctgaacgtcaccgttcaggatcaggaggagcatcgctgccgggagggggccctgagcctcctgcaacacctgcggcctcactgggacccccaggaggtgaccctgcagctcttcacagatggaatcacaaataaacttattggctgttacgtgggaaacaccatggaggatgtagtcctggtgagaatttatggcaataagactgagttattagtcgatcgagatgaggaagtaaagagttttcgagtgttgcaggctcatgggtgtgcaccacaactctactgtaccttcaataatggactatgctatgaatttatacaaggagaagcactggatccaaagcatgtctgcaacccagccattttcaggctaatagctcgtcagcttgctaaaatccatgctattcatgcacacaatggctggatccccaaatctaatctttggctaaagatgggaaagtatttctctctcattcccacaggatttgcagatgaagacattaataaaaggttcctaagtgatatcccaagctctcagattctccaggaagagatgacttggatgaaggagattctttccaacctgggctcacctgttgtgctttgccataatgacctattgtgtaagaatataatctacaatgagaaacaaggtgatgtacagttcattgattatgaatattctggatacaactacctggcatatgatattggaaatcatttcaatgaatttgcaggtgtgagtgatgtagactatagtctgtatccagatagagaactacagagtcagtggctgcgtgcttaccttgaagcctacaaagaatttaagggctttgggactgaagttactgaaaaggaggtagaaatactcttcattcaagtcaatcagtttgcattgggtgaaaacttgaattttatcattggcaacaaatattgtcagttattttcactgaaatggcttctcatttcttttggggattgtgggctttgattcaagccaaatactccactattgagtttgatttccttgggtatgcaattgttcgttttaaccagtactttaaaatgaagcctgaggttactgcattaaaagtgcctgagtaaagaagagatttaattattctccagtagctgagcaatgcttgtgaatcttttcttaagaaatcccaaaaagccaatattagttaaaattctgttgtttaatttggttatcttgctttataaattatgcctctaaacaatcaaatctatttttgaaatagactgaatgatgtcaagaaatatacctactgctatccgtatgtggtggattagaaatgtgttaaatctgcaaaaggtataaagatgtcagtttaatttctttgataatttaa

SEQ ID NO: 130745 - DNA, 843 bp, Homo sapiens
  Payload ID: 5559
  Gene Symbol: ETNK2
  Gene Name: ethanolamine kinase 2
  ENST ID: ENST00000367197
  CDS Start-End: 409-615
ctggcttcacggagctgttcttccggctggcacttggacaagcaaaagttagaccttgatttaggtcttaagttaatttgtaggagggaagggggaaaggaaataaaaaattcccactttgaaaagtctgtgccaagggccagtctcagtggctcatgcctataatcccagcagtttgggaggccaaggcatgtggattgcttaagcccaggaattcaagaccagcccaggcaatgtggtcacgtgcggttcattgactatgaatatgctggctacaactaccaagcttttgacattggcaaccatttcaatgagtttgcaggcgtgaatgaggtggattactgcctgtacccggcgcgggagacccagctgcagtggctgcactactacctgcaggcacaaaaggggatggccgtgacccccagggaggtgcaaaggctctacgtgcaagtcaacaagtttgccctggcgtctcacttcttctgggctctctgggccctcatccagaaccagtactccaccatcgactttgatttcctcaggtacgcagtgatccgattcaaccagtacttcaaggtgaagcctcaagcgtcagccttggagatgccaaagtgaccagccaccccatccctcccctacccatctgtctggccagacctgttctccagagctcaattctgcactctgggatccacacccttggacagggtgggagaggggacacatgggtgtccagggagaaggctctgtccctgccgccagaccccagtggttgccactgaagacctcattctcctgtctggaggggctgataggacccccttccgggggtccccttcaccc

SEQ ID NO: 130746 - DNA, 2431 bp, Homo sapiens
  Payload ID: 5559
  Gene Symbol: ETNK2
  Gene Name: ethanolamine kinase 2
  Uniprot ID: Q9NVF9
  ENST ID: ENST00000367201
  CDS Start-End: 43-1227
gctagcgtctgccgcggctccgagggggtggggctgctgggaatggctgtgcccccttcggcccctcagccgcgcgcgtcctttcacctgaggaggcacacgccttgcccgcagtgctcatggggcatggaggagaaggcggcggccagcgccagctgccgggagccgccgggccccccgagggccgccgccgtcgcgtacttcggcatttccgtggacccggacgacatccttcccggggccctgcgcctcatccaggagctgcggccgcattggaaacccgagcaagttcggaccaagcgcttcacggatggcatcaccaacaagctggtggcctgctatgtggaggaggacatgcaggactgcgtgctggtccgggtgtatggggagcggacggagctgctggtggaccgggagaatgaggtcagaaacttccagctgctgcgagcacacagctgtgcccccaaactctactgcaccttccagaatgggctgtgctatgagtacatgcagggtgtggccctggagcctgagcacatccgtgagccccggcttttcaggttaatcgccttagaaatggcaaagattcatactatccacgccaacggcagcctgcccaagcccatcctctggcacaagatgcacaattatttcacgcttgtgaagaacgagatcaaccccagcctttctgcagatgtccctaaggtagaggtgttggaacgggagctggcctggctgaaggagcatctgtcccagctggagtcccctgtggtgttttgtcacaatgacctgctctgcaagaatatcatctatgacagcatcaaaggtcacgtgcggttcattgactatgaatatgctggctacaactaccaagcttttgacattggcaaccatttcaatgagtttgcaggcgtgaatgaggtggattactgcctgtacccggcgcgggagacccagctgcagtggctgcactactacctgcaggcacaaaaggggatggccgtgacccccagggaggtgcaaaggctctacgtgcaagtcaacaagtttgccctgggtcctagctgtgtgtcttccacaatgactgcatccctccagtgctgtagagtcggaaacaggcatggggagattgccaggctgaccctctctggtctgtttccaggcgtctcacttcttctgggctctctgggccctcatccagaaccagtactccaccatcgactttgatttcctcaggtacgcagtgatccgattcaaccagtacttcaaggtgaagcctcaagcgtcagccttggagatgccaaagtgaccagccaccccatccctcccctacccatctgtctggccagacctgttctccagagctcaattctgcactctgggatccacacccttggacagggtgggagaggggacacatgggtgtccagggagaaggctctgtccctgccgccagaccccagtggttgccactgaagacctcattctcctgtctggaggggctgataggacccccttccgggggtccccttcaccccaccaggcttgggaggaagtgcctgcagccaggtcctgaaccataaccacccctgggaaacacatcattcccagcctcaggccctgctggaattggggctgccttatatgtgtgtttaccccttcctggcctggggaaggaggcggggagggctcctttctacctccagtgccctgagcctccagtccgtctccccctgcatgccccatgtgggaggtgctgagctccaaaccagcatcacaccaactctgacacatggatgtacctatcttggtgatgggtgggggccaagaattgagcatgacatcttccccagcagccacctcctctgagatccctcaccttctccaaaccagatccaatcaaacctcagcccgaggaaacatgctccccaacgtgctctcctgtgcttctgttttgtccccctgctggggggacaggagagggagtggtgaggccctgggcctccagagcctggctctgctttgtgctgtggcttagccggaggggacgtggccaagggtgaggtggccaaaaccagaaccagcagtctcctgccttgttccctccctggccctcaggccctccttccagggatgtctctccagctctactttatgtcctgaagctgacccgaggtcttcctatctggaatgactagagggagccaagaggatggggtgggggccagggccccccagggcctatcgtgggagagcctgggcaggatcccatcagaaaggtgctgactaaactggttgcccggacactcaacagcctccacctccctttctaccctcacagctcctggggccttcctggctctggcccagaaagtgattcatttgtaaattatcatggttttctttctgcattaaaatgctcatttccgga

SEQ ID NO: 130747 - DNA, 2434 bp, Homo sapiens
  Payload ID: 5559
  Gene Symbol: ETNK2
  Gene Name: ethanolamine kinase 2
  Uniprot ID: Q9NVF9
  ENST ID: ENST00000367202
  CDS Start-End: 152-1312
cggcgggccgcgagccggcgatcgaagcgggcagctcgcgcctgagtcatggacttcccctggcccctcctctaccactcccactccctcgccggacccccccgccggggctagcgtctgccgcggctccgagggggtggggctgctgggaatggctgtgcccccttcggcccctcagccgcgcgcgtcctttcacctgaggaggcacacgccttgcccgcagtgctcatggggcatggaggagaaggcggcggccagcgccagctgccgggagccgccgggccccccgagggccgccgccgtcgcgtacttcggcatttccgtggacccggacgacatccttcccggggccctgcgcctcatccaggagctgcggccgcattggaaacccgagcaagttcggaccaagcgcttcacggatggcatcaccaacaagctggtggcctgctatgtggaggaggacatgcaggactgcgtgctggtccgggtgtatggggagcggacggagctgctggtggaccgggagaatgaggtcagaaacttccagctgctgcgagcacacagctgtgcccccaaactctactgcaccttccagaatgggctgtgctatgagtacatgcagggtgtggccctggagcctgagcacatccgtgagccccggcttttcaggttaatcgccttagaaatggcaaagattcatactatccacgccaacggcagcctgcccaagcccatcctctggcacaagatgcacaattatttcacgcttgtgaagaacgagatcaaccccagcctttctgcagatgtccctaaggtagaggtgttggaacgggagctggcctggctgaaggagcatctgtcccagctggagtcccctgtggtgttttgtcacaatgacctgctctgcaagaatatcatctatgacagcatcaaaggtcacgtgcggttcattgactatgaatatgctggctacaactaccaagcttttgacattggcaaccatttcaatgagtttgcaggcgtgaatgaggtggattactgcctgtacccggcgcgggagacccagctgcagtggctgcactactacctgcaggcacaaaaggggatggccgtgacccccagggaggtgcaaaggctctacgtgcaagtcaacaagtttgccctggcgtctcacttcttctgggctctctgggccctcatccagaaccagtactccaccatcgactttgatttcctcaggtacgcagtgatccgattcaaccagtacttcaaggtgaagcctcaagcgtcagccttggagatgccaaagtgaccagccaccccatccctcccctacccatctgtctggccagacctgttctccagagctcaattctgcactctgggatccacacccttggacagggtgggagaggggacacatgggtgtccagggagaaggctctgtccctgccgccagaccccagtggttgccactgaagacctcattctcctgtctggaggggctgataggacccccttccgggggtccccttcaccccaccaggcttgggaggaagtgcctgcagccaggtcctgaaccataaccacccctgggaaacacatcattcccagcctcaggccctgctggaattggggctgccttatatgtgtgtttaccccttcctggcctggggaaggaggcggggagggctcctttctacctccagtgccctgagcctccagtccgtctccccctgcatgccccatgtgggaggtgctgagctccaaaccagcatcacaccaactctgacacatggatgtacctatcttggtgatgggtgggggccaagaattgagcatgacatcttccccagcagccacctcctctgagatccctcaccttctccaaaccagatccaatcaaacctcagcccgaggaaacatgctccccaacgtgctctcctgtgcttctgttttgtccccctgctggggggacaggagagggagtggtgaggccctgggcctccagagcctggctctgctttgtgctgtggcttagccggaggggacgtggccaagggtgaggtggccaaaaccagaaccagcagtctcctgccttgttccctccctggccctcaggccctccttccagggatgtctctccagctctactttatgtcctgaagctgacccgaggtcttcctatctggaatgactagagggagccaagaggatggggtgggggccagggccccccagggcctatcgtgggagagcctgggcaggatcccatcagaaaggtgctgactaaactggttgcccggacactcaacagcctccacctccctttctaccctcacagctcctggggccttcctggctctggcccagaaagtgattcatttgtaaattatcatggttttctttctgcattaaaatgctcatttccgga

SEQ ID NO: 130748 - DNA, 547 bp, Homo sapiens
  Payload ID: 5559
  Gene Symbol: ETNK2
  Gene Name: ethanolamine kinase 2
  ENST ID: ENST00000429525
  CDS Start-End: 512-547
aaaactaggctcacacctcccttggccctgcacacgcccccctcctcccggggctcttaggcacgcctggtggccacctgcccactgtcggcatgctgcgtgtgcgggccgcaccccctgtcgctgcgtgctggtgcccctcgctgaccagaagcgcgtacccagccagctctgaaacctgaggaggcgggaacttttaagagaccccccgcccccccgacccagccatacatgcatacattgctgccccttctccaccccatggtgggagcaaatcctccaggctctgagctgcccctgtgggtcccaggagccaccctgtggaattccagctagcactcagctcctcaccatcgctgcaggctcgggctcagcacccccacacaggccatcttccccagccccagctggacacagagaaccttgctcgcagcccagttgtctcctgtcttttctgcgcttcacggatggcatcaccaacaagctggtggcctgctatgtggaggaggacatgcaggactgcgtgctggtccgggtgtatggggag

SEQ ID NO: 130749 - DNA, 577 bp, Homo sapiens
  Payload ID: 5559
  Gene Symbol: ETNK2
  Gene Name: ethanolamine kinase 2
  ENST ID: ENST00000452983
  CDS Start-End: 1-577
aattcattctcctctcttctgctgagaccttccttctgcaggacctgtgctcctaagggacttgcaatcatcccatccttggccctctggttaatcgccttagaaatggcaaagattcatactatccacgccaacggcagcctgcccaagcccatcctctggcacaagatgcacaattatttcacgcttgtgaagaacgagatcaaccccagcctttctgcagatgtccctaaggtagaggtgttggaacgggagctggcctggctgaaggagcatctgtcccagctggagtcccctgtggtgttttgtcacaatgacctgctctgcaagaatatcatctatgacagcatcaaaggtcacgtgcggttcattgactatgaatatgctggctacaactaccaagcttttgacattggcaaccatttcaatgagtttgcaggcgtgaatgaggtggattactgcctgtacccggcgcgggagacccagctgcagtggctgcactactacctgcaggcacaaaaggggatggccgtgacccccagggaggtgcaaaggctctacgtgcaagtcaacaagt

SEQ ID NO: 130750 - DNA, 653 bp, Homo sapiens
  Payload ID: 5559
  Gene Symbol: ETNK2
  Gene Name: ethanolamine kinase 2
  ENST ID: ENST00000422699
  CDS Start-End: 1-653
agacggttggggggtgggacagcggaagggaagactggaagaggactgggagggcccagctgggacacagggcctcgggcgatggggtctttatcaaggccctccttctctgaccggttaatcgccttagaaatggcaaagattcatactatccacgccaacggcagcctgcccaagcccatcctctggcacaagatgcacaattatttcacgcttgtgaagaacgagatcaaccccagcctttctgcagatgtccctaaggtagaggtgttggaacgggagctggcctggctgaaggagcatctgtcccagctggagtcccctgtggtgttttgtcacaatgacctgctctgcaagaatatcatctatgacagcatcaaaggtcacgtgcggttcattgactatgaatatgctggctacaactaccaagcttttgacattggcaaccatttcaatgagtttgcaggcgtgaatgaggtggattactgcctgtacccggcgcgggagacccagctgcagtggctgcactactacctgcaggcacaaaaggggatggccgtgacccccagggaggtgcaaaggctctacgtgcaagtcaacaagtttgccctggcgtctcacttcttctgggctctctgggccctcatccagaa

SEQ ID NO: 130751 - DNA, 443 bp, Homo sapiens
  Payload ID: 5559
  Gene Symbol: ETNK2
  Gene Name: ethanolamine kinase 2
  ENST ID: ENST00000444817
  CDS Start-End: 1-443
tatggggagcggacggagctgctggtggaccgggagaatgaggtcagaaacttccagctgctgcgagcacacagctgtgcccccaaactctactgcaccttccagaatgggctgtgctatgagtacatgcagggtgtggccctggagcctgagcacatccgtgagccccggcttttcagcctttctgcagatgtccctaaggtagaggtgttggaacgggagctggcctggctgaaggagcatctgtcccagctggagtcccctgtggtgttttgtcacaatgacctgctctgcaagaatatcatctatgacagcatcaaaggtcacgtgcggttcattgactatgaatatgctggctacaactaccaagcttttgacattggcaaccatttcaatgagtttgcaggcgtgaatgaggtggattactgcctgtacccggcgcg

SEQ ID NO: 130752 - DNA, 671 bp, Homo sapiens
  Payload ID: 5559
  Gene Symbol: ETNK2
  Gene Name: ethanolamine kinase 2
  ENST ID: ENST00000422072
  CDS Start-End: 1-449
agcagggttttggttggttggttagctggcttcacggagctgttcttccggctggcacttggacaagcaaaagtcacgtgcggttcattgactatgaatatgctggctacaactaccaagcttttgacattggcaaccatttcaatgagtttgcaggcgtgaatgaggtggattactgcctgtacccggcgcgggagacccagctgcagtggctgcactactacctgcaggcacaaaaggggatggccgtgacccccagggaggtgcaaaggctctacgtgcaagtcaacaagtttgccctggcgtctcacttcttctgggctctctgggccctcatccagaaccagtactccaccatcgactttgatttcctcaggtacgcagtgatccgattcaaccagtacttcaaggtgaagcctcaagcgtcagccttggagatgccaaagtgaccagccaccccatccctcccctacccatctgtctggccagacctgttctccagagctcaattctgcactctgggatccacacccttggacagggtgggagaggggacacatgggtgtccagggagaaggctctgtccctgccgccagaccccagtggttgccactgaagacctcattctcctgtctggaggggctgataggacccccttccgggggtcccct

SEQ ID NO: 130753 - DNA, 2099 bp, Homo sapiens
  Payload ID: 5560
  Gene Symbol: ETNPPL
  Gene Name: ethanolamine-phosphate phospho-lyase
  Uniprot ID: Q8TBG4
  ENST ID: ENST00000296486
  CDS Start-End: 156-1655
acgccaccggtgacctccgacgccccgggcaagagaacgccaggagggataacgggaggaaggccggccggggccgccaaggcagtcccaggctcgcgtaggaggcgcgcagaccttgcaccttgcaccttcgcagcgccctgcaccccgccaccatgtgcgagctgtacagtaagcgggacactctggggctgaggaagaagcacatcgggccctcatgcaaagttttctttgcatcggatcccatcaaaatagtgagagcccagaggcagtacatgtttgatgagaacggtgaacagtacttggactgcatcaacaatgttgcccatgtgggacactgtcacccaggagtggtcaaagctgccctgaaacagatggaactgctaaatacaaattctcgattcctccacgacaacattgttgagtatgccaaacgcctttcagcaactctgccggagaaactctctgtttgttattttacaaattcaggatccgaagccaacgacttagccttacgcctggctcggcagttcagaggccaccaggatgtgatcactcttgaccatgcttaccatggtcacctatcatccttaattgagattagcccatataagtttcagaaaggaaaagatgtcaaaaaagaatttgtacatgtggcaccaactccagatacttacagaggaaaatatagagaagaccatgcagactcagccagtgcttatgcagatgaagtgaagaaaatcattgaagatgctcataacagtggaaggaagattgctgcctttattgctgaatccatgcagagttgtggcggacaaataattcctccagcaggctacttccagaaagtggcagaatatgtacacggtgcagggggtgtgtttatagctgatgaagttcaagtgggctttggcagagttgggaaacatttctggagcttccagatgtatggtgaagactttgttccagacatcgtcacaatgggaaaaccgatgggcaacggccacccggtggcatgtgtggtaacaaccaaagaaattgcagaagccttcagcagctctgggatggaatattttaatacgtatggaggaaatccagtatcttgtgctgttggtttggctgtcctggatataattgaaaatgaagaccttcaaggaaatgccaagagagtagggaattatctcactgagttactgaaaaaacagaaggctaaacacactttgataggagatattaggggcattggcctttttattggaattgatttagtgaaggaccatctgaaaaggacccctgccacagctgaagctcagcacatcatctacaagatgaaagaaaaacgagtgcttctcagtgccgatggacctcatagaaatgtacttaaaataaaaccacctatgtgcttcactgaagaagatgcaaagttcatggtggaccaacttgataggattctaacagttttagaagaagctatgggaaccaaaaccgaaagtgtgacctctgagaatactccatgcaaaacaaagatgctgaaagaagcccacatagaactgcttagggacagcaccactgactccaaagaaaatcccagcagaaagagaaatggaatgtgcacggatacacattcactgctcagtaagaggctcaagacatgactgatttgcattttaaagcaagatgcgatgtccagagttacagagaatgagtagatgtgtctcatcggttaatagctctattatacctctaaaggtggaattgtcagtttagattcataaatgaaaaggtaaatgagtaatcagaataaaccaagtgataatcaaaccatgtcaagattattagttcagactctagcctgttaattttcttagttgatttctgaagctacctgatttattctattaaattgtaagcttgcaaactcaaaataaattggcagatttacctctcatgttttaatgtgtcaaattagagagcaaagtataacaggtgccttcacttttgagacttagtgccttaaaatatgtattctataatgatttcatatataaaagtatatttattgactgtaataaaataaaatatgatgtaaacaaaaaaaa

SEQ ID NO: 130754 - DNA, 2028 bp, Homo sapiens
  Payload ID: 5560
  Gene Symbol: ETNPPL
  Gene Name: ethanolamine-phosphate phospho-lyase
  Uniprot ID: Q8TBG4
  ENST ID: ENST00000411864
  CDS Start-End: 111-1592
gggataacgggaggaaggccggccggggccgccaaggcagtcccaggctcgcgtaggaggcgcgcagaccttgcaccttgcaccttcgcagcgccctgcaccccgccaccatgtgcgagctgtacagtaagcgggacactctggggctgaggaagaagcacatcgggccctcatgcaaagttttctttgcatcggatcccatcaaaatagtgagagcccagaggcagtacatgtttgatgagaacggtgaacagtacttggactgcatcaacaatgttgcccatggagtggtcaaagctgccctgaaacagatggaactgctaaatacaaattctcgattcctccacgacaacattgttgagtatgccaaacgcctttcagcaactctgccggagaaactctctgtttgttattttacaaattcaggatccgaagccaacgacttagccttacgcctggctcggcagttcagaggccaccaggatgtgatcactcttgaccatgcttaccatggtcacctatcatccttaattgagattagcccatataagtttcagaaaggaaaagatgtcaaaaaagaatttgtacatgtggcaccaactccagatacttacagaggaaaatatagagaagaccatgcagactcagccagtgcttatgcagatgaagtgaagaaaatcattgaagatgctcataacagtggaaggaagattgctgcctttattgctgaatccatgcagagttgtggcggacaaataattcctccagcaggctacttccagaaagtggcagaatatgtacacggtgcagggggtgtgtttatagctgatgaagttcaagtgggctttggcagagttgggaaacatttctggagcttccagatgtatggtgaagactttgttccagacatcgtcacaatgggaaaaccgatgggcaacggccacccggtggcatgtgtggtaacaaccaaagaaattgcagaagccttcagcagctctgggatggaatattttaatacgtatggaggaaatccagtatcttgtgctgttggtttggctgtcctggatataattgaaaatgaagaccttcaaggaaatgccaagagagtagggaattatctcactgagttactgaaaaaacagaaggctaaacacactttgataggagatattaggggcattggcctttttattggaattgatttagtgaaggaccatctgaaaaggacccctgccacagctgaagctcagcacatcatctacaagatgaaagaaaaacgagtgcttctcagtgccgatggacctcatagaaatgtacttaaaataaaaccacctatgtgcttcactgaagaagatgcaaagttcatggtggaccaacttgataggattctaacagttttagaagaagctatgggaaccaaaaccgaaagtgtgacctctgagaatactccatgcaaaacaaagatgctgaaagaagcccacatagaactgcttagggacagcaccactgactccaaagaaaatcccagcagaaagagaaatggaatgtgcacggatacacattcactgctcagtaagaggctcaagacatgactgatttgcattttaaagcaagatgcgatgtccagagttacagagaatgagtagatgtgtctcatcggttaatagctctattatacctctaaaggtggaattgtcagtttagattcataaatgaaaaggtaaatgagtaatcagaataaaccaagtgataatcaaaccatgtcaagattattagttcagactctagcctgttaattttcttagttgatttctgaagctacctgatttattctattaaattgtaagcttgcaaactcaaaataaattggcagatttacctctcatgttttaatgtgtcaaattagagagcaaagtataacaggtgccttcacttttgagacttagtgccttaaaatatgtattctataatgatttcatatataaaagtatatttattgactgtaataaaataaaatatgatgtaaac

SEQ ID NO: 130755 - DNA, 567 bp, Homo sapiens
  Payload ID: 5560
  Gene Symbol: ETNPPL
  Gene Name: ethanolamine-phosphate phospho-lyase
  ENST ID: ENST00000512320
  CDS Start-End: 388-567
agacaccattccagggatgggagatgggtggaagaaggatagcgctccgccacccccacacaactcgaaagtttttggaaactgtgaactgagaaatattttttcatgatggctccgcaaacaaaccaattctgacaatttttacttaaagtgagctttttcttcttgcatgcttggttaagtgatgaagggtttatctagccaatagaaaaacttgaaaccaccttctgttagaaaagcagagactttatttagatccctcttacccaacttgctctcccaagctgtgttcttcccagcctgcttgtcttgcccccgtcacaaacgacttagtaatataaagtgggacactgtcacccaggagtggtcaaagctgccctgaaacagatggaactgctaaatacaaattctcgattcctccacgacaacattgttgagtatgccaaacgcctttcagcaactctgccggagaaactctctgtttgttattttacaaattcaggatccgaagccaacgacttagccttacgcctggctcggcagttcagaggccaccaggatgtgatc

SEQ ID NO: 130756 - DNA, 680 bp, Homo sapiens
  Payload ID: 5560
  Gene Symbol: ETNPPL
  Gene Name: ethanolamine-phosphate phospho-lyase
  ENST ID: ENST00000505233
  CDS Start-End: 32-226
gcaccttcgcagcgccctgcaccccgccaccatgtgcgagctgtacagtaagcgggacactctggggctgaggaagaagcacatcgggccctcatgcaaagttttctttgcatcggatcccatcaaaatagtgagagcccagaggcagtacatgtttgatgagaacggtgaacagtacttggactgcatcaacaatgttgcccatgatccgaagccaacgacttagccttacgcctggctcggcagttcagaggccaccaggatgtgatcactcttgaccatgcttaccatggtcacctatcatccttaattgagattagcccatataagtttcagaaaggaaaagatgtcaaaaaagaatttgtacatgtggcaccaactccagatacttacagaggaaaatatagagaagaccatgcagactcagccagtgcttatgcagatgaagtgaagaaaatcattgaagatgctcataacagtggaaggaagattgctgcctttattgctgaatccatgcagagttgtggcggacaaataattcctccagcaggctacttccagaaagtggcagaatatgtacacggtgcagggggtgtgtttatagctgatgaagttcaagtgggctttggcagagttgggaaacatttctggagcttccagatgtatggtgaagactttgt

SEQ ID NO: 130757 - DNA, 1692 bp, Homo sapiens
  Payload ID: 5560
  Gene Symbol: ETNPPL
  Gene Name: ethanolamine-phosphate phospho-lyase
  ENST ID: ENST00000510706
  CDS Start-End: 298-1677
acgccaccggtgacctccgacgccccgggcaagagaacgccaggagggataacgggaggaaggccggccggggccgccaaggcagtcccaggctcgcgtaggaggcgcgcagaccttgcaccttgcaccttcgcagcgccctgcaccccgccaccatgtgcgagctgtacagtaagcgggacactctggggctgaggaagaagcacatcgggtaagggcaccctggcccggaagccctcatgcaaagttttctttgcatcggatcccatcaaaatagtgagagcccagaggcagtacatgtttgatgagaacggtgaacagtacttggactgcatcaacaatgttgcccatgtgggacactgtcacccaggagtggtcaaagctgccctgaaacagatggaactgctaaatacaaattctcgattcctccacgacaacattgttgagtatgccaaacgcctttcagcaactctgccggagaaactctctgtttgttattttacaaattcaggatccgaagccaacgacttagccttacgcctggctcggcagttcagaggccaccaggatgtgatcactcttgaccatgcttaccatggtcacctatcatccttaattgagattagcccatataagtttcagaaaggaaaagatgtcaaaaaagaatttgtacatgtggcaccaactccagatacttacagaggaaaatatagagaagaccatgcagactcagccagtgcttatgcagatgaagtgaagaaaatcattgaagatgctcataacagtggaaggaagattgctgcctttattgctgaatccatgcagagttgtggcggacaaataattcctccagcaggctacttccagaaagtggcagaatatgtacacggtgcagggggtgtgtttatagctgatgaagttcaagtgggctttggcagagttgggaaacatttctggagcttccagatgtatggtgaagactttgttccagacatcgtcacaatgggaaaaccgatgggcaacggccacccggtggcatgtgtggtaacaaccaaagaaattgcagaagccttcagcagctctgggatggaatattttaatacgtatggaggaaatccagtatcttgtgctgttggtttggctgtcctggatataattgaaaatgaagaccttcaaggaaatgccaagagagtagggaattatctcactgagttactgaaaaaacagaaggctaaacacactttgataggagatattaggggcattggcctttttattggaattgatttagtgaaggaccatctgaaaaggacccctgccacagctgaagctcagcacatcatctacaagatgaaagaaaaacgagtgcttctcagtgccgatggacctcatagaaatgtacttaaaataaaaccacctatgtgcttcactgaagaagatgcaaagttcatggtggaccaacttgataggattctaacagttttagaagaagctatgggaaccaaaaccgaaagtgtgacctctgagaatactccatgcaaaacaaagatgctgaaagaagcccacatagaactgcttagggacagcaccactgactccaaagaaaatcccagcagaaagagaaatggaatgtgcacggatacacattcactgctcagtaagaggctcaagacatgactgatttgcatttta

SEQ ID NO: 130758 - DNA, 543 bp, Homo sapiens
  Payload ID: 5560
  Gene Symbol: ETNPPL
  Gene Name: ethanolamine-phosphate phospho-lyase
  ENST ID: ENST00000510723
  CDS Start-End: 332-543
gtgcacgcgccccgcgcgcctccacctgcaggggccgcgcggactcccagaaacgctcctggaacccggaacgctgggcttcctgcccgctcgaaagtccccggctcgctctgcagccggcggactagcgggggctgccggccggctagaggggttggtggatgacggccaatagccctagcagacaccattccagggatgggagatgggtggaagaaggatagcgctccgccacccccacacaactcgaaagtttttggaaactgtgaactgagaaatattttttcatgatggctccgcaaacaaaccaattctgacaatttttacttaaatgggacactgtcacccaggagtggtcaaagctgccctgaaacagatggaactgctaaatacaaattctcgattcctccacgacaacattgttgagtatgccaaacgcctttcagcaactctgccggagaaactctctgtttgttattttacaaattcaggatccgaagccaacgacttagccttacgcctggctcggcagttcagaggcca

SEQ ID NO: 130759 - DNA, 576 bp, Homo sapiens
  Payload ID: 5560
  Gene Symbol: ETNPPL
  Gene Name: ethanolamine-phosphate phospho-lyase
  ENST ID: ENST00000509402
  CDS Start-End: 157-306
gacgccaccggtgacctccgacgccccgggcaagagaacgccaggagggataacgggaggaaggccggccggggccgccaaggcagtcccaggctcgcgtaggaggcgcgcagaccttgcaccttgcaccttcgcagcgccctgcaccccgccaccatgtgcgagctgtacagtaagcgggacactctggggctgaggaagaagcacatcggtgggacactgtcacccaggagtggtcaaagctgccctgaaacagatggaactgctaaatacaaattctcgattcctccacgacaacattgttgagtatgccaaacgcctttcagcaactctgccggagaaactctctgtttgttattttacaaattcaggatccgaagccaacgacttagccttacgcctggctcggcagttcagaggccaccaggatgtgatcactcttgaccatgcttaccatggtcacctatcatccttaattgagattagcccatataagtttcagaaaggaaaagatgtcaaaaaagaatttgtacatgtggcaccaactccagatacttacagaggaaaatatagaga

SEQ ID NO: 130760 - DNA, 1561 bp, Homo sapiens
  Payload ID: 5560
  Gene Symbol: ETNPPL
  Gene Name: ethanolamine-phosphate phospho-lyase
  Uniprot ID: Q8TBG4
  ENST ID: ENST00000512646
  CDS Start-End: 144-1469
aggctcgcgtaggaggcgcgcagaccttgcaccttgcaccttcgcagcgccctgcaccccgccaccatgtgcgagctgtacagtaagcgggacactctggggctgaggaagaagcacatcgggtaagggcaccctggcccggaatgggacactgtcacccaggagtggtcaaagctgccctgaaacagatggaactgctaaatacaaattctcgattcctccacgacaacattgttgagtatgccaaacgcctttcagcaactctgccggagaaactctctgtttgttattttacaaattcaggatccgaagccaacgacttagccttacgcctggctcggcagttcagaggccaccaggatgtgatcactcttgaccatgcttaccatggtcacctatcatccttaattgagattagcccatataagtttcagaaaggaaaagatgtcaaaaaagaatttgtacatgtggcaccaactccagatacttacagaggaaaatatagagaagaccatgcagactcagccagtgcttatgcagatgaagtgaagaaaatcattgaagatgctcataacagtggaaggaagattgctgcctttattgctgaatccatgcagagttgtggcggacaaataattcctccagcaggctacttccagaaagtggcagaatatgtacacggtgcagggggtgtgtttatagctgatgaagttcaagtgggctttggcagagttgggaaacatttctggagcttccagatgtatggtgaagactttgttccagacatcgtcacaatgggaaaaccgatgggcaacggccacccggtggcatgtgtggtaacaaccaaagaaattgcagaagccttcagcagctctgggatggaatattttaatacgtatggaggaaatccagtatcttgtgctgttggtttggctgtcctggatataattgaaaatgaagaccttcaaggaaatgccaagagagtagggaattatctcactgagttactgaaaaaacagaaggctaaacacactttgataggagatattaggggcattggcctttttattggaattgatttagtgaaggaccatctgaaaaggacccctgccacagctgaagctcagcacatcatctacaagatgaaagaaaaacgagtgcttctcagtgccgatggacctcatagaaatgtacttaaaataaaaccacctatgtgcttcactgaagaagatgcaaagttcatggtggaccaacttgataggattctaacagttttagaagaagctatgggaaccaaaaccgaaagtgtgacctctgagaatactccatgcaaaacaaagatgctgaaagaagcccacatagaactgcttagggacagcaccactgactccaaagaaaatcccagcagaaagagaaatggaatgtgcacggatacacattcactgctcagtaagaggctcaagacatgactgatttgcattttaaagcaagatgcgatgtccagagttacagagaatgagtagatgtgtctcatcggttaatagctctattatacctctaa

SEQ ID NO: 130761 - DNA, 8101 bp, Homo sapiens
  Payload ID: 5561
  Gene Symbol: EPT1
  Gene Name: ethanolaminephosphotransferase 1
  Uniprot ID: Q9C0D9
  ENST ID: ENST00000260585
  CDS Start-End: 120-1313
ctcctaccttctcgggcagcccagtctttgccatccttgcccagccggtgtggtgcttgtgtgtcacagccttgtagccgggagtcgctgccgagtgggcgctcagttttcgggtcgtcatggctggctacgaatacgtgagcccggagcagctggctggctttgataagtacaagtacagtgctgtggataccaatccactttctctgtatgtcatgcatccattctggaacactatagtaaaggtatttcctacttggctggcgcccaatctgataactttttctggctttctgctggtcgtattcaattttctgctaatggcatactttgatcctgacttttatgcctcagcaccaggtcacaagcacgtgcctgactgggtttggattgtagtgggcatcctcaacttcgtagcctacactctagatggtgtggacggaaagcaagctcgcagaaccaattctagcactcccttaggggagctttttgatcatggcctggatagttggtcatgtgtttactttgttgtgactgtttattccatctttggaagaggatcaactggtgtcagtgtttttgttctttatctcctgctatgggtagttttgttttctttcatcctgtcccactgggaaaagtataacacagggattcttttcctgccatggggatatgacattagccaggtgactatttcttttgtctacatagtgactgcagttgtgggagttgaggcctggtatgaacctttcctgtttaatttcttatatagagacctattcactgcaatgattattggttgtgcattatgtgtgactcttccaatgagtttattaaactttttcagaagctataaaaataacaccttgaaactcaattcagtctatgaagctatggttcccttattttctccatgcttgctgttcattttgtctacagcgtggatcctttggtcaccttcagatattttagagctacatcctagagtattctactttatggttggaacagcttttgccaacagtacatgtcagctgattgtttgccaaatgagtagtacccggtgtccaactttgaattggttgctggttcctctcttcttggttgtcttagtggtaaacctaggagtagcctcttacgttgagagcattctcctgtatacattaacaactgcttttactctggcccacatccattatggagtacgagtggtaaagcagctgagcagccattttcagatttaccccttctcattgaggaaaccaaactcagattgactaggaatggaagaaaagaatattggcctgtaataatctttctttgggcacaaagaagtactgtaaataaatgcttgtaaatatttcctccatcaccattgaactagactgatctgcttgacagacgtgggatctcagtatggtacttggacagcaggaatgatacatataatctgaacttgggaaattttggacctactaactctaagcctattttattttttataaaactatgtgacattttggttgagcagaatgtacgttagaccagcaaaatgttcctaatggttctaacttcgtgagtttacaatgttgtgattcatgcagggttaaagatgctttgtttttattttttaagtaccaaaattggtttcagaacactgataacactcagaaaaccacagtgtgttttcatatttggaactttgtaatagcgggagtagcagtagtccaaacctagtatagggaaaggataaaaataagtcaccttcaccaagagatgccaatgattaccaaacaacagacagttgccaaatactggtttctctttcccctgaaaatggcttttgttctcaaatgataagagagctaatacatttagctaatattctagctctctttattatggaacagatcttgatagatggtttaattttctcctaaagagaaataatcagttgagaatttgagaatgggttgtaattatcgctcacccattgggatggttcattgtttaaatatggcattttccccccttcagctgcaggttcctgagatttggtgcctgtgagctctgattgtaggaatgcatgtgacagtcccagtcctatggtaatgacttaggaggaatgcagataaaagtaccttgtaagataaatataaattggagttaggaatttcatgaacctcactatgaccaaaattaattttttgattcagtttgtctgtctgtctgtccttcccctctcttcttttttcagggtgaggtgctgtgtttcttatttcatacgagataaaacagagagaagttctctcttctccagcttgtccatttccccacttgaagaaaacttttgatatatatgccttactgagtacatgccccctttaatgttaacatgacttggagtaatttctgaggtttactgacaaacataaaaatccctttaattgtagtgtagttgttctataaaccatattttttcatgatgtggatattttcttctatttctttgtcttcatttaatttggtggtggtgaactttacttgctgattttcttttatttttcactgaatgaagtttgtgcttgaatgaagagtgtatcttaaaccccctttttttggacaggctgcacttggataaaataggcaccactgtgttgatatgtaattaaattcataactatttatgaatgtgaccattgttaaatttaattatagtgtatttctttcttgaatttcagtctgctgctttgtaaaaaataactgtaattgatatttcatttttaaaatttataaattccaatcattgtcattcaagttattagaaatgagtcacggcactaactcatggttctatactcattttaagaaattgtaaaggttgaggtgtatttggtgactttctctgagacacagatgaacgttggaaatagatgagaaatggatgcagaataatgcagatagtgatcccatgtttgttaattgccatcatggaagtcagagaattaaccaattaagtgacggtaactattttttgtataccttgttctttgtgatctataaaattaaactggataaaatgttaattgggggtagggaaaaagctttgttttaagatttctaagctaattattttaccgttttgttgaccttgtacacaagaatgagattaatctgtattatataagaaaagaactgataaatatttataaaatgacaaacttggaccacaggctttcttgaccttgtacagtatagtaaaaataccctttacttctgacattttaaggtcacgtcctatagtttgggggcccttttacttcaaaggtgtgtttctgccctcttttggttgtatcaaatttatttgaaaattgttttgtgctgtactttatgacttgtttccctatggtggtaaagaatgatgccatagtcagttttattgacattgttagatgaaagaaaagtagctgtcaacaaggggaaagtgaaattgagcaattcactgtttcaggatacttgaggatctttagtgtactgctgactctttttcttgttttgtctgccattcttgaaagtgcatcttgagagcccccatttgttgtgtagagatatagcagctgaagcaggacttcattccagatagctgtgtgcatttatgtcatgccaattactataacatttccaaagtatgaaaggtctttcaggcttatgcatgatattgtgggtgacttcatgccccagcctttctccccagcatacagtgagctgccttttggggagcaatgccatgataaggagcatacgtgcatgttttccgtactttcagaatagagtgccttagctaggccagaggctcgtattgtgtttctgctgaccaaagttgcatacacctgtaagaagtgtctttttaggttatggtattaaaaaagtcgtttcaggcttatcagataataattctcctatatttgaggggggcatgggataaaaagatttaataatacctggatagagaatgctaatgctgccttttgtgatcctttaatattatccatgcttttataaagtgcagtacacattttgacattgccacagtttacagtgtcattcttccacgaataggtaattgatagagtttatgggtcttagtcttaagggtaacagagtgaataccttccaaataaaaagctaaatattcctccttgtcattttaatgtcattattgaaatacttttaattctaattttcaaaagaaagctaaatgctgattgtggtttaggatgttacagtactaataccatcatgttatttattctaatatagaggcattgagaggaggggagtgtatgtctagagttaccccaattctaaataggtaccaaaagagtattgattatgacctggagcctgagctttgggagaatatacaaaggaaaaagcaggcatagtttccactttaaagggaagaagggactttaacatcctatgaatttgaaacatcctatgaatttgaaagtttcctaagtgttgttttcaaagaactggtttattttatagtcagtcaaaatgcatttggaatgtaccttgcttccataacagactttgactctatgacctatgaagaataaaaagataatctgaaggtgtttgagtcagaggctacttttcccctttatattttatatagaagcctatttgtaattcttcctcttcgttcttcacctgggtttcctcttatctacccaccacctaggacagaggctgcccactcaggtcttgccttgttgcccctagatgttgccacattcacatctccttgatggccttagatctcttgactagtcaaggactgggaacgtgccagggggaacaaagtaagcttgatgggctggaacttttgactttgggtccccaaacagccaaaaacagatacagaaatctttggttgtgtggatgcctgtgttcagagtggccttatcttgacctcagttctggatttaagtactctatagaaaatttgtgaagtcagaccagaattttctttgtcccatgaggtgtctttgtaagtcagcatgctcttgcttgaacaccctgtgggtgaataactttagtaagttagctgccagcattagaaccttccaggaagaattttaactagtatgctacatttgaagcactctgacatgtacatttaaagtgacagttttaaaagtaaaatggtgttaaatctctgaaacttgaacgtatgatgctctggacattttaggaagcttaagtaaatttctgattttcctttattgattatgtaacccacgtgatttgcatattttagtttttatgtttgacagtggtacaaatgactgacattggcaggcagttattgtagggtatatggttaatcacgattgtctaacttttccagagaaagtggtgatatgcttcttccttgcatggagctgtgggaattggatttgttggctcttcatttccagtgtttctacagtgcagaataaatgtaactttttaagcctgcatgctagtaatatgctttgctctttagtaaacaaatatgcaatagatagtaatctatctactttttttaaagcagggatctgctccctatctagacagatcttttaatgcattaatatttagagtagcaaaagaagttttgccatttgtagctctctcacaggtagcttaagcgagggggttgtgttgcatgtgcttagaaaggccaggatcccagaattggaaggtgccacatatacttttagaatattttaacaaaggcttgtctctaggaaaatccacttggactgcagcaggattgttctggtcttccacagaccattcacatggtctttctctccagagaatcattcttagaaagccaggctaaatcagagtagtgctgtttttaaagcaagtatattggatgatggctatagggtaccttaatgctgtgttgaaattggaagcagactgctcttcagcagcacatatactgcaactgaagttagagacagtactgaagacgagggagtagctaaatgctgtggatatttcatgtctgtttggctaatgtcttctcttgaggagtttctatgggtagcaattaaaattagaatttattttaaggtttttattaaaatatatacaatttgccataaattctagattctgatattcttgacaagcactttttgaatatctcaagagtaagttcttgacctggaacatatatagttagtacttgatgtcactaaccaagttgtagaaggagcctgttataattctgcaagatctgtgaatagcattataaatctggggcaggtgcctgtaatcccagcactttgggaagccaaggcaggtggattgcttgagcccaggagttcgacaccaacctgagcaacatggcgaaaccccgtctgtaataaaaatacaaaaaaattagctgggcatggtggcatgtgcctgtaatcccagttactggggaggctgaggcaggagaatcacttgaacctgggagatggagattgcagtgagcagagattgtgccactgcactccagccagagtgacagagcaagactccatctcaaaaaataataataaaaataaacaaatctgtttaaattactgttgcctttcagcattagactttgagtttaataactacaaattgagactgctcacaatattaactttttttgtaggttattttgttgtttagataacttgcctccctagaggagcattcaggagataaagacctagctacatgtaatgatatgatcatttcaaaaatgtgccaagaaagcaaaattcattattgaactctaaatttctgggtgtttttttttttaaagtagcattttctctgggtaaagggaaaggcaatgaatgattgccaacatgtaaactccctgctgcccgccttcccccagtcccctccatctaacataatacagtaaatttgtagccagttgtagaaaaagaaattgatatctttctgagtaaggtttcatgccctgtgactaagaataggtggaggaatcatggccaaatcaaatatgaattgtttagcttggtcctgttgcagttggctttctgtagtgttctgaaacaagaggacgattccattccttctcaggaacctagaaacaacaccgcttgagcaactggaatatgtttgctgcaagcagaatattttggggagaggaagagtagtttaattcaagtagtttaattgaacatattagtcattggtctgtctgggacgtgcagtgttcatagtagcaatgtatgtaccatttattttatctggttgtgtgtgatgtgtgtgtatgcctatttaatatgtacacatatattcactacatatgtatgtatgatatattcatatatacatgcagtctgcttgattatcagcaaaatggtcagcctttatcagatagtttcttcatgtggagttcatctgcatgtggcccttactctgaagcctcttcctgatctggagccacagtctgtctgtcttccagttcatctcagtcctcgagaaaggccctttaaatatgtcactttcccattttcctttaaccatgggttgtgtgagccagaaagagctttgagaaagatggctgcttccaccagggtggaggcttctaggtctgcatgatgatggggcccgtttctggccagagggtggctctgggagcagttgtgctgcgggcttgctgggggagaactctaactgttgcagaaacagagcttcatggcttgcttaaattacttagctggaatattttaaagtgtcagataatgtgatgtacaaagagagtatgccgatgcatttcattgtttttgcattatctgtatcagtgtttcccattgctagcccgaataatcaagaccagactgtttcttgtcactggattctggaagccttgccctttcaactggatttatgtttgtttctgctgctgtgaaaccccaaagtaatgcagtaggttttaattgaaaattgtttaattctattattgataattatttattgtaataaaagtaaaagagtaatttttaaatccttttaattgttt

SEQ ID NO: 130762 - DNA, 624 bp, Homo sapiens
  Payload ID: 5561
  Gene Symbol: EPT1
  Gene Name: ethanolaminephosphotransferase 1
  ENST ID: ENST00000447170
  CDS Start-End: 85-624
cttgcccagccggtgtggtgcttgtgtgtcacagccttgtagccgggagtcgctgccgagtgggcgctcagttttcgggtcgtcatggctggctacgaatacgtgagcccggagcagctggctggctttgataagtacaagtacagtgctgtggataccaatccactttctctgtatgtcatgcatccattctggaacactatagtaaaggtatttcctacttggctggcgcccaatctgataactttttctggctttctgctggtcgtattcaattttctgctaatggcatactttgatcctgacttttatgcctcagcaccaggtcacaagcacgtgcctgactgggtttggattgtagtgggcatcctcaacttcgtagcctacactctaggttgtgcattatgtgtgactcttccaatgagtttattaaactttttcagaagctataaaaataacaccttgaaactcaattcagtctatgaagctatggttcccttattttctccatgcttgctgttcattttgtctacagcgtggatcctttggtcaccttcagatattttagagctacatcctagagtattctactttatggttggaacagcttttgccaacagtaca

SEQ ID NO: 130763 - DNA, 504 bp, Homo sapiens
  Payload ID: 5561
  Gene Symbol: EPT1
  Gene Name: ethanolaminephosphotransferase 1
  ENST ID: ENST00000442141
  CDS Start-End: 151-504
aaaggttaaagaaagagggaccaattaacttcaccttttcctaaacttgaaaagacaaaccaaattctgcccttcatctccaatgtttgaaagatcagaggttcctgtcaatacagtgctgtggataccaatccactttctctgtatgtcatgcatccattctggaacactatagtaaaggtatttcctacttggctggcgcccaatctgataactttttctggctttctgctggtcgtattcaattttctgctaatggcatactttgatcctgacttttatgcctcagcaccaggtcacaagcacgtgcctgactgggtttggattgtagtgggcatcctcaacttcgtagcctacactctagatggtgtggacggaaagcaagctcgcagaaccaattctagcactcccttaggggagctttttgatcatggcctggatagttggtcatgtgtttactttgttgtgactgtttattccatctttggaagaggatcaactggt

SEQ ID NO: 130764 - DNA, 8126 bp, Homo sapiens
  Payload ID: 5561
  Gene Symbol: EPT1
  Gene Name: ethanolaminephosphotransferase 1
  ENST ID: ENST00000613142
  CDS Start-End: 148-1338
acgcgtgcgcggtgggcggagcgcggctctcctaccttctcgggcagcccagtctttgccatccttgcccagccggtgtggtgcttgtgtgtcacagccttgtagccgggagtcgctgccgagtgggcgctcagttttcgggtcgtcatggctggctacgaatacgtgagcccggagcagctggctggctttgataagtacaagtacagtgctgtggataccaatccactttctctgtatgtcatgcatccattctggaacactatagtaaaggtatttcctacttggctggcgcccaatctgataactttttctggctttctgctggtcgtattcaattttctgctaatggcatactttgatcctgacttttatgcctcagcaccaggtcacaagcacgtgcctgactgggtttggattgtagtgggcatcctcaacttcgtagcctacactctagatggtgtggacggaaagcaagctcgcagaaccaattctagcactcccttaggggagctttttgatcatggcctggatagttggtcatgtgtttactttgttgtgactgtttattccatctttggaagaggatcaactggtgtcagtgtttttgttctttatctcctgctatgggtagttttgttttctttcatcctgtcccactgggaaaagtataacacagggattcttttcctgccatggggatatgacattagccaggtgactatttcttttgtctacatagtgactgcagttgtgggagttgaggcctggtatgaacctttcctgtttaatttcttatatagagacctattcactgcaatgattattggttgtgcattatgtgtgactcttccaatgagtttattaaactttttcagaagctataaaaataacaccttgaaactcaattcagtctatgaagctatggttcccttattttctccatgcttgctgttcattttgtctacagcgtggatcctttggtcaccttcagatattttagagctacatcctagagtattctactttatggttggaacagcttttgccaacagtacatgtcagctgattgtttgccaaatgagtagtacccggtgtccaactttgaattggttgctggttcctctcttcttggttgtcttagtggtaaacctaggagtagcctcttacgttgagagcattctcctgtatacattaacaactgcttttactctggcccacatccattatggagtacgagtggtaaagcagctgagcagccattttcagatttaccccttctcattgaggaaaccaaactcagatctaggaatggaagaaaagaatattggcctgtaataatctttctttgggcacaaagaagtactgtaaataaatgcttgtaaatatttcctccatcaccattgaactagactgatctgcttgacagacgtgggatctcagtatggtacttggacagcaggaatgatacatataatctgaacttgggaaattttggacctactaactctaagcctattttattttttataaaactatgtgacattttggttgagcagaatgtacgttagaccagcaaaatgttcctaatggttctaacttcgtgagtttacaatgttgtgattcatgcagggttaaagatgctttgtttttattttttaagtaccaaaattggtttcagaacactgataacactcagaaaaccacagtgtgttttcatatttggaactttgtaatagcgggagtagcagtagtccaaacctagtatagggaaaggataaaaataagtcaccttcaccaagagatgccaatgattaccaaacaacagacagttgccaaatactggtttctctttcccctgaaaatggcttttgttctcaaatgataagagagctaatacatttagctaatattctagctctctttattatggaacagatcttgatagatggtttaattttctcctaaagagaaataatcagttgagaatttgagaatgggttgtaattatcgctcacccattgggatggttcattgtttaaatatggcattttccccccttcagctgcaggttcctgagatttggtgcctgtgagctctgattgtaggaatgcatgtgacagtcccagtcctatggtaatgacttaggaggaatgcagataaaagtaccttgtaagataaatataaattggagttaggaatttcatgaacctcactatgaccaaaattaattttttgattcagtttgtctgtctgtctgtccttcccctctcttcttttttcagggtgaggtgctgtgtttcttatttcatacgagataaaacagagagaagttctctcttctccagcttgtccatttccccacttgaagaaaacttttgatatatatgccttactgagtacatgccccctttaatgttaacatgacttggagtaatttctgaggtttactgacaaacataaaaatccctttaattgtagtgtagttgttctataaaccatattttttcatgatgtggatattttcttctatttctttgtcttcatttaatttggtggtggtgaactttacttgctgattttcttttatttttcactgaatgaagtttgtgcttgaatgaagagtgtatcttaaaccccctttttttggacaggctgcacttggataaaataggcaccactgtgttgatatgtaattaaattcataactatttatgaatgtgaccattgttaaatttaattatagtgtatttctttcttgaatttcagtctgctgctttgtaaaaaataactgtaattgatatttcatttttaaaatttataaattccaatcattgtcattcaagttattagaaatgagtcacggcactaactcatggttctatactcattttaagaaattgtaaaggttgaggtgtatttggtgactttctctgagacacagatgaacgttggaaatagatgagaaatggatgcagaataatgcagatagtgatcccatgtttgttaattgccatcatggaagtcagagaattaaccaattaagtgacggtaactattttttgtataccttgttctttgtgatctataaaattaaactggataaaatgttaattgggggtagggaaaaagctttgttttaagatttctaagctaattattttaccgttttgttgaccttgtacacaagaatgagattaatctgtattatataagaaaagaactgataaatatttataaaatgacaaacttggaccacaggctttcttgaccttgtacagtatagtaaaaataccctttacttctgacattttaaggtcacgtcctatagtttgggggcccttttacttcaaaggtgtgtttctgccctcttttggttgtatcaaatttatttgaaaattgttttgtgctgtactttatgacttgtttccctatggtggtaaagaatgatgccatagtcagttttattgacattgttagatgaaagaaaagtagctgtcaacaaggggaaagtgaaattgagcaattcactgtttcaggatacttgaggatctttagtgtactgctgactctttttcttgttttgtctgccattcttgaaagtgcatcttgagagcccccatttgttgtgtagagatatagcagctgaagcaggacttcattccagatagctgtgtgcatttatgtcatgccaattactataacatttccaaagtatgaaaggtctttcaggcttatgcatgatattgtgggtgacttcatgccccagcctttctccccagcatacagtgagctgccttttggggagcaatgccatgataaggagcatacgtgcatgttttccgtactttcagaatagagtgccttagctaggccagaggctcgtattgtgtttctgctgaccaaagttgcatacacctgtaagaagtgtctttttaggttatggtattaaaaaagtcgtttcaggcttatcagataataattctcctatatttgaggggggcatgggataaaaagatttaataatacctggatagagaatgctaatgctgccttttgtgatcctttaatattatccatgcttttataaagtgcagtacacattttgacattgccacagtttacagtgtcattcttccacgaataggtaattgatagagtttatgggtcttagtcttaagggtaacagagtgaataccttccaaataaaaagctaaatattcctccttgtcattttaatgtcattattgaaatacttttaattctaattttcaaaagaaagctaaatgctgattgtggtttaggatgttacagtactaataccatcatgttatttattctaatatagaggcattgagaggaggggagtgtatgtctagagttaccccaattctaaataggtaccaaaagagtattgattatgacctggagcctgagctttgggagaatatacaaaggaaaaagcaggcatagtttccactttaaagggaagaagggactttaacatcctatgaatttgaaacatcctatgaatttgaaagtttcctaagtgttgttttcaaagaactggtttattttatagtcagtcaaaatgcatttggaatgtaccttgcttccataacagactttgactctatgacctatgaagaataaaaagataatctgaaggtgtttgagtcagaggctacttttcccctttatattttatatagaagcctatttgtaattcttcctcttcgttcttcacctgggtttcctcttatctacccaccacctaggacagaggctgcccactcaggtcttgccttgttgcccctagatgttgccacattcacatctccttgatggccttagatctcttgactagtcaaggactgggaacgtgccagggggaacaaagtaagcttgatgggctggaacttttgactttgggtccccaaacagccaaaaacagatacagaaatctttggttgtgtggatgcctgtgttcagagtggccttatcttgacctcagttctggatttaagtactctatagaaaatttgtgaagtcagaccagaattttctttgtcccatgaggtgtctttgtaagtcagcatgctcttgcttgaacaccctgtgggtgaataactttagtaagttagctgccagcattagaaccttccaggaagaattttaactagtatgctacatttgaagcactctgacatgtacatttaaagtgacagttttaaaagtaaaatggtgttaaatctctgaaacttgaacgtatgatgctctggacattttaggaagcttaagtaaatttctgattttcctttattgattatgtaacccacgtgatttgcatattttagtttttatgtttgacagtggtacaaatgactgacattggcaggcagttattgtagggtatatggttaatcacgattgtctaacttttccagagaaagtggtgatatgcttcttccttgcatggagctgtgggaattggatttgttggctcttcatttccagtgtttctacagtgcagaataaatgtaactttttaagcctgcatgctagtaatatgctttgctctttagtaaacaaatatgcaatagatagtaatctatctactttttttaaagcagggatctgctccctatctagacagatcttttaatgcattaatatttagagtagcaaaagaagttttgccatttgtagctctctcacaggtagcttaagcgagggggttgtgttgcatgtgcttagaaaggccaggatcccagaattggaaggtgccacatatacttttagaatattttaacaaaggcttgtctctaggaaaatccacttggactgcagcaggattgttctggtcttccacagaccattcacatggtctttctctccagagaatcattcttagaaagccaggctaaatcagagtagtgctgtttttaaagcaagtatattggatgatggctatagggtaccttaatgctgtgttgaaattggaagcagactgctcttcagcagcacatatactgcaactgaagttagagacagtactgaagacgagggagtagctaaatgctgtggatatttcatgtctgtttggctaatgtcttctcttgaggagtttctatgggtagcaattaaaattagaatttattttaaggtttttattaaaatatatacaatttgccataaattctagattctgatattcttgacaagcactttttgaatatctcaagagtaagttcttgacctggaacatatatagttagtacttgatgtcactaaccaagttgtagaaggagcctgttataattctgcaagatctgtgaatagcattataaatctggggcaggtgcctgtaatcccagcactttgggaagccaaggcaggtggattgcttgagcccaggagttcgacaccaacctgagcaacatggcgaaaccccgtctgtaataaaaatacaaaaaaattagctgggcatggtggcatgtgcctgtaatcccagttactggggaggctgaggcaggagaatcacttgaacctgggagatggagattgcagtgagcagagattgtgccactgcactccagccagagtgacagagcaagactccatctcaaaaaataataataaaaataaacaaatctgtttaaattactgttgcctttcagcattagactttgagtttaataactacaaattgagactgctcacaatattaactttttttgtaggttattttgttgtttagataacttgcctccctagaggagcattcaggagataaagacctagctacatgtaatgatatgatcatttcaaaaatgtgccaagaaagcaaaattcattattgaactctaaatttctgggtgtttttttttttaaagtagcattttctctgggtaaagggaaaggcaatgaatgattgccaacatgtaaactccctgctgcccgccttcccccagtcccctccatctaacataatacagtaaatttgtagccagttgtagaaaaagaaattgatatctttctgagtaaggtttcatgccctgtgactaagaataggtggaggaatcatggccaaatcaaatatgaattgtttagcttggtcctgttgcagttggctttctgtagtgttctgaaacaagaggacgattccattccttctcaggaacctagaaacaacaccgcttgagcaactggaatatgtttgctgcaagcagaatattttggggagaggaagagtagtttaattcaagtagtttaattgaacatattagtcattggtctgtctgggacgtgcagtgttcatagtagcaatgtatgtaccatttattttatctggttgtgtgtgatgtgtgtgtatgcctatttaatatgtacacatatattcactacatatgtatgtatgatatattcatatatacatgcagtctgcttgattatcagcaaaatggtcagcctttatcagatagtttcttcatgtggagttcatctgcatgtggcccttactctgaagcctcttcctgatctggagccacagtctgtctgtcttccagttcatctcagtcctcgagaaaggccctttaaatatgtcactttcccattttcctttaaccatgggttgtgtgagccagaaagagctttgagaaagatggctgcttccaccagggtggaggcttctaggtctgcatgatgatggggcccgtttctggccagagggtggctctgggagcagttgtgctgcgggcttgctgggggagaactctaactgttgcagaaacagagcttcatggcttgcttaaattacttagctggaatattttaaagtgtcagataatgtgatgtacaaagagagtatgccgatgcatttcattgtttttgcattatctgtatcagtgtttcccattgctagcccgaataatcaagaccagactgtttcttgtcactggattctggaagccttgccctttcaactggatttatgtttgtttctgctgctgtgaaaccccaaagtaatgcagtaggttttaattgaaaattgtttaattctattattgataattatttattgtaataaaagtaaaagagtaatttttaaatccttttaattgttt

SEQ ID NO: 130765 - DNA, 963 bp, Homo sapiens
  Payload ID: 5562
  Gene Symbol: ETHE1
  Gene Name: ethylmalonic encephalopathy 1
  Uniprot ID: O95571
  ENST ID: ENST00000292147
  CDS Start-End: 68-832
agtgccgtagcgcccggctcctgcaggcgctcggcctccgctcattcctgaccccgcagtgggcgcgatggcggaggctgtactgagggtcgcccggcggcagctgagccagcgcggcgggtctggagcccccatcctcctgcggcagatgttcgagcctgtgagctgcaccttcacgtacctgctgggtgacagagagtcccgggaggccgttctgatcgacccagtcctggaaacagcgcctcgggatgcccagctgatcaaggagctggggctgcggctgctctatgctgtgaatacccactgccacgcggaccacattacaggctcggggctgctccgttccctcctccctggctgccagtctgtcatctcccgccttagtggggcccaggctgacttacacattgaggatggagactccatccgcttcgggcgcttcgcgttggagaccagggccagccctggccacaccccaggctgtgtcaccttcgtcctgaatgaccacagcatggccttcactggagatgccctgttgatccgtgggtgtgggcggacagacttccagcaaggctgtgccaagaccttgtaccactcggtccatgaaaagatcttcacacttccaggagactgtctgatctaccctgctcacgattaccatgggttcacagtgtccaccgtggaggaggagaggactctgaaccctcggctcaccctcagctgtgaggagtttgtcaaaatcatgggcaacctgaacttgcctaaacctcagcagatagactttgctgttccagccaacatgcgctgtggggtgcagacacccactgcctgatctcacttctgtcagatgctcccatccactattaatgcactaggtgggaggagagggcggcaatgacactgcacctctcctttcccaccgcattccctggagctccctaaataaaactttttttaacgtga

SEQ ID NO: 130766 - DNA, 648 bp, Homo sapiens
  Payload ID: 5562
  Gene Symbol: ETHE1
  Gene Name: ethylmalonic encephalopathy 1
  ENST ID: ENST00000602138
  CDS Start-End: 16-171
cccgcagtgggcgcgatggcggaggctgtactgagggtcgcccggcggcagctgagccagcgcggcgggtctggagcccccatcctcctgcggcaggtgcgggtggctggacctaggaggggactgctgggcactaggcggcagcaaggacggaactccggggtctcttaatagggagagatccggggggacccacgcctgcatcttgcggaaagcggggtggaggtttagggctggactcttgggtcctttaaagatgttcgagcctgtgagctgcaccttcacgtacctgctgggtgacagagagtcccgggaggccgttctgatcgacccagtcctggaaacagcgcctcgggatgcccagctgatcaaggagctggggctgcggctgctctatgctgtgaatacccactgccacgcggaccacattacaggctcggggctgctccgttccctcctccctggctgccagtctgtcatctcccgccttagtggggcccaggctgacttacacattgaggatggagactccatccgcttcgggcgcttcgcgttggagaccagggccagccctggccacaccccaggctgtgtcaccttcgtcctgaatgaccacagcatggccttcactggagatgccctgttgat

SEQ ID NO: 130767 - DNA, 1052 bp, Homo sapiens
  Payload ID: 5562
  Gene Symbol: ETHE1
  Gene Name: ethylmalonic encephalopathy 1
  ENST ID: ENST00000600651
  CDS Start-End: 25-807
attcctgaccccgcagtgggcgcgatggcggaggctgtactgagggtcgcccggcggcagctgagccagcgcggcgggtctggagcccccatcctcctgcggcagatgttcgagcctgtgagctgcaccttcacgtacctgctgggtgacagagagtcccgggaggccgttctgatcgacccagtcctggaaacagcgcctcgggatgcccagctgatcaaggagctggggctgcggctgctctatgctgtgaatacccactgccacgcggaccacattacaggctcggggctgctccgttccctcctccctggctgccagtctgtcatctcccgccttagtggggcccaggctgacttacacattgaggatggagactccatccgcttcgggcgcttcgcgttggagaccagggccagccctggccacaccccaggctgtgtcaccttcgtcctgaatgaccacagcatggccttcactggagatgccctgttgatccgtgggtgtgggcggacagacttccagcaaggctgtgccaagaccttgtaccactcggtccatgaaaagatcttcacacttccaggagactgtctgatctaccctgctcacgattaccatgggttcacagtgtccaccgtggaggaggagaggactctgaaccctcggctcaccctcagctgtgaggagtttgtcaaaatcatgggcaacctgaacttgcctaaacctcagcagataggtgagcagctggggacctggacttctgggtctgagagaggaggggctggggtcttggactcctgggtctgagagaggaggggctgggggcctggactcctgggtctgagggaggaggggctgggggcctggactcctgggtctgagggaggagaggctgggggcctggactcctgggtctaagggaggaggggctgggggactggactcctgggtctgaggcagtaggggctgggggcctggactcctggctctgagggagtaggggctgggctgggggcctgggctcctgagtctgagggaggaggggctggggg

SEQ ID NO: 130768 - DNA, 915 bp, Homo sapiens
  Payload ID: 5562
  Gene Symbol: ETHE1
  Gene Name: ethylmalonic encephalopathy 1
  ENST ID: ENST00000598330
  CDS Start-End: 46-333
gcaggcgctcggcctccgctcattcctgaccccgcagtgggcgcgatggcggaggctgtactgagggtcgcccggcggcagctgagccagcgcggcgggtctggagcccccatcctcctgcggcagatgttcgagcctgtgagctgcaccttcacgtacctgctgggtgacagagagtcccgggaggccgttctgatcgacccagtcctggaaacagcgcctcgggatgcccagctgatcaaggagctggggctgcggctgctctatgctggcgttggagaccagggccagccctggccacaccccaggctgtgtcaccttcgtcctgaatgaccacagcatggccttcactggagatgccctgttgatccgtgggtgtgggcggacagacttccagcaaggctgtgccaagaccttgtaccactcggtccatgaaaagatcttcacacttccaggagactgtctgatctaccctgctcacgattaccatgggttcacagtgtccaccgtggaggaggagaggactctgaaccctcggctcaccctcagctgtgaggagtttgtcaaaatcatgggcaacctgaacttgcctaaacctcagcagataggtgagcagctggggacctggacttctgggtctgagagaggaggggctggggtcttggactcctgggtctgagagaggaggggctgggggcctggactcctgggtctgagggaggaggggctgggggcctggactcctgggtctgagggaggagaggctgggggcctggactcctgggtctaagggaggaggggctgggggactggactcctgggtctgaggcagtaggggctgggggcctggactcctggctctgagggagtaggggctgggctgggggcctgggctcctgagtctgagggaggagg

SEQ ID NO: 130769 - DNA, 702 bp, Homo sapiens
  Payload ID: 5562
  Gene Symbol: ETHE1
  Gene Name: ethylmalonic encephalopathy 1
  ENST ID: ENST00000594342
  CDS Start-End: 29-316
gctcattcctgaccccgcagtgggcgcgatggcggaggctgtactgagggtcgcccggcggcagctgagccagcgcggcgggtctggagcccccatcctcctgcggcagatgttcgagcctgtgagctgcaccttcacgtacctgctgggtgacagagagtcccgggaggccgttctgatcgacccagtcctggaaacagcgcctcgggatgcccagctgatcaaggagctggggctgcggctgctctatgctggcgttggagaccagggccagccctggccacaccccaggctgtgtcaccttcgtcctgaatgaccacagcatggccttcactggagatgccctgttgatccgtgggtgtgggcggacagacttccagcaaggctgtgccaagaccttgtaccactcggtccatgaaaagatcttcacacttccaggagactgtctgatctaccctgctcacgattaccatgggttcacagtgtccaccgtggaggaggagaggactctgaaccctcggctcaccctcagctgtgaggagtttgtcaaaatcatgggcaacctgaacttgcctaaacctcagcagatagactttgctgttccagccaacatgcgctgtggggtgcagacacccactgcctgatctcacttctgtcagatgctcccatccactattaatgcactaggtgggaggagagggc

SEQ ID NO: 130770 - DNA, 909 bp, Homo sapiens
  Payload ID: 5563
  Gene Symbol: ECHDC1
  Gene Name: ethylmalonyl-CoA decarboxylase 1
  Uniprot ID: Q9NTX5
  ENST ID: ENST00000368289
  CDS Start-End: 65-502
aagtcaccaccgtggcctgcgacggaccctttccagctttttgcctgaaagctttgcagaagaaatggcgaaaagtcttttgaagacagcctctctgtctggaaggacaaaattgctacatcaaacaggattgtcactttatagtacatcccatggattttatgaggaagaagtgaaaaaaacacttcagcagtttcctggtggatccattgaccttcagaaggaagacaatggcattggcattcttactctgaacaatccaagtagaatgaatgccttttcaggtgttatgatgctacaacttctggaaaaagtaattgaattggaaaattggacagaggggaaaggcctcattgtccgtggggcaaaaaatactttctcttcaggatctgatctgaatgctgtgaaatcactaggaactccagagacttcctttaataagtgttgcgctggttcaaggttgggcattgggtggaggagcagaatttactacagcatgtgatttcaggttaatgactccagagagtaagatcagattcgtccacaaagagatgggcataataccaagctggggtggcaccacccggctagttgaaataatcggaagtagacaagctctcaaagtgttgagtggggcccttaaactggattcaaaaaatgctctaaacataggaatggttgaagaggtcttgcagtcttcagatgaaactaaatctctagaagaggcacaagaatggctaaagcaattcatccaagggccaccggaagtaattagagctttgaaaaaatctgtttgttcaggcagagagctatatttggaggaagcattacagaacgaaagagatcttttaggaacagtttggggtgggcctgcaaatttagaggctattgctaagaaaggaaaattta

SEQ ID NO: 130771 - DNA, 1354 bp, Homo sapiens
  Payload ID: 5563
  Gene Symbol: ECHDC1
  Gene Name: ethylmalonyl-CoA decarboxylase 1
  Uniprot ID: Q9NTX5
  ENST ID: ENST00000368291
  CDS Start-End: 267-704
ggagcgcgaagcggagggcgcctcgcggcaggagcgggatttccggggtcacgggaaccggcaggggaacgggataaagttcccggagaaaggaaaggagagcgtgggatagtaaaagagaagacgcggagaagaggagaggacctacaagaacggaggacaggggcgcacgatggtcccggggggagcggaaacaaaggcacgcaaaacggaaaagcgtgtgtaggggagcggaaaaggaagtcaccaccgtggcctgcgacgaaatggcgaaaagtcttttgaagacagcctctctgtctggaaggacaaaattgctacatcaaacaggattgtcactttatagtacatcccatggattttatgaggaagaagtgaaaaaaacacttcagcagtttcctggtggatccattgaccttcagaaggaagacaatggcattggcattcttactctgaacaatccaagtagaatgaatgccttttcaggtgttatgatgctacaacttctggaaaaagtaattgaattggaaaattggacagaggggaaaggcctcattgtccgtggggcaaaaaatactttctcttcaggatctgatctgaatgctgtgaaatcactaggaactccagagacttcctttaataagtgttgcgctggttcaaggttgggcattgggtggaggagcagaatttactacagcatgtgatttcaggttaatgactccagagagtaagatcagattcgtccacaaagagatgggcataataccaagctggggtggcaccacccggctagttgaaataatcggaagtagacaagctctcaaagtgttgagtggggcccttaaactggattcaaaaaatgctctaaacataggaatggttgaagaggtcttgcagtcttcagatgaaactaaatctctagaagaggcacaagaatggctaaagcaattcatccaagggccaccggaagtaattagagctttgaaaaaatctgtttgttcaggcagagagctatatttggaggaagcattacagaacgaaagagatcttttaggaacagtttggggtgggcctgcaaatttagaggctattgctaagaaaggaaaatttaataaataattggtttttcgtgtggatgtactccaagtaaagctccagtgactaatatgtataaatgttaaatgatattaaatatgaacatcagaattactttgaaggctactattaatatgcagacttacttttaatcatttgaatatctgaactcatttacctcatttcttgccaattactcacttgggtatttactgcgtaatctggaacatttagctaaaatatacacttttggcttaaa

SEQ ID NO: 130772 - DNA, 1966 bp, Homo sapiens
  Payload ID: 5563
  Gene Symbol: ECHDC1
  Gene Name: ethylmalonyl-CoA decarboxylase 1
  ENST ID: ENST00000368295
  CDS Start-End: 3-380
aaatggcgaaaagtcttttgaagacagcctctctgtctggaaggacaaaattgctacatcaaacaggattgtcactttatagtacatcccatggattttatgaggaagaagtgaaaaaaacacttcagcagtttcctggtggatccattgaccttcagaaggaagacaatggcattggcattcttactctgaacaatccaagtagaatgaatgccttttcaggtgttatgatgctacaacttctggaaaaagtaattgaattggaaaattggacagaggggaaaggcctcattgtccgtggggcaaaaaatactttctcttcaggatctgatctgaatgctgtgaaatcactaggaactccagaggcaaacttcctttaataagtgttgcgctggttcaaggttgggcattgggtggaggagcagaatttactacagcatgtgatttcaggttaatgactccagagagtaagatcagattcgtccacaaagagatgggcataataccaagctggggtggcaccacccggctagttgaaataatcggaagtagacaagctctcaaagtgttgagtggggcccttaaactggattcaaaaaatgctctaaacataggaatggttgaagaggtcttgcagtcttcagatgaaactaaatctctagaagaggcacaagaatggctaaagcaattcatccaagggccaccggaagtaattagagctttgaaaaaatctgtttgttcaggcagagagctatatttggaggaagcattacagaacgaaagagatcttttaggaacagtttggggtgggcctgcaaatttagaggctattgctaagaaaggaaaatttaataaataattggtttttcgtgtggatgtactccaagtaaagctccagtgactaatatgtataaatgttaaatgatattaaatatgaacatcagaattactttgaaggctactattaatatgcagacttacttttaatcatttgaatatctgaactcatttacctcatttcttgccaattactcacttgggtatttactgcgtaatctggaacatttagctaaaatatacacttttggcttaaaaattattgctgtcaattccaataataattcttagcttataaccaaagagcagtgtttaaaaggagagcttctatacaaaacctattcctggcgttacttttcatacaatttttgttctgttttacctggaaataatttaccaaaataactgagtgttgctgctaaagaacaaaagtggggaggtatcagggaacaagaaaacaagaaagggtatgatcaatcattttcttctgctccaaacagctggagtaaaattcatgggaaatggcccttcatttaaaaaaagatgtacctcactacccactacaaatttggaactttgttcttttcaataattagttttctattgtaaattacctactaaacagtggtagccatgacatggaaagtcaactgattctacaattggacattcatttgtgtgccctggaatttccaactagtaataaacaactactgttgatgtagttttaaaccacttgaagggactcatgaagcatcctgcaacataaatttgcatttttacatcagatttcttttttttcctgaaaaacaactaaccttctaacaactatctttcaaaagtaaatgtaataaaaatgcacaacataaaatgtttatgatcccagcaatacactttttaaaaaatgtgaaagtcaaagaattaagttctagttctgactcatcacaagaggtcaaaagtatttgctactgtaacattcaattcacatttgagaatcatggtaaaaataacttgcatttgccttaccatcatgatcctactgttgagttaggaaaatatggttagacagactcacattactttttttcagaggtaaactctagattactgtgtcaacccaatactattt

SEQ ID NO: 130773 - DNA, 767 bp, Homo sapiens
  Payload ID: 5563
  Gene Symbol: ECHDC1
  Gene Name: ethylmalonyl-CoA decarboxylase 1
  ENST ID: ENST00000417628
  CDS Start-End: 1-229
gatgctacaacttctggaaaaagtaattgaattggaaaattggacagaggggaaaggcctcattgtccgtggggcaaaaaatactttctcttcaggatctgatctgaatgctgtgaaatcactaggaactccagaggatggaatggccgtatgcatgttcatgcaaaacaccttaacaagatttatgagtagaatgtgtggtgaagtggtctgtatccagaggagatgagaaaaagaactatggattggaaagtttttacagctttctgaggaatatgaattgactttgcacctaggtaaagaagcaaagaggaaaaattcttcttggcctatcaagacttcctttaataagtgttgcgctggttcaaggttgggcattgggtggaggagcagaatttactacagcatgtgatttcaggttaatgactccagagagtaagatcagattcgtccacaaagagatgggcataataccaagctggggtggcaccacccggctagttgaaataatcggaagtagacaagctctcaaagtgttgagtggggcccttaaactggattcaaaaaatgctctaaacataggaatggttgaagaggtcttgcagtcttcagatgaaactaaatctctagaagaggcacaagaatggctaaagcaattcatccaagggccaccggaagtaattagagctttgaaaaaatctgtttgttcaggcagagagctatatttggaggaagcattacagaacgaaagagatcttttaggaaca

SEQ ID NO: 130774 - DNA, 766 bp, Homo sapiens
  Payload ID: 5563
  Gene Symbol: ECHDC1
  Gene Name: ethylmalonyl-CoA decarboxylase 1
  ENST ID: ENST00000436638
  CDS Start-End: 1-766
gtacatcccatggattttatgaggaagaagtgaaaaaaacacttcagcagtttcctggtggatccattgaccttcagaaggaagacaatggcattggcattcttactctgaacaatccaagtagaatgaatgccttttcaggtgttatgatgctacaacttctggaaaaagtaattgaattggaaaattggacagaggggaaaggcctcattgtccgtggggcaaaaaatactttctcttcaggatctgatctgaatgctgtgaaatcactaggaactccagaggaaagttgcagatggaatacagagttcctgtacaccctgcatccagtttccccttttattaacatcttatattcctatggatggaatggccgtatgcatgttcatgcaaaacaccttaacaagatttatgaggtaaagaagcaaagaggaaaaattcttcttggcctatcaagacttcctttaataagtgttgcgctggttcaaggttgggcattgggtggaggagcagaatttactacagcatgtgatttcaggttaatgactccagagagtaagatcagattcgtccacaaagagatgggcataataccaagctggggtggcaccacccggctagttgaaataatcggaagtagacaagctctcaaagtgttgagtggggcccttaaactggattcaaaaaatgctctaaacataggaatggttgaagaggtcttgcagtcttcagatgaaactaaatctctagaagaggcacaagaatg

SEQ ID NO: 130775 - DNA, 2341 bp, Homo sapiens
  Payload ID: 5563
  Gene Symbol: ECHDC1
  Gene Name: ethylmalonyl-CoA decarboxylase 1
  Uniprot ID: Q9NTX5
  ENST ID: ENST00000454859
  CDS Start-End: 277-1182
gtgacacgagggagcgcgaagcggagggcgcctcgcggcaggagcgggatttccggggtcacgggaaccggcaggggaacgggataaagttcccggagaaaggaaaggagagcgtgggatagtaaaagagaagacgcggagaagaggagaggacctacaagaacggaggacaggggcgcacgatggtcccggggggagcggaaacaaaggcacgcaaaacggaaaagcgtgtgtaggggagcggaaaaggaagtcaccaccgtggcctgcgacgaaatggcgaaaagtcttttgaagacagcctctctgtctggaaggacaaaattgctacatcaaacaggattgtcactttatagtacatcccatggattttatgaggaagaagtgaaaaaaacacttcagcagtttcctggtggatccattgaccttcagaaggaagacaatggcattggcattcttactctgaacaatccaagtagaatgaatgccttttcaggtgttatgatgctacaacttctggaaaaagtaattgaattggaaaattggacagaggggaaaggcctcattgtccgtggggcaaaaaatactttctcttcaggatctgatctgaatgctgtgaaatcactaggaactccagaggatggaatggccgtatgcatgttcatgcaaaacaccttaacaagatttatgagacttcctttaataagtgttgcgctggttcaaggttgggcattgggtggaggagcagaatttactacagcatgtgatttcaggttaatgactccagagagtaagatcagattcgtccacaaagagatgggcataataccaagctggggtggcaccacccggctagttgaaataatcggaagtagacaagctctcaaagtgttgagtggggcccttaaactggattcaaaaaatgctctaaacataggaatggttgaagaggtcttgcagtcttcagatgaaactaaatctctagaagaggcacaagaatggctaaagcaattcatccaagggccaccggaagtaattagagctttgaaaaaatctgtttgttcaggcagagagctatatttggaggaagcattacagaacgaaagagatcttttaggaacagtttggggtgggcctgcaaatttagaggctattgctaagaaaggaaaatttaataaataattggtttttcgtgtggatgtactccaagtaaagctccagtgactaatatgtataaatgttaaatgatattaaatatgaacatcagaattactttgaaggctactattaatatgcagacttacttttaatcatttgaatatctgaactcatttacctcatttcttgccaattactcacttgggtatttactgcgtaatctggaacatttagctaaaatatacacttttggcttaaaaattattgctgtcaattccaataataattcttagcttataaccaaagagcagtgtttaaaaggagagcttctatacaaaacctattcctggcgttacttttcatacaatttttgttctgttttacctggaaataatttaccaaaataactgagtgttgctgctaaagaacaaaagtggggaggtatcagggaacaagaaaacaagaaagggtatgatcaatcattttcttctgctccaaacagctggagtaaaattcatgggaaatggcccttcatttaaaaaaagatgtacctcactacccactacaaatttggaactttgttcttttcaataattagttttctattgtaaattacctactaaacagtggtagccatgacatggaaagtcaactgattctacaattggacattcatttgtgtgccctggaatttccaactagtaataaacaactactgttgatgtagttttaaaccacttgaagggactcatgaagcatcctgcaacataaatttgcatttttacatcagatttcttttttttcctgaaaaacaactaaccttctaacaactatctttcaaaagtaaatgtaataaaaatgcacaacataaaatgtttatgatcccagcaatacactttttaaaaaatgtgaaagtcaaagaattaagttctagttctgactcatcacaagaggtcaaaagtatttgctactgtaacattcaattcacatttgagaatcatggtaaaaataacttgcatttgccttaccatcatgatcctactgttgagttaggaaaatatggttagacagactcacattactttttttcagaggtaaactctagattactgtgtcaacccaatactatttggccatagatgtaaaaactaccaaataaaagtggattttgtggtctacaaca

SEQ ID NO: 130776 - DNA, 1009 bp, Homo sapiens
  Payload ID: 5563
  Gene Symbol: ECHDC1
  Gene Name: ethylmalonyl-CoA decarboxylase 1
  Uniprot ID: Q9NTX5
  ENST ID: ENST00000430841
  CDS Start-End: 104-1009
acgcaaaacggaaaagcgtgtgtaggggagcggaaaaggaagtcaccaccgtggcctgcgacggaccctttccagctttttgcctgaaagctttgcagaagaaatggcgaaaagtcttttgaagacagcctctctgtctggaaggacaaaattgctacatcaaacaggattgtcactttatagtacatcccatggattttatgaggaagaagtgaaaaaaacacttcagcagtttcctggtggatccattgaccttcagaaggaagacaatggcattggcattcttactctgaacaatccaagtagaatgaatgccttttcaggtgttatgatgctacaacttctggaaaaagtaattgaattggaaaattggacagaggggaaaggcctcattgtccgtggggcaaaaaatactttctcttcaggatctgatctgaatgctgtgaaatcactaggaactccagaggatggaatggccgtatgcatgttcatgcaaaacaccttaacaagatttatgagacttcctttaataagtgttgcgctggttcaaggttgggcattgggtggaggagcagaatttactacagcatgtgatttcaggttaatgactccagagagtaagatcagattcgtccacaaagagatgggcataataccaagctggggtggcaccacccggctagttgaaataatcggaagtagacaagctctcaaagtgttgagtggggcccttaaactggattcaaaaaatgctctaaacataggaatggttgaagaggtcttgcagtcttcagatgaaactaaatctctagaagaggcacaagaatggctaaagcaattcatccaagggccaccggaagtaattagagctttgaaaaaatctgtttgttcaggcagagagctatatttggaggaagcattacagaacgaaagagatcttttaggaacagtttggggtgggcctgcaaatttagaggctattgctaagaaaggaaaatttaataaataa

SEQ ID NO: 130777 - DNA, 1515 bp, Homo sapiens
  Payload ID: 5563
  Gene Symbol: ECHDC1
  Gene Name: ethylmalonyl-CoA decarboxylase 1
  Uniprot ID: Q9NTX5
  ENST ID: ENST00000454591
  CDS Start-End: 233-913
gatttccggggtcacgggaaccggcaggggaacgggataaagttcccggagaaaggaaaggagagcgtgggatagtaaaagagaagacgcggagaagaggagaggacctacaagaacggaggacaggggcgcacgatggtcccggggggagcggaaacaaaggcacgcaaaacggaaaagcgtgtgtaggggagcggaaaaggaagtcaccaccgtggcctgcgacggtgttatgatgctacaacttctggaaaaagtaattgaattggaaaattggacagaggggaaaggcctcattgtccgtggggcaaaaaatactttctcttcaggatctgatctgaatgctgtgaaatcactaggaactccagaggatggaatggccgtatgcatgttcatgcaaaacaccttaacaagatttatgagacttcctttaataagtgttgcgctggttcaaggttgggcattgggtggaggagcagaatttactacagcatgtgatttcaggttaatgactccagagagtaagatcagattcgtccacaaagagatgggcataataccaagctggggtggcaccacccggctagttgaaataatcggaagtagacaagctctcaaagtgttgagtggggcccttaaactggattcaaaaaatgctctaaacataggaatggttgaagaggtcttgcagtcttcagatgaaactaaatctctagaagaggcacaagaatggctaaagcaattcatccaagggccaccggaagtaattagagctttgaaaaaatctgtttgttcaggcagagagctatatttggaggaagcattacagaacgaaagagatcttttaggaacagtttggggtgggcctgcaaatttagaggctattgctaagaaaggaaaatttaataaataattggtttttcgtgtggatgtactccaagtaaagctccagtgactaatatgtataaatgttaaatgatattaaatatgaacatcagaattactttgaaggctactattaatatgcagacttacttttaatcatttgaatatctgaactcatttacctcatttcttgccaattactcacttgggtatttactgcgtaatctggaacatttagctaaaatatacacttttggcttaaaaattattgctgtcaattccaataataattcttagcttataaccaaagagcagtgtttaaaaggagagcttctatacaaaacctattcctggcgttacttttcatacaatttttgttctgttttacctggaaataatttaccaaaataactgagtgttgctgctaaagaacaaaagtggggaggtatcagggaacaagaaaacaagaaagggtatgatcaatcattttcttctgctccaaacagctggagtaaaattcatgggaaatggcccttcatttaaaaaaagatgtacctcactacccactacaaatttggaactttgttcttttcaataattagttttctattgtaaattacctactaaaca

SEQ ID NO: 130778 - DNA, 1368 bp, Homo sapiens
  Payload ID: 5563
  Gene Symbol: ECHDC1
  Gene Name: ethylmalonyl-CoA decarboxylase 1
  ENST ID: ENST00000479525
  CDS Start-End: 275-652
gacacgagggagcgcgaagcggagggcgcctcgcggcaggagcgggatttccggggtcacgggaaccggcaggggaacgggataaagttcccggagaaaggaaaggagagcgtgggatagtaaaagagaagacgcggagaagaggagaggacctacaagaacggaggacaggggcgcacgatggtcccggggggagcggaaacaaaggcacgcaaaacggaaaagcgtgtgtaggggagcggaaaaggaagtcaccaccgtggcctgcgacgaaatggcgaaaagtcttttgaagacagcctctctgtctggaaggacaaaattgctacatcaaacaggattgtcactttatagtacatcccatggattttatgaggaagaagtgaaaaaaacacttcagcagtttcctggtggatccattgaccttcagaaggaagacaatggcattggcattcttactctgaacaatccaagtagaatgaatgccttttcaggtgttatgatgctacaacttctggaaaaagtaattgaattggaaaattggacagaggggaaaggcctcattgtccgtggggcaaaaaatactttctcttcaggatctgatctgaatgctgtgaaatcactaggaactccagagggagacttcctttaataagtgttgcgctggttcaaggttgggcattgggtggaggagcagaatttactacagcatgtgatttcaggttaatgactccagagagtaagatcagattcgtccacaaagagatgggcataataccaagctggggtggcaccacccggctagttgaaataatcggaagtagacaagctctcaaagtgttgagtggggcccttaaactggattcaaaaaatgctctaaacataggaatggttgaagaggtcttgcagtcttcagatgaaactaaatctctagaagaggcacaagaatggctaaagcaattcatccaagggccaccggaagtaattagagctttgaaaaaatctgtttgttcaggcagagagctatatttggaggaagcattacagaacgaaagagatcttttaggaacagtttggggtgggcctgcaaatttagaggctattgctaagaaaggaaaatttaataaataattggtttttcgtgtggatgtactccaagtaaagctccagtgactaatatgtataaatgttaaatgatattaaatatgaacatcagaattactttgaaggctactattaatatgcagacttacttttaatcatttgaatatctgaactcatttacctcatttcttgccaattactcacttgggtatttactgcgtaatctggaacatttagctaaaatatacacttttggcttaaaaa

SEQ ID NO: 130779 - DNA, 301 bp, Homo sapiens
  Payload ID: 5563
  Gene Symbol: ECHDC1
  Gene Name: ethylmalonyl-CoA decarboxylase 1
  ENST ID: ENST00000460558
  CDS Start-End: 1-301
gaactccagaggtaaagaagcaaagaggaaaaattcttcttggcctatcaagacttcctttaataagtgttgcgctggttcaaggttgggcattgggtggaggagcagaatttactacagcatgtgatttcaggttaatgactccagagagtaagatcagattcgtccacaaagagatgggcataataccaagctggggtggcaccacccggctagttgaaataatcggaagtagacaagctctcaaagtgttgagtggggcccttaaactggattcaaaaaatgctctaaacataggaat

SEQ ID NO: 130780 - DNA, 617 bp, Homo sapiens
  Payload ID: 5563
  Gene Symbol: ECHDC1
  Gene Name: ethylmalonyl-CoA decarboxylase 1
  ENST ID: ENST00000461239
  CDS Start-End: 1-104
gatttatgagacttcctttaataagtgttgcgctggttcaaggttgggcattgggtggaggagcagaatttactacagcatgtgatttcagtttcagacactgaagagaaagtgattctgcgctggcatgtagtgctctacatatttcaaaacatcatgttgtacatttaaaaacttttaagcctggcgtggtggctcatgcctgttatcccagcattttggggggctgaaataggcagatcacctgaggtcaggagtttgagaccagcctggccaacatggtgaaaccctatctctactcaaaatacaaaaattagccaggtgtggtggcacatgcctgtagtcctacaacttgggagtctgaggtggaaggattgcttgaacctgggaggtggaggttacagtgagccaagatcacaccattgcactccagcctgggcaacagagtgagactctgtctcaaataaataaataaataaataaatttgttgagctacaaattatatacaataaaatgaatccattttaattgtatgctgtaaatggattttgatgaatatatacacccatgtaaccacctccacaatcaagattgagaacatttttatcacccctat

SEQ ID NO: 130781 - DNA, 534 bp, Homo sapiens
  Payload ID: 5563
  Gene Symbol: ECHDC1
  Gene Name: ethylmalonyl-CoA decarboxylase 1
  ENST ID: ENST00000526299
  CDS Start-End: 27-278
aagtcaccaccgtggcctgcgacgaaatggcgaaaagtcttttgaagacagcctctctgtctggaaggacaaaattgctacatcaaacaggattgtcactttatagtacatcccatggattttatgaggaagaagtgaaaaaaacacttcagcagtttcctggtggatccattgaccttcagaaggaagacaatggcattggcattcttactctgaacaatccaagtagaatgaatgccttttcagaattcagagagatttctctataccagtgctgaccaatgaaaacataatgtaagaaacaaaggtgttatgatgctacaacttctggaaaaagtaattgaattggaaaattggacagaggggaaaggcctcattgtccgtggggcaaaaaatactttctcttcaggatctgatctgaatgctgtgaaatcactaggaactccagaggatggaatggccgtatgcatgttcatgcaaaacaccttaacaagatttatgagacttcctttaataagtgttgcgctggttcaa

SEQ ID NO: 130782 - DNA, 531 bp, Homo sapiens
  Payload ID: 5563
  Gene Symbol: ECHDC1
  Gene Name: ethylmalonyl-CoA decarboxylase 1
  ENST ID: ENST00000531582
  CDS Start-End: 125-531
aacattccaggaagggaagccagcctgtgaagaagcatggcattgaaacaggtggcttggtagtgagcttgttcagctccactgaatcttctttgtggtggggctgcaagacatcctgcatgaaatggcgaaaagtcttttgaagacagcctctctgtctggaaggacaaaattgctacatcaaacaggattgtcactttatagtacatcccatggattttatgaggaagaagtgaaaaaaacacttcagcagtttcctggtggatccattgaccttcagaaggaagacaatggcattggcattcttactctgaacaatccaagtagaatgaatgccttttcaggtgttatgatgctacaacttctggaaaaagtaattgaattggaaaattggacagaggggaaaggcctcattgtccgtggggcaaaaaatactttctcttcaggatctgatctgaatgctgtgaaatcactaggaactccagaggatggaatggccgtatgcatgttcatgcaaaacaccttaacaag

SEQ ID NO: 130783 - DNA, 2443 bp, Homo sapiens
  Payload ID: 5563
  Gene Symbol: ECHDC1
  Gene Name: ethylmalonyl-CoA decarboxylase 1
  Uniprot ID: Q9NTX5
  ENST ID: ENST00000474289
  CDS Start-End: 389-1294
ggcctgcgacggtaagtggtcgtaagggttggtcttagcgcttcagtttagtgttgtcagtgggagaatcctaaaatgtcgccgtggaatggactgtaccgctcgcttctccaaacgtgtcccagacggcgagcctccccggctccgcggcttgtcccttgcaagcgccgcgcaggcctgccccgcgctggacgtggagacgcggtgccgagcgccacgggccggctgtgcgccggccggggaaagagggcgaggggaagagatgaatcggtcttcccagagcgcgccgcgaggtcgcgagattacactttaaaaagcatgaggaggcttgctttctacatgctgatttaatttcggaatacattcgaggccctgtgctaagttagaaatggcgaaaagtcttttgaagacagcctctctgtctggaaggacaaaattgctacatcaaacaggattgtcactttatagtacatcccatggattttatgaggaagaagtgaaaaaaacacttcagcagtttcctggtggatccattgaccttcagaaggaagacaatggcattggcattcttactctgaacaatccaagtagaatgaatgccttttcaggtgttatgatgctacaacttctggaaaaagtaattgaattggaaaattggacagaggggaaaggcctcattgtccgtggggcaaaaaatactttctcttcaggatctgatctgaatgctgtgaaatcactaggaactccagaggatggaatggccgtatgcatgttcatgcaaaacaccttaacaagatttatgagacttcctttaataagtgttgcgctggttcaaggttgggcattgggtggaggagcagaatttactacagcatgtgatttcaggttaatgactccagagagtaagatcagattcgtccacaaagagatgggcataataccaagctggggtggcaccacccggctagttgaaataatcggaagtagacaagctctcaaagtgttgagtggggcccttaaactggattcaaaaaatgctctaaacataggaatggttgaagaggtcttgcagtcttcagatgaaactaaatctctagaagaggcacaagaatggctaaagcaattcatccaagggccaccggaagtaattagagctttgaaaaaatctgtttgttcaggcagagagctatatttggaggaagcattacagaacgaaagagatcttttaggaacagtttggggtgggcctgcaaatttagaggctattgctaagaaaggaaaatttaataaataattggtttttcgtgtggatgtactccaagtaaagctccagtgactaatatgtataaatgttaaatgatattaaatatgaacatcagaattactttgaaggctactattaatatgcagacttacttttaatcatttgaatatctgaactcatttacctcatttcttgccaattactcacttgggtatttactgcgtaatctggaacatttagctaaaatatacacttttggcttaaaaattattgctgtcaattccaataataattcttagcttataaccaaagagcagtgtttaaaaggagagcttctatacaaaacctattcctggcgttacttttcatacaatttttgttctgttttacctggaaataatttaccaaaataactgagtgttgctgctaaagaacaaaagtggggaggtatcagggaacaagaaaacaagaaagggtatgatcaatcattttcttctgctccaaacagctggagtaaaattcatgggaaatggcccttcatttaaaaaaagatgtacctcactacccactacaaatttggaactttgttcttttcaataattagttttctattgtaaattacctactaaacagtggtagccatgacatggaaagtcaactgattctacaattggacattcatttgtgtgccctggaatttccaactagtaataaacaactactgttgatgtagttttaaaccacttgaagggactcatgaagcatcctgcaacataaatttgcatttttacatcagatttcttttttttcctgaaaaacaactaaccttctaacaactatctttcaaaagtaaatgtaataaaaatgcacaacataaaatgtttatgatcccagcaatacactttttaaaaaatgtgaaagtcaaagaattaagttctagttctgactcatcacaagaggtcaaaagtatttgctactgtaacattcaattcacatttgagaatcatggtaaaaataacttgcatttgccttaccatcatgatcctactgttgagttaggaaaatatggttagacagactcacattactttttttcagaggtaaactctagattactgtgtcaacccaatactatttggccatagatgtaaaaactaccaaataaaagtggattttgtg

SEQ ID NO: 130784 - DNA, 601 bp, Homo sapiens
  Payload ID: 5563
  Gene Symbol: ECHDC1
  Gene Name: ethylmalonyl-CoA decarboxylase 1
  ENST ID: ENST00000525745
  CDS Start-End: 65-601
aagtcaccaccgtggcctgcgacggaccctttccagctttttgcctgaaagctttgcagaagaaatggcgaaaagtcttttgaagacagcctctctgtctggaaggacaaaattgctacatcaaacaggattgtcactttatagtacatcccatggattttatgaggaagaagtgaaaaaaacacttcagcagtttcctggtggatccattgaccttcagaaggaagacaatggcattggcattcttactctgaacaatccaagtagaatgaatgccttttcaggtgttatgatgctacaacttctggaaaaagtaattgaattggaaaattggacagaggggaaaggcctcattgtccgtggggcaaaaaatactttctcttcaggatctgatctgaatgctgtgaaatcactaggaactccagaggaaagttgcagatggaatacagagttcctgtacaccctgcatccagtttccccttttattaacatcttatattcctatggatggaatggccgtatgcatgttcatgcaaaacaccttaacaagatttatgagacttcctttaataagtgttgcgctggttcaaggttgggcatt

SEQ ID NO: 130785 - DNA, 577 bp, Homo sapiens
  Payload ID: 5563
  Gene Symbol: ECHDC1
  Gene Name: ethylmalonyl-CoA decarboxylase 1
  ENST ID: ENST00000534442
  CDS Start-End: 124-577
gtggcctgcgacgtggcttggtagtgagcttgttcagctccactgaatcttctttgtggtggggctgcaagacatcctgcatggaccctttccagctttttgcctgaaagctttgcagaagaaatggcgaaaagtcttttgaagacagcctctctgtctggaaggacaaaattgctacatcaaacaggattgtcactttatagtacatcccatggattttatgaggaagaagtgaaaaaaacacttcagcagtttcctggtggatccattgaccttcagaaggaagacaatggcattggcattcttactctgaacaatccaagtagaatgaatgccttttcaggtgttatgatgctacaacttctggaaaaagtaattgaattggaaaattggacagaggggaaaggcctcattgtccgtggggcaaaaaatactttctcttcaggatctgatctgaatgctgtgaaatcactaggaactccagaggatggaatggccgtatgcatgttcatgcaaaacaccttaacaagatttatgagacttcctttaataagtgttgcgctggttcaaggttggg

SEQ ID NO: 130786 - DNA, 1449 bp, Homo sapiens
  Payload ID: 5563
  Gene Symbol: ECHDC1
  Gene Name: ethylmalonyl-CoA decarboxylase 1
  Uniprot ID: Q9NTX5
  ENST ID: ENST00000528402
  CDS Start-End: 220-432
acgggaaccggcaggggaacgggataaagttcccggagaaaggaaaggagagcgtgggatagtaaaagagaagacgcggagaagaggagaggacctacaagaacggaggacaggggcgcacgatggtcccggggggagcggaaacaaaggcacgcaaaacggaaaagcgtgtgtaggggagcggaaaaggaagtcaccaccgtggcctgcgacggtgttatgatgctacaacttctggaaaaagtaattgaattggaaaattggacagaggggaaaggcctcattgtccgtggggcaaaaaatactttctcttcaggatctgatctgaatgctgtgaaatcactaggaactccagagacttcctttaataagtgttgcgctggttcaaggttgggcattgggtggaggagcagaatttactacagcatgtgatttcaggttaatgactccagagagtaagatcagattcgtccacaaagagatgggcataataccaagctggggtggcaccacccggctagttgaaataatcggaagtagacaagctctcaaagtgttgagtggggcccttaaactggattcaaaaaatgctctaaacataggaatggttgaagaggtcttgcagtcttcagatgaaactaaatctctagaagaggcacaagaatggctaaagcaattcatccaagggccaccggaagtaattagagctttgaaaaaatctgtttgttcaggcagagagctatatttggaggaagcattacagaacgaaagagatcttttaggaacagtttggggtgggcctgcaaatttagaggctattgctaagaaaggaaaatttaataaataattggtttttcgtgtggatgtactccaagtaaagctccagtgactaatatgtataaatgttaaatgatattaaatatgaacatcagaattactttgaaggctactattaatatgcagacttacttttaatcatttgaatatctgaactcatttacctcatttcttgccaattactcacttgggtatttactgcgtaatctggaacatttagctaaaatatacacttttggcttaaaaattattgctgtcaattccaataataattcttagcttataaccaaagagcagtgtttaaaaggagagcttctatacaaaacctattcctggcgttacttttcatacaatttttgttctgttttacctggaaataatttaccaaaataactgagtgttgctgctaaagaacaaaagtggggaggtatcagggaacaagaaaacaagaaagggtatgatcaatcattttcttctgctccaaacagctggagtaaaattcatgggaaatggcccttcatttaaaaaaagatgtacctcactacccactacaaatttggaactttgttcttttcaataattagttttctattgtaaattacctactaaaca

SEQ ID NO: 130787 - DNA, 2585 bp, Homo sapiens
  Payload ID: 5563
  Gene Symbol: ECHDC1
  Gene Name: ethylmalonyl-CoA decarboxylase 1
  Uniprot ID: Q9NTX5
  ENST ID: ENST00000531967
  CDS Start-End: 505-1428
caagaacgaaagatgagcaactcctttctggtagaggttctttcattggagaatttttgagctacaataatccttttaacgctgcgcacacatacagggattacacgtgtaggggattaaaaacacagttaagtttaggttgaaggtgctgttaaggacttcaggcaacattaaatcaacactcagttctttgctctgttccacatctgggctcctgtatagcagttgttgctctaggtgctagaggtatgcagaggaactggacaagggcaaggaaaacaaagggctccttctttagaagagctagcattctcttggaacagacaagcttgtggtgagaagtatatttgtgaaatctacgaggggagggagcagcgcagtaatagaacgggcgatcctttcttgattttttattgggttctggcctgaaaggcgactgtataatcagctgggattcctgcaatgattaacattccaggaagggaagccagcctgtgaagaagcatggcattgaaacaggaaatggcgaaaagtcttttgaagacagcctctctgtctggaaggacaaaattgctacatcaaacaggattgtcactttatagtacatcccatggattttatgaggaagaagtgaaaaaaacacttcagcagtttcctggtggatccattgaccttcagaaggaagacaatggcattggcattcttactctgaacaatccaagtagaatgaatgccttttcaggtgttatgatgctacaacttctggaaaaagtaattgaattggaaaattggacagaggggaaaggcctcattgtccgtggggcaaaaaatactttctcttcaggatctgatctgaatgctgtgaaatcactaggaactccagaggatggaatggccgtatgcatgttcatgcaaaacaccttaacaagatttatgagacttcctttaataagtgttgcgctggttcaaggttgggcattgggtggaggagcagaatttactacagcatgtgatttcaggttaatgactccagagagtaagatcagattcgtccacaaagagatgggcataataccaagctggggtggcaccacccggctagttgaaataatcggaagtagacaagctctcaaagtgttgagtggggcccttaaactggattcaaaaaatgctctaaacataggaatggttgaagaggtcttgcagtcttcagatgaaactaaatctctagaagaggcacaagaatggctaaagcaattcatccaagggccaccggaagtaattagagctttgaaaaaatctgtttgttcaggcagagagctatatttggaggaagcattacagaacgaaagagatcttttaggaacagtttggggtgggcctgcaaatttagaggctattgctaagaaaggaaaatttaataaataattggtttttcgtgtggatgtactccaagtaaagctccagtgactaatatgtataaatgttaaatgatattaaatatgaacatcagaattactttgaaggctactattaatatgcagacttacttttaatcatttgaatatctgaactcatttacctcatttcttgccaattactcacttgggtatttactgcgtaatctggaacatttagctaaaatatacacttttggcttaaaaattattgctgtcaattccaataataattcttagcttataaccaaagagcagtgtttaaaaggagagcttctatacaaaacctattcctggcgttacttttcatacaatttttgttctgttttacctggaaataatttaccaaaataactgagtgttgctgctaaagaacaaaagtggggaggtatcagggaacaagaaaacaagaaagggtatgatcaatcattttcttctgctccaaacagctggagtaaaattcatgggaaatggcccttcatttaaaaaaagatgtacctcactacccactacaaatttggaactttgttcttttcaataattagttttctattgtaaattacctactaaacagtggtagccatgacatggaaagtcaactgattctacaattggacattcatttgtgtgccctggaatttccaactagtaataaacaactactgttgatgtagttttaaaccacttgaagggactcatgaagcatcctgcaacataaatttgcatttttacatcagatttcttttttttcctgaaaaacaactaaccttctaacaactatctttcaaaagtaaatgtaataaaaatgcacaacataaaatgtttatgatcccagcaatacactttttaaaaaatgtgaaagtcaaagaattaagttctagttctgactcatcacaagaggtcaaaagtatttgctactgtaacattcaattcacatttgagaatcatggtaaaaataacttgcatttgccttaccatcatgatcctactgttgagttaggaaaatatggttagacagactcacattactttttttcagaggtaaactctagattactgtgtcaacccaatactatttggccatagatgtaaaaactaccaaataaaagtggattttgtggtctacaa

SEQ ID NO: 130788 - DNA, 854 bp, Homo sapiens
  Payload ID: 5563
  Gene Symbol: ECHDC1
  Gene Name: ethylmalonyl-CoA decarboxylase 1
  ENST ID: ENST00000368292
  CDS Start-End: 27-446
aagtcaccaccgtggcctgcgacgaaatggcgaaaagtcttttgaagacagcctctctgtctggaaggacaaaattgctacatcaaacaggattgtcactttatagtacatcccatggattttatgaggaagaagtgaaaaaaacacttcagcagtttcctggtggatccattgaccttcagaaggaagacaatggcattggcattcttactctgaacaatccaagtagaatgaatgccttttcaggtgttatgatgctacaacttctggaaaaagtaattgaattggaaaattggacagaggggaaaggcctcattgtccgtggggcaaaaaatactttctcttcaggatctgatctgaatgctgtgaaatcactaggaactccagaggatggaatggccgtatgcatgttcatgcaaaacaccttaacaagatttatgaggtaaagaagcaaagaggaaaaattcttcttggcctatcaagacttcctttaataagtgttgcgctggttcaaggttgggcattgggtggaggagcagaatttactacagcatgtgatttcaggttaatgactccagagagtaagatcagattcgtccacaaagagatgggcataataccaagctggggtggcaccacccggctagttgaaataatcggaagtagacaagctctcaaagtgttgagtggggcccttaaactggattcaaaaaatgctctaaacataggaatggttgaagaggtcttgcagtcttcagatgaaactaaatctctagaagaggcacaagaatggctaaagcaattcatccaagggccaccggaagtaattagagctttgaaaaaatctgtttgtt

SEQ ID NO: 130789 - DNA, 2455 bp, Homo sapiens
  Payload ID: 5564
  Gene Symbol: EI24
  Gene Name: etoposide induced 2.4
  Uniprot ID: O14681
  ENST ID: ENST00000278903
  CDS Start-End: 429-1451
atctgtgagaacgggatcggcgaggaggcgacggggaggaggcgacgcggaggggtgaggggtcctctccgccgccaggcggagttgggagccggacgatcccgcacgcagcgcgaggcgggaccccggactgactacatttcccagtctccgtcgctccgcgcggcccaccccttcggctctgggccccgcctcgtggtgccggctggttcttcgcgctcgcccgacttcccagcggccccgtgcggcccgggcatgcccagtgcgggcgcagcggccccggccctggaagcgccccggcggagctggcctgcggtgggctaggggcagggccggagccgcggcggcggagctgtggatccttcatgatgagagatttggggacacttctctctcctgtgtgtagttgatagtttggtggtgaagagatggctgacagtgtcaaaacctttctccaggaccttgccagaggaatcaaagactccatctggggtatttgtaccatctcaaagctagatgctcgaatccagcaaaagagagaggagcagcgtcgaagaagggcaagtagtgtcttggcacagagaagagcccagagtatagagcggaagcaagagagtgagccacgtattgttagtagaattttccagtgttgtgcttggaatggtggagtgttctggttcagtctcctcttgttttatcgagtatttattcctgtgcttcagtcggtaacagcccgaattatcggtgacccatcactacatggagatgtttggtcgtggctggaattcttcctcacgtcaattttcagtgctctttgggtgctccccttgtttgtgcttagcaaagtggtgaatgccatttggtttcaggatatagctgacctggcatttgaggtatcagggaggaagcctcacccattccctagtgtcagcaaaataattgctgacatgctcttcaaccttttgctgcaggctcttttcctcattcagggaatgtttgtgagtctctttcccatccatcttgtcggtcagctggttagtctcctgcatatgtcccttctctactcactgtactgctttgaatatcgttggttcaataaaggaattgaaatgcaccagcggttgtctaacatagaaaggaattggccttactactttgggtttggtttgcccttggcttttctcacagcaatgcagtcctcatatattatcagtggctgccttttctctatcctctttcctttattcattatcagcgccaatgaagcaaagacccctggcaaagcatatctcttccagttgcgcctcttctccttggtggtcttcttaagcaacagactcttccacaagacagtctacctgcagtcggccctgagcagctctacttctgcagagaagttcccttcaccgcatccgtcgcctgccaaactgaaggctactgcaggtcactgagttgcctgccatccaaaggggatgggcgggattggaagaagctgtggcagctcttttccctgttcacctcccgcctgccagggaaggcaggacccgctctgccaagggccctctgcgtattcccttctctctgaggaattgaaatttttgtctctggtgcacgtaaggcagaatgttccctgacaccagtgtgtggatttttaacatcaccgtgagtctgaaaggaccacaggtttttctgcagctattttctagcatttgccagtccctgtgcctggactgattggaacactttgtttttctccctgtgccatttacccttccacctttccatcctgccttctaccacccttggatgaatggattttgtaattctagctgttgtattttgtgaatttgttaattttgttgtttttctgtgaaacacatacattggatatgggaggtaaaggagtgtcccagttgctcctggtcactccctttatagccattactgtcttgtttcttgtaactcaggttaggttttggtctctcttgctccactgcaaaaaaaaaaaaaaaaaaaaaaaaaaaaaaaaagcctgaagagatgagataggaggaaagacctcacagccagatctgctgggttttgaggagtgattttctttcttccccttgaaggggaaaaagctattttcattggtacatttaaagtcccccaactatggggaggtaccaattctggacaagtgccactacaacaacactaaacctgaacttttcaactccgttggtggtgggaggcagcgggcagaaatttactgttggccactgccaggtctatttcatatttcaaaggaatattgggtgctgcatataggaactgaaggggtcaatgtattaaacctgtgattggttgttttcctgtcattttgagagactaaatgtggggggcagatgtcaaaatacctgtacaattttaaaatgtcacaattaaacatgagctggtttcccacaaagtg

SEQ ID NO: 130790 - DNA, 1625 bp, Homo sapiens
  Payload ID: 5564
  Gene Symbol: EI24
  Gene Name: etoposide induced 2.4
  ENST ID: ENST00000527235
  CDS Start-End: 156-944
gcggccccggccctggaagcgccccggcggagctggcctgcggtgggctaggggcagggccggagccgcggcggcggagctgtggatccttcatgatgagagatttggggacacttctctctcctgtgtgtagttgatagtttggtggtgaagagatggctgacagtgtcaaaacctttctccaggaccttgccagaggaatcaaagactccatctggggtatttgtaccatctcaaagctagatgctcgaatccagcaaaagagagaggagcagcgtcgaagaagggcaagtagtgtcttggcacagagaagagcccagagtatagagcggaagcaagagagtgagccacgtattgttagtagaattttccagtgttgtgcttggaatggtggagtgttctggttcagtctcctcttgttttatcgagtatttattcctgtgcttcagtcggtaacagcccgaattatcggtgacccatcactacatggagatgtttggtcgtggctggaattcttcctcacgtcaattttcagtgctctttgggtgctccccttgtttgtgcttagcaaagtggtgaatgccatttggtttcaggatatagctgacctggcatttgaggtatcagggaggaagcctcacccattccctagtgtcagcaaaataattgctgacatgctcttcaaccttttgctgcaggctcttttcctcattcagggaatgtttgtgagtctctttcccatccatcttgtcggtcagctggttagtctcctgcatatgtcccttctctactcactgtactgctttgaatatcgttggttcaataaagtggctgccttttctctatcctctttcctttattcattatcagcgccaatgaagcaaagacccctggcaaagcatatctcttccagttgcgcctcttctccttggtggtcttcttaagcaacagactcttccacaagacagtctacctgcagtcggccctgagcagctctacttctgcagagaagttcccttcaccgcatccgtcgcctgccaaactgaaggctactgcaggtcactgagttgcctgccatccaaaggggatgggcgggattggaagaagctgtggcagctcttttccctgttcacctcccgcctgccagggaaggcaggacccgctctgccaagggccctctgcgtattcccttctctctgaggaattgaaatttttgtctctggtgcacgtaaggcagaatgttccctgacaccagtgtgtggatttttaacatcaccgtgagtctgaaaggaccacaggtttttctgcagctattttctagcatttgccagtccctgtgcctggactgattggaacactttgtttttctccctgtgccatttacccttccacctttccatcctgccttctaccacccttggatgaatggattttgtaattctagctgttgtattttgtgaatttgttaattttgttgtttttctgtgaaacacatacattggatatgggaggtaaaggagtgtcccagttgctcctggtcactccctttatagccattactgtcttgtttcttgtaactcaggttaggttttggtctctcttgctccactgcaaaaaaaaaaaaa

SEQ ID NO: 130791 - DNA, 534 bp, Homo sapiens
  Payload ID: 5564
  Gene Symbol: EI24
  Gene Name: etoposide induced 2.4
  ENST ID: ENST00000527131
  CDS Start-End: 160-534
agttttctgccgaattgcctaggagctgtggggagatgggcctgaatggacccgtggactcagaggcagcccgtggagccccgtgggaaatccttcatgatgagagatttggggacacttctctctcctgtgtgtagttgatagtttggtggtgaagagatggctgacagtgtcaaaacctttctccaggaccttgccagaggaatcaaagactccatctggggtatttgtaccatctcaaagctagatgctcgaatccagcaaaagagagaggagcagcgtcgaagaagggcaagtagtgtcttggcacagagaagagcccagagtatagagcggaagcaagagagtgagccacgtattgttagtagaattttccagtgttgtgcttggaatggtggagtgttctggttcagtctcctcttgttttatcgagtatttattcctgtgcttcagtcggtaacagcccgaattatcggtgacccatcactacatggagatgtttggtcgtggctggaattcttcctcacgtcaatt

SEQ ID NO: 130792 - DNA, 815 bp, Homo sapiens
  Payload ID: 5564
  Gene Symbol: EI24
  Gene Name: etoposide induced 2.4
  ENST ID: ENST00000527842
  CDS Start-End: 255-815
agtgcgggcgcagcggccccggccctggaagcgccccggcggagctggcctgcggtgggctaggggcagggccggagccgcggcggcggagctgtgggtttgagaggttatttgtccatgggatgctcgtgttaaaacaaaaatcttcattgcaaagcttaagtaaaaacaagtctcgaccgagatccttcatgatgagagatttggggacacttctctctcctgtgtgtagttgatagtttggtggtgaagagatggctgacagtgtcaaaacctttctccaggaccttgccagaggaatcaaagactccatctggggtatttgtaccatctcaaagctagatgctcgaatccagcaaaagagagaggagcagcgtcgaagaagggcaagtagtgtcttggcacagagaagagcccagagtatagagcggaagcaagagagtgagccacgtattgttagtagaattttccagtgttgtgcttggaatggtggagtgttctggttcagtctcctcttgttttatcgagtatttattcctgtgcttcagtcggtaacagcccgaattatcggtgacccatcactacatggagatgtttggtcgtggctggaattcttcctcacgtcaattttcagtgctctttgggtgctccccttgtttgtgcttagcaaagtggtgaatgccatttggtttcaggatatagctgacctggcatttgaggtatcagggaggaagcctcacccattccctagtgtcagcaaaataattgctgacatgctcttcaaccttttgctgcaggctcttttcctcattcag

SEQ ID NO: 130793 - DNA, 452 bp, Homo sapiens
  Payload ID: 5564
  Gene Symbol: EI24
  Gene Name: etoposide induced 2.4
  ENST ID: ENST00000527520
  CDS Start-End: 179-452
agttgtgcctagggagaccagttttctgccgaattgcctaggagctgtggggagatgggcctgaatggacccgtggactcagaggcagcccgtggagccccgtgggaaatccttcatgatgagagatttggggacacttctctctcctgtgtgtagttgatagtttggtggtgaagagatggctgacagtgtcaaaacctttctccaggaccttgccagactagatgctcgaatccagcaaaagagagaggagcagcgtcgaagaagggcaagtagtgtcttggcacagagaagagcccagagtatagagcggaagcaagagagtgagccacgtattgttagtagaattttccagtgttgtgcttggaatggtggagtgttctggttcagtctcctcttgttttatcgagtatttattcctgtgcttcagtcggtaacagcccgaattatcg

SEQ ID NO: 130794 - DNA, 837 bp, Homo sapiens
  Payload ID: 5564
  Gene Symbol: EI24
  Gene Name: etoposide induced 2.4
  ENST ID: ENST00000524723
  CDS Start-End: 187-837
gtgcggcccgggcatgcccagtgcgggcgcagcggccccggccctggaagcgccccggcggagctggcctgcggtgggctaggggcagggccggagccgcggcggcggagctgtggatccttcatgatgagagatttggggacacttctctctcctgtgtgtagttgatagtttggtggtgaagagatggctgacagtgtcaaaacctttctccaggaccttgccagaggaatcaaagactccatctggggtatttgtaccatctcaaagctagatgctcgaatccagcaaaagagagaggagcagcgtcgaagaagggcaagtagtgtcttggcacagagaagagcccagagtatagagcggaagcaagagagacggattcttgccctgtcaccaagctgtcacctgagattgccgtggtgcaatctcagcttactgcagcctctgcctcccaggtccaagcaattcttctgcctcagcgaaccggctggctggaagtacagtgagccacgtattgttagtagaattttccagtgttgtgcttggaatggtggagtgttctggttcagtctcctcttgttttatcgagtatttattcctgtgcttcagtcggtaacagcccgaattatcggtgacccatcactacatggagatgtttggtcgtggctggaattcttcctcacgtcaattttcagtgctctttgggtgctccccttgtttgtgcttagcaaagtggtgaatgccatttggtttcaggatatagctgacctggcatttgaggtatcagggaggaagcctcacccattccctagtgtcagcaaaataattgctgacatg

SEQ ID NO: 130795 - DNA, 493 bp, Homo sapiens
  Payload ID: 5564
  Gene Symbol: EI24
  Gene Name: etoposide induced 2.4
  ENST ID: ENST00000529812
  CDS Start-End: 452-493
ctctccgccgccaggcggagttgggagccggacgatcccgcacgcagcgcgaggcgggaccccggactgactacatttcccagtctccgtcgctccgcgcggcccaccccttcggctctgggccccgcctcgtggtgccggctggttcttcgcgctcgcccgacttcccagcggccccgtgcggcccgggcatgcccagtgcgggcgcagcggccccggccctggaagcgccccggcggagctggcctgcggtgggctaggggcagggccggagccgcggcggcggagctgtgggtttgagaggttatttgtccatgggatgctcgtgttaaaacaaaaatcttcattgcaaagcttaagtaaaaacaagtctcgaccgagatccttcatgatgagagatttggggacacttctctctcctgtgtgtagttgatagtttggtggtgaagagatggctgacagtgtcaaaacctttctccaggaccttgccaga

SEQ ID NO: 130796 - DNA, 1407 bp, Homo sapiens
  Payload ID: 5564
  Gene Symbol: EI24
  Gene Name: etoposide induced 2.4
  ENST ID: ENST00000615917
  CDS Start-End: 560-1063
gtgcggcccgggcatgcccagtgcgggcgcagcggccccggccctggaagcgccccggcggagctggcctgcggtgggctaggggcagggccggagccgcggcggcggagctgtggatccttcatgatgagagatttggggacacttctctctcctgtgtgtagttgatagtttggtggtgaagagatggctgacagtgtcaaaacctttctccaggaccttgccagatgagccacgtattgttagtagaattttccagtgttgtgcttggaatggtggagtgttctggttcagtctcctcttgttttatcgagtatttattcctgtgcttcagtcggtaacagcccgaattatcggtgacccatcactacatggagatgtttggtcgtggctggaattcttcctcacgtcaattttcagtgctctttgggtgctccccttgtttgtgcttagcaaagtggtgaatgccatttggtttcaggatatagctgacctggcatttgaggtatcagggaggaagcctcacccattccctagtgtcagcaaaataattgctgacatgctcttcaaccttttgctgcaggctcttttcctcattcagggaatgtttgtgagtctctttcccatccatcttgtcggtcagctggttagtctcctgcatatgtcccttctctactcactgtactgctttgaatatcgttggttcaataaaggaattgaaatgcaccagcggttgtctaacatagaaaggaattggccttactactttgggtttggtttgcccttggcttttctcacagcaatgcagtcctcatatattatcagtggctgccttttctctatcctctttcctttattcattatcagcgccaatgaagcaaagacccctggcaaagcatatctcttccagttgcgcctcttctccttggtggtcttcttaagcaacagactcttccacaagacagtctacctgcagtcggccctgagcagctctacttctgcagagaagttcccttcaccgcatccgtcgcctgccaaactgaaggctactgcaggtcactgagttgcctgccatccaaaggggatgggcgggattggaagaagctgtggcagctcttttccctgttcacctcccgcctgccagggaaggcaggacccgctctgccaagggccctctgcgtattcccttctctctgaggaattgaaatttttgtctctggtgcacgtaaggcagaatgttccctgacaccagtgtgtggatttttaacatcaccgtgagtctgaaaggaccacaggtttttctgcagctattttctagcatttgccagtccctgtgcctggactgattggaacactttgtttttctccctgtgccatttacccttccacctttccatcctgccttct

SEQ ID NO: 130797 - DNA, 1395 bp, Homo sapiens
  Payload ID: 5564
  Gene Symbol: EI24
  Gene Name: etoposide induced 2.4
  ENST ID: ENST00000531636
  CDS Start-End: 168-293
agtgcgggcgcagcggccccggccctggaagcgccccggcggagctggcctgcggtgggctaggggcagggccggagccgcggcggcggagctgtggatccttcatgatgagagatttggggacacttctctctcctgtgtgtagttgatagtttggtggtgaagagatggctgacagtgtcaaaacctttctccaggaccttgccagaatgctcgaatccagcaaaagagagaggagcagcgtcgaagaagggcaagtagtgtcttggcacagagaagagcccagagtatagagcggaagcaagagagtgagccacgtattgttagtagaattttccagtgttgtgcttggaatggtggagtgttctggttcagtctcctcttgttttatcgagtatttattcctgtgcttcagtcggtaacagcccgaattatcgaggccctttaagaatgggtactgttgttctatccattttatgaatgaggaaatgcaagttaccaaggttaaaccattagtaagaggcaaagctgagatttaaacccagatggtatcctgcagatagcgtactggtaatcactgtggcatctcgttaccatcatgtaagcaggtgacccatcactacatggagatgtttggtcgtggctggaattcttcctcacgtcaattttcagtgctctttgggtgctccccttgtttgtgcttagcaaagtggtgaatgccatttggtttcaggatatagctgacctggcatttgaggtatcagggaggaagcctcacccattccctagtgtcagcaaaataattgctgacatgctcttcaaccttttgctgcaggctcttttcctcattcagggaatgtttgtgagtctctttcccatccatcttgtcggtcagctggttagtctcctgcatatgtcccttctctactcactgtactgctttgaatatcgttggttcaataaaggaattgaaatgcaccagcggttgtctaacatagaaaggaattggccttactactttgggtttggtttgcccttggcttttctcacagcaatgcagtcctcatatattatcagtggctgccttttctctatcctctttcctttattcattatcagcgccaatgaagcaaagacccctggcaaagcatatctcttccagttgcgcctcttctccttggtggtcttcttaagcaacagactcttccacaagacagtctacctgcagtcggccctgagcagctctacttctgcagagaagttcccttcaccgcatccgtcgcctgccaaactgaaggctactgcaggtcactgagttgcctgccatccaaaggggatgggcgggattggaagaagctgtggcagctcttttccctgttcacctcccgcctgcca

SEQ ID NO: 130798 - DNA, 1544 bp, Homo sapiens
  Payload ID: 5564
  Gene Symbol: EI24
  Gene Name: etoposide induced 2.4
  Uniprot ID: O14681
  ENST ID: ENST00000534546
  CDS Start-End: 187-1167
gtgcggcccgggcatgcccagtgcgggcgcagcggccccggccctggaagcgccccggcggagctggcctgcggtgggctaggggcagggccggagccgcggcggcggagctgtggatccttcatgatgagagatttggggacacttctctctcctgtgtgtagttgatagtttggtggtgaagagatggctgacagtgtcaaaacctttctccaggaccttgccagactagatgctcgaatccagcaaaagagagaggagcagcgtcgaagaagggcaagtagtgtcttggcacagagaagagcccagagtatagagcggaagcaagagagtgagccacgtattgttagtagaattttccagtgttgtgcttggaatggtggagtgttctggttcagtctcctcttgttttatcgagtatttattcctgtgcttcagtcggtaacagcccgaattatcggtgacccatcactacatggagatgtttggtcgtggctggaattcttcctcacgtcaattttcagtgctctttgggtgctccccttgtttgtgcttagcaaagtggtgaatgccatttggtttcaggatatagctgacctggcatttgaggtatcagggaggaagcctcacccattccctagtgtcagcaaaataattgctgacatgctcttcaaccttttgctgcaggctcttttcctcattcagggaatgtttgtgagtctctttcccatccatcttgtcggtcagctggttagtctcctgcatatgtcccttctctactcactgtactgctttgaatatcgttggttcaataaaggaattgaaatgcaccagcggttgtctaacatagaaaggaattggccttactactttgggtttggtttgcccttggcttttctcacagcaatgcagtcctcatatattatcagtggctgccttttctctatcctctttcctttattcattatcagcgccaatgaagcaaagacccctggcaaagcatatctcttccagttgcgcctcttctccttggtggtcttcttaagcaacagactcttccacaagacagtctacctgcagtcggccctgagcagctctacttctgcagagaagttcccttcaccgcatccgtcgcctgccaaactgaaggctactgcaggtcactgagttgcctgccatccaaaggggatgggcgggattggaagaagctgtggcagctcttttccctgttcacctcccgcctgccagggaaggcaggacccgctctgccaagggccctctgcgtattcccttctctctgaggaattgaaatttttgtctctggtgcacgtaaggcagaatgttccctgacaccagtgtgtggatttttaacatcaccgtgagtctgaaaggaccacaggtttttctgcagctattttctagcatttgccagtccctgtgcctggactgattggaacactttgtttttctccctgtgccatttacccttccacctttccatcctgccttctaccacccttggatgaatggattttgtaattcta

SEQ ID NO: 130799 - DNA, 1747 bp, Homo sapiens
  Payload ID: 5564
  Gene Symbol: EI24
  Gene Name: etoposide induced 2.4
  ENST ID: ENST00000618552
  CDS Start-End: 718-1221
gtgcggcccgggcatgcccagtgcgggcgcagcggccccggccctggaagcgccccggcggagctggcctgcggtgggctaggggcagggccggagccgcggcggcggagctgtggatccttcatgatgagagatttggggacacttctctctcctgtgtgtagttgatagtttggtggtgaagagatggctgacagtgtcaaaacctttctccaggaccttgccagaccttttctatagggaatcaaagactccatctggggtatttgtaccatctcaaagctagatgctcgaatccagcaaaagagagaggagcagcgtcgaagaagggcaagtagtgtcttggcacagagaagagcccagagtatagagcggaagcaagagagtgagccacgtattgttagtagaattttccagtgttgtgcttggaatggtggagtgttctggttcagtctcctcttgttttatcgagtatttattcctgtgcttcagtcggtaacagcccgaattatcggtgacccatcactacatggagatgtttggtcgtggctggaattcttcctcacgtcaattttcagtgctctttgggtgctccccttgtttgtgcttagcaaagtggtgaatgccatttggtttcaggatatagctgacctggcatttgaggtatcagggaggaagcctcacccattccctagtgtcagcaaaataattgctgacatgctcttcaaccttttgctgcaggctcttttcctcattcagggaatgtttgtgagtctctttcccatccatcttgtcggtcagctggttagtctcctgcatatgtcccttctctactcactgtactgctttgaatatcgttggttcaataaaggaattgaaatgcaccagcggttgtctaacatagaaaggaattggccttactactttgggtttggtttgcccttggcttttctcacagcaatgcagtcctcatatattatcagtggctgccttttctctatcctctttcctttattcattatcagcgccaatgaagcaaagacccctggcaaagcatatctcttccagttgcgcctcttctccttggtggtcttcttaagcaacagactcttccacaagacagtctacctgcagtcggccctgagcagctctacttctgcagagaagttcccttcaccgcatccgtcgcctgccaaactgaaggctactgcaggtcactgagttgcctgccatccaaaggggatgggcgggattggaagaagctgtggcagctcttttccctgttcacctcccgcctgccagggaaggcaggacccgctctgccaagggccctctgcgtattcccttctctctgaggaattgaaatttttgtctctggtgcacgtaaggcagaatgttccctgacaccagtgtgtggatttttaacatcaccgtgagtctgaaaggaccacaggtttttctgcagctattttctagcatttgccagtccctgtgcctggactgattggaacactttgtttttctccctgtgccatttacccttccacctttccatcctgccttctaccacccttggatgaatggattttgtaattctagctgttgtattttgtgaatttgttaattttgttgtttttctgtgaaacacatacattggatatgggaggtaaaggagtgtcccagttgctcctggtcactccctttatagccattactgtcttgtttcttgtaactcaggttaggtttt

SEQ ID NO: 130800 - DNA, 1718 bp, Homo sapiens
  Payload ID: 5564
  Gene Symbol: EI24
  Gene Name: etoposide induced 2.4
  Uniprot ID: O14681
  ENST ID: ENST00000620753
  CDS Start-End: 128-1150
gtgcggcccgggcatgcccagtgcgggcgcagcggccccggccctggaagcgccccgatccttcatgatgagagatttggggacacttctctctcctgtgtgtagttgatagtttggtggtgaagagatggctgacagtgtcaaaacctttctccaggaccttgccagaggaatcaaagactccatctggggtatttgtaccatctcaaagctagatgctcgaatccagcaaaagagagaggagcagcgtcgaagaagggcaagtagtgtcttggcacagagaagagcccagagtatagagcggaagcaagagagtgagccacgtattgttagtagaattttccagtgttgtgcttggaatggtggagtgttctggttcagtctcctcttgttttatcgagtatttattcctgtgcttcagtcggtaacagcccgaattatcggtgacccatcactacatggagatgtttggtcgtggctggaattcttcctcacgtcaattttcagtgctctttgggtgctccccttgtttgtgcttagcaaagtggtgaatgccatttggtttcaggatatagctgacctggcatttgaggtatcagggaggaagcctcacccattccctagtgtcagcaaaataattgctgacatgctcttcaaccttttgctgcaggctcttttcctcattcagggaatgtttgtgagtctctttcccatccatcttgtcggtcagctggttagtctcctgcatatgtcccttctctactcactgtactgctttgaatatcgttggttcaataaaggaattgaaatgcaccagcggttgtctaacatagaaaggaattggccttactactttgggtttggtttgcccttggcttttctcacagcaatgcagtcctcatatattatcagtggctgccttttctctatcctctttcctttattcattatcagcgccaatgaagcaaagacccctggcaaagcatatctcttccagttgcgcctcttctccttggtggtcttcttaagcaacagactcttccacaagacagtctacctgcagtcggccctgagcagctctacttctgcagagaagttcccttcaccgcatccgtcgcctgccaaactgaaggctactgcaggtcactgagttgcctgccatccaaaggggatgggcgggattggaagaagctgtggcagctcttttccctgttcacctcccgcctgccagggaaggcaggacccgctctgccaagggccctctgcgtattcccttctctctgaggaattgaaatttttgtctctggtgcacgtaaggcagaatgttccctgacaccagtgtgtggatttttaacatcaccgtgagtctgaaaggaccacaggtttttctgcagctattttctagcatttgccagtccctgtgcctggactgattggaacactttgtttttctccctgtgccatttacccttccacctttccatcctgccttctaccacccttggatgaatggattttgtaattctagctgttgtattttgtgaatttgttaattttgttgtttttctgtgaaacacatacattggatatgggaggtaaaggagtgtcccagttgctcctggtcactccctttatagccattactgtcttgtttcttgtaactcaggttaggttttggtctctcttgctccactgcaaaaaaaaaaaaaaaaaaaaaa

SEQ ID NO: 130801 - DNA, 3150 bp, Homo sapiens
  Payload ID: 5565
  Gene Symbol: EHF
  Gene Name: ets homologous factor
  Uniprot ID: Q9NZC4
  ENST ID: ENST00000257831
  CDS Start-End: 122-1024
acttgataacacccgtggtgccccatccctataggagctggtgagattgcagcctgctgcctcccctccaacagccacagctattggatttcccacccagaatctttaggtaaatgagatcatgattctggaaggaggtggtgtaatgaatctcaaccccggcaacaacctccttcaccagccgccagcctggacagacagctactccacgtgcaatgtttccagtgggttttttggaggccagtggcatgaaattcatcctcagtactggaccaagtaccaggtgtgggagtggctccagcacctcctggacaccaaccagctggatgccaattgtatccctttccaagagttcgacatcaacggcgagcacctctgcagcatgagtttgcaggagttcacccgggcggcagggacggcggggcagctcctctacagcaacttgcagcatctgaagtggaacggccagtgcagtagtgacctgttccagtccacacacaatgtcattgtcaagactgaacaaactgagccttccatcatgaacacctggaaagacgagaactatttatatgacaccaactatggtagcacagtagatttgttggacagcaaaactttctgccgggctcagatctccatgacaaccaccagtcaccttcctgttgcagagtcacctgatatgaaaaaggagcaagacccccctgccaagtgccacaccaaaaagcacaacccgagagggactcacttatgggaattcatccgcgacatcctcttgaacccagacaagaacccaggattaataaaatgggaagaccgatctgagggcgtcttcaggttcttgaaatcagaggcagtggctcagctatggggtaaaaagaagaacaacagcagcatgacctatgaaaagctcagccgagctatgagatattactacaaaagagaaattctggagcgtgtggatggacgaagactggtatataaatttgggaagaatgcccgaggatggagagaaaatgaaaactgaagctgccaatactttggacacaaaccaaaacacacaccaaataatcagaaacaaagaactcctggacgtaaatatttcaaagactacttttctctgatatttatgtaccatgaggggaacaagaaactacttctaacgggaagaagaaacactacggtcgattaaaaaaattattttgttacttcgaagtatgtcctatatggggaaaaaacgtacacagttttctgtgaaatatgatgctgtatgtggttgtgattttttttcacctctattgtgaattctttttcactgcaagagtaacaggatttgtagccttgtgcttcttgctaagagaaagaaaaacaaaatcagagggcattaaatgttttgtatgtgacatgatttagaaaaaggtgatgcatcctcctcacataagcatccatatggcttcgtcaagggaggtgaacattgttgctgagttaaattccagggtctcagatggttaggacaaagtggatggatgccgggaagtttaacctgagccttaggatccaatgagtggagaatggggacttccaaaacccaaggttggctataatctctgcataaccacatgacttggaatgcttaaatcagcaagaagaataatggtggggtctttatactcattcaggaatggtttatctgatgccagggctgtcttcctttctcccctttggatggttggtgaaatactttaattgccctgtctgctcacttctagctatttaagagagaacccagcttggttcttttttgctccaagtgcttaaaaataagttggaaaaaggagacggtggtgtggaaatggctgaagagtttgctcttgtatccctatagtccaaggtttctcaatctgcacaattgacatttttggccggagtgttctttgtggtgagggctttcctgtgcattgtaagatgttcagcagtatccactcatggtctctaaccacttgacaccagaaaccccccagctgtgataacgcaaaatgtctctagacatcaccaaatgttccctgggggtggcaaatttgcccttgattgagaaccaccagtttagctagtcaatatgaggatggtggtttattctcagaagaaaaagatatgtaaggtcttttagctccttagagtgaagcaaaagcaagacttcaacctcaacctatctttatgttttaaatgttagggacaataagttgaaatagctagaggagcttcttttcagaaccccagatgagagccaatgtcagataaagtaagcatagtaatgtagcaggaactacaatagaagacattttcactggaattacaaagcagaattaaaattatattgtagaaggaaacaccaagaaaagaatttccagggaaaatcctctttgcaggtattaattcttataattttttgtcttttggattatctgtttactgtctcatctgaactgatcccaggtgaacggtttattgcctagatttgtactcagaggaattttttttgttttgttttgtcttttaagaaaggaaagaaaggatgaaaaaaataaacagaaaactcagctcaggcacaattgtcaccaaggagttaaaagcttcttcttcaatagaggaattgttctgggggtcctggagacttaccattgagccatgcaatctgggaagcacaggaataagtagacactttgaaaatggatttgaatgttctcatcccttttgcagcttttctttttggctctctcatgtccttggcttgctcctctattctacctctctttctccagcaataatatgcaaatgaagacatgtatccataagaaggagtgctcttcatcaactaatagagcacctaccacagtgtcatacctggtagaggtgagcaattcatattcaaaggttgcaaagtgtttgtaatatattcatgaggctggaagtaagaagaattaaaaatttgtcctaattacaatgagaaccattctaggtagtgatcttggagcacacatgaataactttctgaaggtgcaaccaaatccatttttatttctgcctggcttggtcacttctgtaaaggtttaacttagtgttgtcaagtaacagttactgaaagagctgagaaaa

SEQ ID NO: 130802 - DNA, 2519 bp, Homo sapiens
  Payload ID: 5565
  Gene Symbol: EHF
  Gene Name: ets homologous factor
  Uniprot ID: Q9NZC4
  ENST ID: ENST00000450654
  CDS Start-End: 98-931
atccctataggagctggtgagattgcagcctgctgcctcccctccaacagccacagctattggatttcccacccagaatctttaggtaaatgagatcatgattctggaaggaggtggtgtaatgaatctcaaccccggcaacaacctccttcaccagccgccagcctggacagacagctactccacgtgcaatgtttccagtgggttttttggaggccagtggcatgaaattcatcctcagtactggaccaagtaccaggtgtgggagtggctccagcacctcctggacaccaaccagctggatgccaattgtatccctttccaagagttcgacatcaacggcgagcacctctgcagcatgagtttgcaggagttcacccgggcggcagggacggcggggcagctcctctacagcaacttgcagcatctgaagtggaacggccagtgcagtagtgacctgttccagtccacacacaatgtcattgtcaagactgaacaaactgagccttccatcatgaacacctggaaagacgagaactatttatatgacaccaactatggtagcacagtagcagagtcacctgatatgaaaaaggagcaagacccccctgccaagtgccacaccaaaaagcacaacccgagagggactcacttatgggaattcatccgcgacatcctcttgaacccagacaagaacccaggattaataaaatgggaagaccgatctgagggcgtcttcaggttcttgaaatcagaggcagtggctcagctatggggtaaaaagaagaacaacagcagcatgacctatgaaaagctcagccgagctatgagatattactacaaaagagaaattctggagcgtgtggatggacgaagactggtatataaatttgggaagaatgcccgaggatggagagaaaatgaaaactgaagctgccaatactttggacacaaaccaaaacacacaccaaataatcagaaacaaagaactcctggacgtaaatatttcaaagactacttttctctgatatttatgtaccatgaggggaacaagaaactacttctaacgggaagaagaaacactacggtcgattaaaaaaattattttgttacttcgaagtatgtcctatatggggaaaaaacgtacacagttttctgtgaaatatgatgctgtatgtggttgtgattttttttcacctctattgtgaattctttttcactgcaagagtaacaggatttgtagccttgtgcttcttgctaagagaaagaaaaacaaaatcagagggcattaaatgttttgtatgtgacatgatttagaaaaaggtgatgcatcctcctcacataagcatccatatggcttcgtcaagggaggtgaacattgttgctgagttaaattccagggtctcagatggttaggacaaagtggatggatgccgggaagtttaacctgagccttaggatccaatgagtggagaatggggacttccaaaacccaaggttggctataatctctgcataaccacatgacttggaatgcttaaatcagcaagaagaataatggtggggtctttatactcattcaggaatggtttatctgatgccagggctgtcttcctttctcccctttggatggttggtgaaatactttaattgccctgtctgctcacttctagctatttaagagagaacccagcttggttcttttttgctccaagtgcttaaaaataagttggaaaaaggagacggtggtgtggaaatggctgaagagtttgctcttgtatccctatagtccaaggtttctcaatctgcacaattgacatttttggccggagtgttctttgtggtgagggctttcctgtgcattgtaagatgttcagcagtatccactcatggtctctaaccacttgacaccagaaaccccccagctgtgataacgcaaaatgtctctagacatcaccaaatgttccctgggggtggcaaatttgcccttgattgagaaccaccagtttagctagtcaatatgaggatggtggtttattctcagaagaaaaagatatgtaaggtcttttagctccttagagtgaagcaaaagcaagacttcaacctcaacctatctttatgttttaaatgttagggacaataagttgaaatagctagaggagcttcttttcagaaccccagatgagagccaatgtcagataaagtaagcatagtaatgtagcaggaactacaatagaagacattttcactggaattacaaagcagaattaaaattatattgtagaaggaaacaccaagaaaagaatttccagggaaaatcctctttgcaggtattaattcttataattttttgtcttttggattatctgtttactgtctcatctgaactgatcccaggtgaacggtttattgcctagatttgtactcagaggaattttttttgttttgttttgtcttttaagaaaggaaagaaaggatgaaaaaaataaacagaaaactcagctcaggcacaattgtca

SEQ ID NO: 130803 - DNA, 557 bp, Homo sapiens
  Payload ID: 5565
  Gene Symbol: EHF
  Gene Name: ets homologous factor
  ENST ID: ENST00000532302
  CDS Start-End: 83-557
gattattcatttatgaatgggtggctgtaaaaacttgcctcatgcatatgaaaattgaacctggaaatttttaattgctatcatgattctggaaggaggtggtgtaatgaatctcaaccccggcaacaacctccttcaccagccgccagcctggacagacagctactccacgtgcaatgtttccagtgggttttttggaggccagtggcatgaaattcatcctcagtactggaccaagtaccaggtgtgggagtggctccagcacctcctggacaccaaccagctggatgccaattgtatccctttccaagagttcgacatcaacggcgagcacctctgcagcatgagtttgcaggagttcacccgggcggcagggacggcggggcagctcctctacagcaacttgcagcatctgaagtggaacggccagtgcagtagtgacctgttccagtccacacacaatgtcattgtcaagactgaacaaactgagccttccatcatgaacacctggaaagacgagaactatttatatgacaccaactatggtagcacagtag

SEQ ID NO: 130804 - DNA, 560 bp, Homo sapiens
  Payload ID: 5565
  Gene Symbol: EHF
  Gene Name: ets homologous factor
  ENST ID: ENST00000529527
  CDS Start-End: 62-560
ttctcaccctgcctttgttactgggaaaccgaacgcggcgctgtggctttcagcttggatcatgattctggaaggaggtggtgtaatgaatctcaaccccggcaacaacctccttcaccagccgccagcctggacagacagctactccacgtgcaatgtttccagtgggttttttggaggccagtggcatgaaattcatcctcagtactggaccaagtaccaggtgtgggagtggctccagcacctcctggacaccaaccagctggatgccaattgtatccctttccaagagttcgacatcaacggcgagcacctctgcagcatgagtttgcaggagttcacccgggcggcagggacggcggggcagctcctctacagcaacttgcagcatctgaagtggaacggccagtgcagtagtgacctgttccagtccacacacaatgtcattgtcaagactgaacaaactgagccttccatcatgaacacctggaaagacgagaactatttatatgacaccaactatggtagcacagtagcagagtcacctgatatgaaaaagg

SEQ ID NO: 130805 - DNA, 1280 bp, Homo sapiens
  Payload ID: 5565
  Gene Symbol: EHF
  Gene Name: ets homologous factor
  Uniprot ID: Q9NZC4
  ENST ID: ENST00000530286
  CDS Start-End: 141-1043
ctcagcagcaacaaatgccttctgagacagggattcttttgattttgcttggacattgtggagaagtgttagccccaatgtggactgatctgggaacagtgggaaattaacttcttgttggtaaatatcaggctgagatcatgattctggaaggaggtggtgtaatgaatctcaaccccggcaacaacctccttcaccagccgccagcctggacagacagctactccacgtgcaatgtttccagtgggttttttggaggccagtggcatgaaattcatcctcagtactggaccaagtaccaggtgtgggagtggctccagcacctcctggacaccaaccagctggatgccaattgtatccctttccaagagttcgacatcaacggcgagcacctctgcagcatgagtttgcaggagttcacccgggcggcagggacggcggggcagctcctctacagcaacttgcagcatctgaagtggaacggccagtgcagtagtgacctgttccagtccacacacaatgtcattgtcaagactgaacaaactgagccttccatcatgaacacctggaaagacgagaactatttatatgacaccaactatggtagcacagtagatttgttggacagcaaaactttctgccgggctcagatctccatgacaaccaccagtcaccttcctgttgcagagtcacctgatatgaaaaaggagcaagacccccctgccaagtgccacaccaaaaagcacaacccgagagggactcacttatgggaattcatccgcgacatcctcttgaacccagacaagaacccaggattaataaaatgggaagaccgatctgagggcgtcttcaggttcttgaaatcagaggcagtggctcagctatggggtaaaaagaagaacaacagcagcatgacctatgaaaagctcagccgagctatgagatattactacaaaagagaaattctggagcgtgtggatggacgaagactggtatataaatttgggaagaatgcccgaggatggagagaaaatgaaaactgaagctgccaatactttggacacaaaccaaaacacacaccaaataatcagaaacaaagaactcctggacgtaaatatttcaaagactacttttctctgatatttatgtaccatgaggggaacaagaaactacttctaacgggaagaagaaacactacggtcgattaaaaaaattattttgttacttcgaagtatgtcctatatggggaaaaaacgtacacagttttctgtgaaatatga

SEQ ID NO: 130806 - DNA, 564 bp, Homo sapiens
  Payload ID: 5565
  Gene Symbol: EHF
  Gene Name: ets homologous factor
  ENST ID: ENST00000525253
  CDS Start-End: 46-564
gttactgggaaaccgaacgcggcgctgtggctttcagcttggatcatgattctggaaggaggtggtgtaatgaatctcaaccccggcaacaacctccttcaccagccgccagcctggacagacagctactccacgtgcaatgtttccagtgggttttttggaggccagtggcatgaaattcatcctcagtactggaccaagtaccaggtgtgggagtggctccagcacctcctggacaccaaccagctggatgccaattgtatccctttccaagagttcgacatcaacggcgagcacctctgcagcatgagtttgcaggagttcacccgggcggcagggacggcggggcagctcctctacagcaacttgcagcatctgaagtggaacggccagtgcagtagtgacctgttccagtccacacacaatgtcattgtcaagactgaacaaactgagccttccatcatgaacacctggaaagacgagaactatttatatgacaccaactatggtagcacagtagatttgttggacagcaaaactttctgccgggctcagatctccatg

SEQ ID NO: 130807 - DNA, 1481 bp, Homo sapiens
  Payload ID: 5565
  Gene Symbol: EHF
  Gene Name: ets homologous factor
  Uniprot ID: Q9NZC4
  ENST ID: ENST00000531794
  CDS Start-End: 127-1095
aacccactgctttattctgccctgagtggagattggttttggctcaggctgctttgtgaaactcagaagcattatcctctctgccaactccacgtcctagtcagagttttctgtgaaggcaagggcatggggttgccggagagaagaggattggtcctgcttttaagcctagctgaaattcttttcaagatcatgattctggaaggaggtggtgtaatgaatctcaaccccggcaacaacctccttcaccagccgccagcctggacagacagctactccacgtgcaatgtttccagtgggttttttggaggccagtggcatgaaattcatcctcagtactggaccaagtaccaggtgtgggagtggctccagcacctcctggacaccaaccagctggatgccaattgtatccctttccaagagttcgacatcaacggcgagcacctctgcagcatgagtttgcaggagttcacccgggcggcagggacggcggggcagctcctctacagcaacttgcagcatctgaagtggaacggccagtgcagtagtgacctgttccagtccacacacaatgtcattgtcaagactgaacaaactgagccttccatcatgaacacctggaaagacgagaactatttatatgacaccaactatggtagcacagtagatttgttggacagcaaaactttctgccgggctcagatctccatgacaaccaccagtcaccttcctgttgcagagtcacctgatatgaaaaaggagcaagacccccctgccaagtgccacaccaaaaagcacaacccgagagggactcacttatgggaattcatccgcgacatcctcttgaacccagacaagaacccaggattaataaaatgggaagaccgatctgagggcgtcttcaggttcttgaaatcagaggcagtggctcagctatggggtaaaaagaagaacaacagcagcatgacctatgaaaagctcagccgagctatgagatattactacaaaagagaaattctggagcgtgtggatggacgaagactggtatataaatttgggaagaatgcccgaggatggagagaaaatgaaaactgaagctgccaatactttggacacaaaccaaaacacacaccaaataatcagaaacaaagaactcctggacgtaaatatttcaaagactacttttctctgatatttatgtaccatgaggggaacaagaaactacttctaacgggaagaagaaacactacggtcgattaaaaaaattattttgttacttcgaagtatgtcctatatggggaaaaaacgtacacagttttctgtgaaatatgatgctgtatgtggttgtgattttttttcacctctattgtgaattctttttcactgcaagagtaacaggatttgtagccttgtgcttcttgctaagagaaagaaaaacaaaatcagagggcattaaatgttttgtatgtgacatgatttag

SEQ ID NO: 130808 - DNA, 1501 bp, Homo sapiens
  Payload ID: 5565
  Gene Symbol: EHF
  Gene Name: ets homologous factor
  Uniprot ID: Q9NZC4
  ENST ID: ENST00000533754
  CDS Start-End: 218-1120
attttcaccgtccatctttgctgatttaccatgctcccaggatggtgggagtgtgtgtttttaagatggagagtgtatgcttctgggttcaagttcacaggtgtctctgctggttatctgcactcaccttggtaacagggagaaagtgagtgaatggattccaagaacttactgatggaagtctaattcaggagttggttctgcagccatggagatcatgattctggaaggaggtggtgtaatgaatctcaaccccggcaacaacctccttcaccagccgccagcctggacagacagctactccacgtgcaatgtttccagtgggttttttggaggccagtggcatgaaattcatcctcagtactggaccaagtaccaggtgtgggagtggctccagcacctcctggacaccaaccagctggatgccaattgtatccctttccaagagttcgacatcaacggcgagcacctctgcagcatgagtttgcaggagttcacccgggcggcagggacggcggggcagctcctctacagcaacttgcagcatctgaagtggaacggccagtgcagtagtgacctgttccagtccacacacaatgtcattgtcaagactgaacaaactgagccttccatcatgaacacctggaaagacgagaactatttatatgacaccaactatggtagcacagtagatttgttggacagcaaaactttctgccgggctcagatctccatgacaaccaccagtcaccttcctgttgcagagtcacctgatatgaaaaaggagcaagacccccctgccaagtgccacaccaaaaagcacaacccgagagggactcacttatgggaattcatccgcgacatcctcttgaacccagacaagaacccaggattaataaaatgggaagaccgatctgagggcgtcttcaggttcttgaaatcagaggcagtggctcagctatggggtaaaaagaagaacaacagcagcatgacctatgaaaagctcagccgagctatgagatattactacaaaagagaaattctggagcgtgtggatggacgaagactggtatataaatttgggaagaatgcccgaggatggagagaaaatgaaaactgaagctgccaatactttggacacaaaccaaaacacacaccaaataatcagaaacaaagaactcctggacgtaaatatttcaaagactacttttctctgatatttatgtaccatgaggggaacaagaaactacttctaacgggaagaagaaacactacggtcgattaaaaaaattattttgttacttcgaagtatgtcctatatggggaaaaaacgtacacagttttctgtgaaatatgatgctgtatgtggttgtgattttttttcacctctattgtgaattctttttcactgcaagagtaacaggatttgtagccttgtgcttcttgctaagagaaagaaaaacaaaatcagagggcattaaatgttttgtatgtgacatga

SEQ ID NO: 130809 - DNA, 557 bp, Homo sapiens
  Payload ID: 5565
  Gene Symbol: EHF
  Gene Name: ets homologous factor
  ENST ID: ENST00000527935
  CDS Start-End: 5-385
gatcatgattctggaaggaggtggtgtaatgaatctcaaccccggcaacaacctccttcaccagccgccagcctggacagacagctactccacgtgcaatgtttccagtgggttttttggaggccagtggcatgaaattcatcctcagtactggaccaagtaccaggtgtgggagtggctccagcacctcctggacaccaaccagctggatgccaattgtatccctttccaagagttcgacatcaacggcgagcacctctgcagcatgagtttgcaggagttcacccgggcggcagggacggcggggcagctcctctacagcaacttgcagcatctgaagtggaacggtgactctctctttctgtgtctctccctaccctgctaggagccagctggaagaatagagattctgcagatgacaggattctttgtcagggacaagaaagagtggtctcacctccaaattaccatgtcccaagacagagaaatggaaggaagatgaaaggacaggattgaagcatagggtacctggtgtgcctaatcccttataaatgcca

SEQ ID NO: 130810 - DNA, 485 bp, Homo sapiens
  Payload ID: 5565
  Gene Symbol: EHF
  Gene Name: ets homologous factor
  ENST ID: ENST00000531728
  CDS Start-End: 56-436
ccctgcctttgttactgggaaaccgaacgcggcgctgtggctttcagcttggatcatgattctggaaggaggtggtgtaatgaatctcaaccccggcaacaacctccttcaccagccgccagcctggacagacagctactccacgtgcaatgtttccagtgggttttttggaggccagtggcatgaaattcatcctcagtactggaccaagtaccaggtgtgggagtggctccagcacctcctggacaccaaccagctggatgccaattgtatccctttccaagagttcgacatcaacggcgagcacctctgcagcatgagtttgcaggagttcacccgggcggcagggacggcggggcagctcctctacagcaacttgcagcatctgaagtggaacggtgactctctctttctgtgtctctccctaccctgctaggagccagctggaagaatagagattctgcagatgacaggattctttgtca

SEQ ID NO: 130811 - DNA, 6348 bp, Homo sapiens
  Payload ID: 5566
  Gene Symbol: ETV1
  Gene Name: ets variant 1
  Uniprot ID: P50549
  ENST ID: ENST00000242066
  CDS Start-End: 336-1715
cgttattggctgcgggaagaacctcgccgggacctaacccgaagctccgccccctcgcggttaccctggatacccgtcaggctcgggctgcagagaaggaggatcagggcaagtggcttcagagatgcagccctcactgcttaacgtcctagttattgtccttgaaacccgagccatctcaccgctcgcccccaaccctgggctctggctgtttaaaagctggagaggaagtgaaagcgtcaagtacagttgatagaagtccagatcctgaggaaatctccagctaaatgctcaaaatataaaatactgagctgagatttgcgaagagcagcagcatggatggattttatgaccagcaagtgccttacatggtcaccaatagtcagcgtgggagaaattgtaacgagaaaccaacaaatgtcaggaaaagaaaattcattaacagagatctggctcatgattcagaagaactctttcaagatctaagtcaattacaggaaacatggcttgcagaagtggcttttcatggcctgccactgaaaatcaagaaagaaccccacagtccatgttcagaaatcagctctgcctgcagtcaagaacagccctttaaattcagctatggagaaaagtgcctgtacaatgtcagtgcctatgatcagaagccacaagtgggaatgaggccctccaacccccccacaccatccagcacgccagtgtccccactgcatcatgcatctccaaactcaactcatacaccgaaacctgaccgggccttcccagctcacctccctccatcgcagtccataccagatagcagctaccccatggaccacagatttcgccgccagctttctgaaccctgtaactcctttcctcctttgccgacgatgccaagggaaggacgtcctatgtaccaacgccagatgtctgagccaaacatccccttcccaccacaaggctttaagcaggagtaccacgacccagtgtatgaacacaacaccatggttggcagtgcggccagccaaagctttccccctcctctgatgattaaacaggaacccagagattttgcatatgactcagaagtgcctagctgccactccatttatatgaggcaagaaggcttcctggctcatcccagcagaacagaaggctgtatgtttgaaaagggccccaggcagttttatgatgacacctgtgttgtcccagaaaaattcgatggagacatcaaacaagagccaggaatgtatcgggaaggacccacataccaacggcgaggatcacttcagctctggcagtttttggtagctcttctggatgacccttcaaattctcattttattgcctggactggtcgaggcatggaatttaaactgattgagcctgaagaggtggcccgacgttggggcattcagaaaaacaggccagctatgaactatgataaacttagccgttcactccgctattactatgagaaaggaattatgcaaaaggtggctggagagagatatgtctacaagtttgtgtgtgatccagaagcccttttctccatggcctttccagataatcagcgtccactgctgaagacagacatggaacgtcacatcaacgaggaggacacagtgcctctttctcactttgatgagagcatggcctacatgccggaagggggctgctgcaacccccacccctacaacgaaggctacgtgtattaacacaagtgacagtcaagcagggcgtttttgcgcttttccttttttctgcaagatacagagaattgctgaatctttgttttatttctgttgtttgtattttatttttaaataataatacacaaaaaggggcttttcctgttgcattattctatggtctgccatggactgtgcactttatttgagggtgggtgggagtaatctaaacatttattctgtgtaacaggaagctaatgggtgaatgggcagagggatttggggattactttttacttaggcttgggatggggtcctacaagttttgagtatgatgaaactatatcatgtctgtttgatttcataacaacataagataatgtttattttatcggggtatctatggtacagttaatttcacgttgtgtaaatatccacttggagactatttgccttgggcattttcccctgtcatttatgagtctctgcaggtgtacaaaaaaaccccaatctactgtaaatggcagtttaattgttagaaatgactgtttttgcaccacttgtaaaaaggtatttagcgattgcatttgctgtttgttgttttattttgctttatatatgacttgcagaggataaccataaaatgggtaattctctctgaagttgaataatcaccatgactgtaaatgaggggcacaattttggactctggcgccaaactgagtcataggccagtagcattacgtgtatctggtgccaccttgctgtttagatacaaatcataccgtcttttaaatattttgaagcccatttcagttaaataatgacatgtcatggtcctttggaatcttcatttaaatgttaaatctggaatcaaaatgaagcaaaaaatatctgtctccttttcactttcttcagtacataaatacattatttaatcaataagaattaactgtactaaatcatgtattatgctgttctagttacagcaaacactctttaagaaaaatatccaatacactaaataggtactatagtaatttttagacatggtacccattgatatgcatttaaaccttttactgctgtgttatgttgataacatatataaatattagataatgctaatgcttctgctgctgtcttttctgtaatattctctttcatgctgaatttactatgaccatttataagcagtgcagttaactacagatagcatttcaggacaaaatagatgactcaaaccatttattgcttaaaaaatagcttacgccatgctatgctataagcagcttttatgcacattgacaaatgaagagtaagcttcagcttgctaaaggaaactgtggaaccttttgtaacttttggtgatatggaaaattatttacaaaccgtcaaagaatatgaggaagttgctgtatgacatagtgctggcactgatattatccatcatctctttttggacacttctgtaaatgtgattggattgtttgaaagaagatttaaagtttcaaagttttttgttctgtttttgctttgcatttggagaaaatattgaaagcagggtatgttgtttcattcaccttgaaaaaaccatgagtaaatggggatatagaatctctgaatagctcgctaaaagattcaagcaagggacatgaattttgttccatctatcaataatatccagaagaacaacttttttaaagagtctatagcaaaaagcaaaaaaaaaaaaaaattctaaacacaaagtcaaaataaacctattgtaaaagcatttcgtgatgagcatgaaaaagattgtttaaagatgatccccccagctacccattttccaaaactacacagatcacagctcatttctctaagtggagcagttatcaagaaacccaaacaccaaaattgctactcttcacatttaatcctacaaaaagtactccaatttcaaaatatgtatgtaacctgcgatttcaatgattgttgttcatatacatcatgtattattttggcccattttgggcctaaaaaagaaaactatgccttaaaaatcagaaccttttctccccactatgcttatgtggccatctacagcacttagaataaaaacagatgttaaaatattcagtgaaagttttattggaaaaaggaattgagatatataattgagatttggtgaaattgaaggagaaaatttaagtgagtctttaaaatatattctgaatgaaaactgtattgaggattcatttttgttccttttttttctttttctcttttctcctttttcttctttttaatagtctagttttagtcagtcagtgaggaagaattgggccatgctaacgttatcacaagagaacaatggcagaaatggtattagttatataatatttaaggacaaactatatgttttgctgttttaacgtagtgactcactgaactaaatacataattgaccaacattaagtgtatttccaatacagaagggttgaaaatattacattataaactcttttgaaaaatgtatctaaaattttttaagttctgttttgattccactttttggttgagtttttatgtttttgttttcaggtagattaataaatctggcagctgatttctgcaagattcttgtgttttgaatttctcattgaattggctactcaaacatagaaatcatttgttaatgatgtaatgtcttctctcagcttttatcttcactgctgtttgctgtctcttgatgatgacatgttaatacccaatagattaattgcaacaaacacttatactcaaataactaagtaaaaataatttttcttgttatgtccatgaaaagtgcttcagaataaaaatccacaagactgacagtgcagaacatttttctcaaatcatgggcggatcttggaggtctagtttcccgtagatgctgtaaccaattaccacaacttcagtaatttacacaaatttatcttatagttctggaggcagaagttcaaaagaagccttaagagactaaaaccaagatgtccttaggtctggttccttctggaggctccaggggagattcttccagctttcacttctagagtctgctgacattccttggctcctggctacatcacttcaatctctgcttccatggtcacatactcttctactatagtcaaatttccttcctgcctcttataaggatgcttgtgattacatttaggggatgctcagataatccaggacaatctctccatctcaagatccttaacttaatgacgtgtgccaagtccctttggctagataattattcataggtcccagggattaggacatggatgtaaggggtgagggcagggctgttattcagaacaccgcacggaggaggaagactgtgtagcaaagactctaattgatttactcaggaacagtggagttctgctgagggatctaggatttgaaagtactagagtttgcttttatttaccactgagatattttccccttattctgcataaataattttgaaaactttctatattaaatttcaactattccactaaaatgtctggtaatcacatcaagcctttagattattcaaatccttccccagcccccaggaaaacactaagtcatgaaacagaaaaacagaaggtatgataataatagtaataacagttaaatcagtggtctaatccagattttattttttaatacatttcttttggtgttaatatgggttactatgtgatcttatcatttgctagtgattattacttattaggtaagaacaatgtgtaaaatatgtctattactcaaaagaacaattgcaaaatgagtcaacttatctttatataaccaggaaagaaatatattgccagaagctacagaattttgccagatgatagggatttctaaaatgagccactttgtctatcatgcagccttttcagagcttgtaatgagaaaacattacagaggagaaggtcatttggatgtttgttacttggaatcctagaaaacaaaaactaaaatttaaaaataagaagtgagtaagctattttccatttgcgatttggtatggagaagagaggaaatagaattattaaaaaaatacaaattgggtaaaagtgatggtggaaaaaatataaagaaggcaaatgtacatattaagcaattctactaagaattggaaaaatcaagtttcaaaaagatggtaatagttgggcatgatactagaaaatttcacccagtttattcagagctcaactagtacttttaggacttctttttttatatacatgagactcactttgacatacttaaaaaaaaaacagtttatggaaagtacagtttaagaggagaatttgattagactaagtggatatctttatagaaatattaatgatttcagaattttcagttacaagtgtatataccgtggctattgtttatggattcatatgtaaggtagggtcttttttgcatatagactccagtattagttactttcattctaaaattatatttatgcttctatggggaagaaaatttttaattcacttggttgtattaaaattatacttacggtttgagaaaacatgctatgaaaatcatgattatagcaaattaaatatgctcaaaatttaaatctaaaataaaagcccagaaactg

SEQ ID NO: 130812 - DNA, 6096 bp, Homo sapiens
  Payload ID: 5566
  Gene Symbol: ETV1
  Gene Name: ets variant 1
  Uniprot ID: P50549
  ENST ID: ENST00000399357
  CDS Start-End: 339-1463
gtcatgcatacattagagcctctgatgagtttgtctttggggactctggggctgtactacccagtgtcatcacaaattaccaggagaaattgcttccagctcacaatcacatctgcttttggcaagaactaatgcaccaagacttcaagttctaagcctctgttcagattttaattgcaattgatcaggtttatattattgtacctccagagacctcctagagccagaacccggctggcttgctgtttcctttagagcagcgcatatcattatttggtgttctggtggaggacttttctgatggcagaaattagtttctctgggttcatcaggacgggatgcttcaagatttaagtgcaagtgtcttctttccaccttgttcacaacacagaacgttagctcaggtacctgacaatgatgagcagtttgtaccagactatcaggctgaaagtttggcttttcatggcctgccactgaaaatcaagaaagaaccccacagtccatgttcagaaatcagctctgcctgcagtcaagaacagccctttaaattcagctatggagaaaagtgcctgtacaatgtcagatttcgccgccagctttctgaaccctgtaactcctttcctcctttgccgacgatgccaagggaaggacgtcctatgtaccaacgccagatgtctgagccaaacatccccttcccaccacaaggctttaagcaggagtaccacgacccagtgtatgaacacaacaccatggttggcagtgcggccagccaaagctttccccctcctctgatgattaaacaggaacccagagattttgcatatgactcagaagtgcctagctgccactccatttatatgaggcaagaaggcttcctggctcatcccagcagaacagaaggctgtatgtttgaaaagggccccaggcagttttatgatgacacctgtgttgtcccagaaaaattcgatggagacatcaaacaagagccaggaatgtatcgggaaggacccacataccaacggcgaggatcacttcagctctggcagtttttggtagctcttctggatgacccttcaaattctcattttattgcctggactggtcgaggcatggaatttaaactgattgagcctgaagaggtggcccgacgttggggcattcagaaaaacaggccagctatgaactatgataaacttagccgttcactccgctattactatgagaaaggaattatgcaaaaggtggctggagagagatatgtctacaagtttgtgtgtgatccagaagcccttttctccatggcctttccagataatcagcgtccactgctgaagacagacatggaacgtcacatcaacgaggaggacacagtgcctctttctcactttgatgagagcatggcctacatgccggaagggggctgctgcaacccccacccctacaacgaaggctacgtgtattaacacaagtgacagtcaagcagggcgtttttgcgcttttccttttttctgcaagatacagagaattgctgaatctttgttttatttctgttgtttgtattttatttttaaataataatacacaaaaaggggcttttcctgttgcattattctatggtctgccatggactgtgcactttatttgagggtgggtgggagtaatctaaacatttattctgtgtaacaggaagctaatgggtgaatgggcagagggatttggggattactttttacttaggcttgggatggggtcctacaagttttgagtatgatgaaactatatcatgtctgtttgatttcataacaacataagataatgtttattttatcggggtatctatggtacagttaatttcacgttgtgtaaatatccacttggagactatttgccttgggcattttcccctgtcatttatgagtctctgcaggtgtacaaaaaaaccccaatctactgtaaatggcagtttaattgttagaaatgactgtttttgcaccacttgtaaaaaggtatttagcgattgcatttgctgtttgttgttttattttgctttatatatgacttgcagaggataaccataaaatgggtaattctctctgaagttgaataatcaccatgactgtaaatgaggggcacaattttggactctggcgccaaactgagtcataggccagtagcattacgtgtatctggtgccaccttgctgtttagatacaaatcataccgtcttttaaatattttgaagcccatttcagttaaataatgacatgtcatggtcctttggaatcttcatttaaatgttaaatctggaatcaaaatgaagcaaaaaatatctgtctccttttcactttcttcagtacataaatacattatttaatcaataagaattaactgtactaaatcatgtattatgctgttctagttacagcaaacactctttaagaaaaatatccaatacactaaataggtactatagtaatttttagacatggtacccattgatatgcatttaaaccttttactgctgtgttatgttgataacatatataaatattagataatgctaatgcttctgctgctgtcttttctgtaatattctctttcatgctgaatttactatgaccatttataagcagtgcagttaactacagatagcatttcaggacaaaatagatgactcaaaccatttattgcttaaaaaatagcttacgccatgctatgctataagcagcttttatgcacattgacaaatgaagagtaagcttcagcttgctaaaggaaactgtggaaccttttgtaacttttggtgatatggaaaattatttacaaaccgtcaaagaatatgaggaagttgctgtatgacatagtgctggcactgatattatccatcatctctttttggacacttctgtaaatgtgattggattgtttgaaagaagatttaaagtttcaaagttttttgttctgtttttgctttgcatttggagaaaatattgaaagcagggtatgttgtttcattcaccttgaaaaaaccatgagtaaatggggatatagaatctctgaatagctcgctaaaagattcaagcaagggacatgaattttgttccatctatcaataatatccagaagaacaacttttttaaagagtctatagcaaaaagcaaaaaaaaaaaaaaattctaaacacaaagtcaaaataaacctattgtaaaagcatttcgtgatgagcatgaaaaagattgtttaaagatgatccccccagctacccattttccaaaactacacagatcacagctcatttctctaagtggagcagttatcaagaaacccaaacaccaaaattgctactcttcacatttaatcctacaaaaagtactccaatttcaaaatatgtatgtaacctgcgatttcaatgattgttgttcatatacatcatgtattattttggcccattttgggcctaaaaaagaaaactatgccttaaaaatcagaaccttttctccccactatgcttatgtggccatctacagcacttagaataaaaacagatgttaaaatattcagtgaaagttttattggaaaaaggaattgagatatataattgagatttggtgaaattgaaggagaaaatttaagtgagtctttaaaatatattctgaatgaaaactgtattgaggattcatttttgttccttttttttctttttctcttttctcctttttcttctttttaatagtctagttttagtcagtcagtgaggaagaattgggccatgctaacgttatcacaagagaacaatggcagaaatggtattagttatataatatttaaggacaaactatatgttttgctgttttaacgtagtgactcactgaactaaatacataattgaccaacattaagtgtatttccaatacagaagggttgaaaatattacattataaactcttttgaaaaatgtatctaaaattttttaagttctgttttgattccactttttggttgagtttttatgtttttgttttcaggtagattaataaatctggcagctgatttctgcaagattcttgtgttttgaatttctcattgaattggctactcaaacatagaaatcatttgttaatgatgtaatgtcttctctcagcttttatcttcactgctgtttgctgtctcttgatgatgacatgttaatacccaatagattaattgcaacaaacacttatactcaaataactaagtaaaaataatttttcttgttatgtccatgaaaagtgcttcagaataaaaatccacaagactgacagtgcagaacatttttctcaaatcatgggcggatcttggaggtctagtttcccgtagatgctgtaaccaattaccacaacttcagtaatttacacaaatttatcttatagttctggaggcagaagttcaaaagaagccttaagagactaaaaccaagatgtccttaggtctggttccttctggaggctccaggggagattcttccagctttcacttctagagtctgctgacattccttggctcctggctacatcacttcaatctctgcttccatggtcacatactcttctactatagtcaaatttccttcctgcctcttataaggatgcttgtgattacatttaggggatgctcagataatccaggacaatctctccatctcaagatccttaacttaatgacgtgtgccaagtccctttggctagataattattcataggtcccagggattaggacatggatgtaaggggtgagggcagggctgttattcagaacaccgcacggaggaggaagactgtgtagcaaagactctaattgatttactcaggaacagtggagttctgctgagggatctaggatttgaaagtactagagtttgcttttatttaccactgagatattttccccttattctgcataaataattttgaaaactttctatattaaatttcaactattccactaaaatgtctggtaatcacatcaagcctttagattattcaaatccttccccagcccccaggaaaacactaagtcatgaaacagaaaaacagaaggtatgataataatagtaataacagttaaatcagtggtctaatccagattttattttttaatacatttcttttggtgttaatatgggttactatgtgatcttatcatttgctagtgattattacttattaggtaagaacaatgtgtaaaatatgtctattactcaaaagaacaattgcaaaatgagtcaacttatctttatataaccaggaaagaaatatattgccagaagctacagaattttgccagatgatagggatttctaaaatgagccactttgtctatcatgcagccttttcagagcttgtaatgagaaaacattacagaggagaaggtcatttggatgtttgttacttggaatcctagaaaacaaaaactaaaatttaaaaataagaagtgagtaagctattttccatttgcgatttggtatggagaagagaggaaatagaattattaaaaaaatacaaattgggtaaaagtgatggtggaaaaaatataaagaaggcaaatgtacatattaagcaattctactaagaattggaaaaatcaagtttcaaaaagatggtaatagttgggcatgatactagaaaatttcacccagtttattcagagctcaactagtacttttaggacttctttttttatatacatgagactcactttgacatacttaaaaaaaaaacagtttatggaaagtacagtttaagaggagaatttgattagactaagtggatatctttatagaaatattaatgatttcagaattttcagttacaagtgtatataccgtggctattgtttatggattcatatgtaaggtagggtcttttttgcatatagactccagtattagttactttcattctaaaattatatttatgcttctatggggaagaaaatttttaattcacttggttgtattaaaattatacttacggtttgagaaaacatgctatgaaaatcatgattatagcaaattaaatatgctcaaaatttaaatctaaaataaaagcccagaaactg

SEQ ID NO: 130813 - DNA, 4181 bp, Homo sapiens
  Payload ID: 5566
  Gene Symbol: ETV1
  Gene Name: ets variant 1
  ENST ID: ENST00000405358
  CDS Start-End: 108-1583
gactctgcttctagaagcccagtcttcaaaatgagcttacctttcagtgatttggataaggcatagttttgtttttaagacccctttttctgattaaagtgcccaacatgagtggaagaggagatggagggcagcagcagctgctgcactcaaagtttttggctgggtttgtctgccacattgaaaagaatgaaagtcagcgtgggagaaattgtaacgagaaaccaacaaatgtcaggaaaagaaaattcattaacagagatctggctcatgattcagaagaactctttcaagatctaagtcaattacaggaaacatggcttgcagaagctcaggtacctgacaatgatgagcagtttgtaccagactatcaggctgaaagtttggcttttcatggcctgccactgaaaatcaagaaagaaccccacagtccatgttcagaaatcagctctgcctgcagtcaagaacagccctttaaattcagctatggagaaaagtgcctgtacaatgtcagtgcctatgatcagaagccacaagtgggaatgaggccctccaacccccccacaccatccagcacgccagtgtccccactgcatcatgcatctccaaactcaactcatacaccgaaacctgaccgggccttcccagctcacctccctccatcgcagtccataccagatagcagctaccccatggaccacagatttcgccgccagctttctgaaccctgtaactcctttcctcctttgccgacgatgccaagggaaggacgtcctatgtaccaacgccagatgtctgagccaaacatccccttcccaccacaaggctttaagcaggagtaccacgacccagtgtatgaacacaacaccatggttggcagtgcggccagccaaagctttccccctcctctgatgattaaacaggaacccagagattttgcatatgactcagaagtgcctagctgccactccatttatatgaggcaagaaggcttcctggctcatcccagcagaacagaaggctgtatgtttgaaaagggccccaggcagttttatgatgacacctgtgttgtcccagaaaaattcgatggagacatcaaacaagagccaggaatgtatcgggaaggacccacataccaacggcgaggatcacttcagctctggcagtttttggtagctcttctggatgacccttcaaattctcattttattgcctggactggtcgaggcatggaatttaaactgattgagcctgaagaggtggcccgacgttggggcattcagaaaaacaggccagctatgaactatgataaacttagccgttcactccgctattactatgagaaaggaattatgcaaaaggtggctggagagagatatgtctacaagtttgtgtgtgatccagaagcccttttctccatggcctttccagataatcagcgtccactgctgaagacagacatggaacgtcacatcaacgaggaggacacagtgcctctttctcactttgatgagagcatggcctacatgccggaagggggctgctgcaacccccacccctacaacgaaggctacgtgtattaacacaagtgacagtcaagcagggcgtttttgcgcttttccttttttctgcaagatacagagaattgctgaatctttgttttatttctgttgtttgtattttatttttaaataataatacacaaaaaggggcttttcctgttgcattattctatggtctgccatggactgtgcactttatttgagggtgggtgggagtaatctaaacatttattctgtgtaacaggaagctaatgggtgaatgggcagagggatttggggattactttttacttaggcttgggatggggtcctacaagttttgagtatgatgaaactatatcatgtctgtttgatttcataacaacataagataatgtttattttatcggggtatctatggtacagttaatttcacgttgtgtaaatatccacttggagactatttgccttgggcattttcccctgtcatttatgagtctctgcaggtgtacaaaaaaaccccaatctactgtaaatggcagtttaattgttagaaatgactgtttttgcaccacttgtaaaaaggtatttagcgattgcatttgctgtttgttgttttattttgctttatatatgacttgcagaggataaccataaaatgggtaattctctctgaagttgaataatcaccatgactgtaaatgaggggcacaattttggactctggcgccaaactgagtcataggccagtagcattacgtgtatctggtgccaccttgctgtttagatacaaatcataccgtcttttaaatattttgaagcccatttcagttaaataatgacatgtcatggtcctttggaatcttcatttaaatgttaaatctggaatcaaaatgaagcaaaaaatatctgtctccttttcactttcttcagtacataaatacattatttaatcaataagaattaactgtactaaatcatgtattatgctgttctagttacagcaaacactctttaagaaaaatatccaatacactaaataggtactatagtaatttttagacatggtacccattgatatgcatttaaaccttttactgctgtgttatgttgataacatatataaatattagataatgctaatgcttctgctgctgtcttttctgtaatattctctttcatgctgaatttactatgaccatttataagcagtgcagttaactacagatagcatttcaggacaaaatagatgactcaaaccatttattgcttaaaaaatagcttacgccatgctatgctataagcagcttttatgcacattgacaaatgaagagtaagcttcagcttgctaaaggaaactgtggaaccttttgtaacttttggtgatatggaaaattatttacaaaccgtcaaagaatatgaggaagttgctgtatgacatagtgctggcactgatattatccatcatctctttttggacacttctgtaaatgtgattggattgtttgaaagaagatttaaagtttcaaagttttttgttctgtttttgctttgcatttggagaaaatattgaaagcagggtatgttgtttcattcaccttgaaaaaaccatgagtaaatggggatatagaatctctgaatagctcgctaaaagattcaagcaagggacatgaattttgttccatctatcaataatatccagaagaacaacttttttaaagagtctatagcaaaaagcaaaaaaaaaaaaaaattctaaacacaaagtcaaaataaacctattgtaaaagcatttcgtgatgagcatgaaaaagattgtttaaagatgatccccccagctacccattttccaaaactacacagatcacagctcatttctctaagtggagcagttatcaagaaacccaaacaccaaaattgctactcttcacatttaatcctacaaaaagtactccaatttcaaaatatgtatgtaacctgcgatttcaatgattgttgttcatatacatcatgtattattttggcccattttgggcctaaaaaagaaaactatgccttaaaaatcagaaccttttctccccactatgcttatgtggccatctacagcacttagaataaaaacagatgttaaaatattcagtgaaagttttattggaaaaaggaattgagatatataattgagatttggtgaaattgaaggagaaaatttaagtgagtctttaaaatatattctgaatgaaaactgtattgaggattcatttttgttccttttttttctttttctcttttctcctttttcttctttttaatagtctagttttagtcagtcagtgaggaagaattgggccatgctaacgttatcacaagagaacaatggcagaaatggtattagttatataatatttaaggacaaactatatgttttgctgttttaacgtagtgactcactgaactaaatacataattgaccaacattaagtgtatttccaatacagaagggttgaaaatattacattataaactcttttgaaaaatgtatctaaaattttttaagttctgttttgattccactttttggttgagtttttatgtttttgttttcaggtagattaataaatctggcagctgatttctgcaaga

SEQ ID NO: 130814 - DNA, 3363 bp, Homo sapiens
  Payload ID: 5566
  Gene Symbol: ETV1
  Gene Name: ets variant 1
  Uniprot ID: P50549
  ENST ID: ENST00000403527
  CDS Start-End: 339-1652
gtcatgcatacattagagcctctgatgagtttgtctttggggactctggggctgtactacccagtgtcatcacaaattaccaggagaaattgcttccagctcacaatcacatctgcttttggcaagaactaatgcaccaagacttcaagttctaagcctctgttcagattttaattgcaattgatcaggtttatattattgtacctccagagacctcctagagccagaacccggctggcttgctgtttcctttagagcagcgcatatcattatttggtgttctggtggaggacttttctgatggcagaaattagtttctctgggttcatcaggacgggatgcttcaagatttaagtgcaagtgtcttctttccaccttgttcacaacacagaacgttagctcaggtacctgacaatgatgagcagtttgtaccagactatcaggctgaaagtttggcttttcatggcctgccactgaaaatcaagaaagaaccccacagtccatgttcagaaatcagctctgcctgcagtcaagaacagccctttaaattcagctatggagaaaagtgcctgtacaatgtcagtgcctatgatcagaagccacaagtgggaatgaggccctccaacccccccacaccatccagcacgccagtgtccccactgcatcatgcatctccaaactcaactcatacaccgaaacctgaccgggccttcccagctcacctccctccatcgcagtccataccagatagcagctaccccatggaccacagatttcgccgccagctttctgaaccctgtaactcctttcctcctttgccgacgatgccaagggaaggacgtcctatgtaccaacgccagatgtctgagccaaacatccccttcccaccacaaggctttaagcaggagtaccacgacccagtgtatgaacacaacaccatggttggcagtgcggccagccaaagctttccccctcctctgatgattaaacaggaacccagagattttgcatatgactcagaagtgcctagctgccactccatttatatgaggcaagaaggcttcctggctcatcccagcagaacagaaggctgtatgtttgaaaagggccccaggcagttttatgatgacacctgtgttgtcccagaaaaattcgatggagacatcaaacaagagccaggaatgtatcgggaaggacccacataccaacggcgaggatcacttcagctctggcagtttttggtagctcttctggatgacccttcaaattctcattttattgcctggactggtcgaggcatggaatttaaactgattgagcctgaagaggtggcccgacgttggggcattcagaaaaacaggccagctatgaactatgataaacttagccgttcactccgctattactatgagaaaggaattatgcaaaaggtggctggagagagatatgtctacaagtttgtgtgtgatccagaagcccttttctccatggcctttccagataatcagcgtccactgctgaagacagacatggaacgtcacatcaacgaggaggacacagtgcctctttctcactttgatgagagcatggcctacatgccggaagggggctgctgcaacccccacccctacaacgaaggctacgtgtattaacacaagtgacagtcaagcagggcgtttttgcgcttttccttttttctgcaagatacagagaattgctgaatctttgttttatttctgttgtttgtattttatttttaaataataatacacaaaaaggggcttttcctgttgcattattctatggtctgccatggactgtgcactttatttgagggtgggtgggagtaatctaaacatttattctgtgtaacaggaagctaatgggtgaatgggcagagggatttggggattactttttacttaggcttgggatggggtcctacaagttttgagtatgatgaaactatatcatgtctgtttgatttcataacaacataagataatgtttattttatcggggtatctatggtacagttaatttcacgttgtgtaaatatccacttggagactatttgccttgggcattttcccctgtcatttatgagtctctgcaggtgtacaaaaaaaccccaatctactgtaaatggcagtttaattgttagaaatgactgtttttgcaccacttgtaaaaaggtatttagcgattgcatttgctgtttgttgttttattttgctttatatatgacttgcagaggataaccataaaatgggtaattctctctgaagttgaataatcaccatgactgtaaatgaggggcacaattttggactctggcgccaaactgagtcataggccagtagcattacgtgtatctggtgccaccttgctgtttagatacaaatcataccgtcttttaaatattttgaagcccatttcagttaaataatgacatgtcatggtcctttggaatcttcatttaaatgttaaatctggaatcaaaatgaagcaaaaaatatctgtctccttttcactttcttcagtacataaatacattatttaatcaataagaattaactgtactaaatcatgtattatgctgttctagttacagcaaacactctttaagaaaaatatccaatacactaaataggtactatagtaatttttagacatggtacccattgatatgcatttaaaccttttactgctgtgttatgttgataacatatataaatattagataatgctaatgcttctgctgctgtcttttctgtaatattctctttcatgctgaatttactatgaccatttataagcagtgcagttaactacagatagcatttcaggacaaaatagatgactcaaaccatttattgcttaaaaaatagcttacgccatgctatgctataagcagcttttatgcacattgacaaatgaagagtaagcttcagcttgctaaaggaaactgtggaaccttttgtaacttttggtgatatggaaaattatttacaaaccgtcaaagaatatgaggaagttgctgtatgacatagtgctggcactgatattatccatcatctctttttggacacttctgtaaatgtgattggattgtttgaaagaagatttaaagtttcaaagttttttgttctgtttttgctttgcatttggagaaaatattgaaagcagggtatgttgtttcattcaccttgaaaaaaccatgagtaaatggggatatagaatctctgaatagctcgctaaaagattcaagcaagggacatgaattttgttccatctatcaataatatccagaagaacaacttttttaaagagtctatagcaaaaagcaaaaaaaaaaaaaaa

SEQ ID NO: 130815 - DNA, 4402 bp, Homo sapiens
  Payload ID: 5566
  Gene Symbol: ETV1
  Gene Name: ets variant 1
  Uniprot ID: P50549
  ENST ID: ENST00000405192
  CDS Start-End: 202-1566
gagctctgtcagaggcgctttcggcttccaagggggaagtgctgggctataattaatgtttttattaaatttggagggaagtttttgcagcctttcgcctagcgtggccttcaggttgatagaagtccagatcctgaggaaatctccagctaaatgctcaaaatataaaatactgagctgagatttgcgaagagcagcagcatggatggattttatgaccagcaagtgccttacatggtcaccaatagtcagcgtgggagaaattgtaacgagaaaccaacaaatgtcaggaaaagaaaattcattaacagagatctggctcatgattcagaagaactctttcaagatctaagtcaattacaggaaacatggcttgcagaagctcaggtacctgacaatgatgagcagtttgtaccagactatcaggctgaaagtttggcttttcatggcctgccactgaaaatcaagaaagaaccccacagtccatgttcagaaatcagctctgcctgcagtcaagaacagccctttaaattcagctatggagaaaagtgcctgtacaatgtcagtgcctatgatcagaagccacaagtgggaatgaggccctccaacccccccacaccatccagcacgccagtgtccccactgcatcatgcatctccaaactcaactcatacaccgaaacctgaccgggccttcccagctcacctccctccatcgcagtccataccagatagcagctaccccatggaccacagatttcgccgccagctttctgaaccctgtaactcctttcctcctttgccgacgatgccaagggaaggacgtcctatgtaccaacgccagatgtctgagccaaacatccccttcccaccacaaggctttaagcaggagtaccacgacccagtgtatgaacacaacaccatggttggcagtgcggccagccaaagctttccccctcctctgatgattaaacaggaacccagagattttgcatatgactcaggctgtatgtttgaaaagggccccaggcagttttatgatgacacctgtgttgtcccagaaaaattcgatggagacatcaaacaagagccaggaatgtatcgggaaggacccacataccaacggcgaggatcacttcagctctggcagtttttggtagctcttctggatgacccttcaaattctcattttattgcctggactggtcgaggcatggaatttaaactgattgagcctgaagaggtggcccgacgttggggcattcagaaaaacaggccagctatgaactatgataaacttagccgttcactccgctattactatgagaaaggaattatgcaaaaggtggctggagagagatatgtctacaagtttgtgtgtgatccagaagcccttttctccatggcctttccagataatcagcgtccactgctgaagacagacatggaacgtcacatcaacgaggaggacacagtgcctctttctcactttgatgagagcatggcctacatgccggaagggggctgctgcaacccccacccctacaacgaaggctacgtgtattaacacaagtgacagtcaagcagggcgtttttgcgcttttccttttttctgcaagatacagagaattgctgaatctttgttttatttctgttgtttgtattttatttttaaataataatacacaaaaaggggcttttcctgttgcattattctatggtctgccatggactgtgcactttatttgagggtgggtgggagtaatctaaacatttattctgtgtaacaggaagctaatgggtgaatgggcagagggatttggggattactttttacttaggcttgggatggggtcctacaagttttgagtatgatgaaactatatcatgtctgtttgatttcataacaacataagataatgtttattttatcggggtatctatggtacagttaatttcacgttgtgtaaatatccacttggagactatttgccttgggcattttcccctgtcatttatgagtctctgcaggtgtacaaaaaaaccccaatctactgtaaatggcagtttaattgttagaaatgactgtttttgcaccacttgtaaaaaggtatttagcgattgcatttgctgtttgttgttttattttgctttatatatgacttgcagaggataaccataaaatgggtaattctctctgaagttgaataatcaccatgactgtaaatgaggggcacaattttggactctggcgccaaactgagtcataggccagtagcattacgtgtatctggtgccaccttgctgtttagatacaaatcataccgtcttttaaatattttgaagcccatttcagttaaataatgacatgtcatggtcctttggaatcttcatttaaatgttaaatctggaatcaaaatgaagcaaaaaatatctgtctccttttcactttcttcagtacataaatacattatttaatcaataagaattaactgtactaaatcatgtattatgctgttctagttacagcaaacactctttaagaaaaatatccaatacactaaataggtactatagtaatttttagacatggtacccattgatatgcatttaaaccttttactgctgtgttatgttgataacatatataaatattagataatgctaatgcttctgctgctgtcttttctgtaatattctctttcatgctgaatttactatgaccatttataagcagtgcagttaactacagatagcatttcaggacaaaatagatgactcaaaccatttattgcttaaaaaatagcttacgccatgctatgctataagcagcttttatgcacattgacaaatgaagagtaagcttcagcttgctaaaggaaactgtggaaccttttgtaacttttggtgatatggaaaattatttacaaaccgtcaaagaatatgaggaagttgctgtatgacatagtgctggcactgatattatccatcatctctttttggacacttctgtaaatgtgattggattgtttgaaagaagatttaaagtttcaaagttttttgttctgtttttgctttgcatttggagaaaatattgaaagcagggtatgttgtttcattcaccttgaaaaaaccatgagtaaatggggatatagaatctctgaatagctcgctaaaagattcaagcaagggacatgaattttgttccatctatcaataatatccagaagaacaacttttttaaagagtctatagcaaaaagcaaaaaaaaaaaaaaattctaaacacaaagtcaaaataaacctattgtaaaagcatttcgtgatgagcatgaaaaagattgtttaaagatgatccccccagctacccattttccaaaactacacagatcacagctcatttctctaagtggagcagttatcaagaaacccaaacaccaaaattgctactcttcacatttaatcctacaaaaagtactccaatttcaaaatatgtatgtaacctgcgatttcaatgattgttgttcatatacatcatgtattattttggcccattttgggcctaaaaaagaaaactatgccttaaaaatcagaaccttttctccccactatgcttatgtggccatctacagcacttagaataaaaacagatgttaaaatattcagtgaaagttttattggaaaaaggaattgagatatataattgagatttggtgaaattgaaggagaaaatttaagtgagtctttaaaatatattctgaatgaaaactgtattgaggattcatttttgttccttttttttctttttctcttttctcctttttcttctttttaatagtctagttttagtcagtcagtgaggaagaattgggccatgctaacgttatcacaagagaacaatggcagaaatggtattagttatataatatttaaggacaaactatatgttttgctgttttaacgtagtgactcactgaactaaatacataattgaccaacattaagtgtatttccaatacagaagggttgaaaatattacattataaactcttttgaaaaatgtatctaaaattttttaagttctgttttgattccactttttggttgagtttttatgtttttgttttcaggtagattaataaatctggcagctgatttctgcaagattcttgtgttttgaatttctcattgaattggctactcaaacatagaaatcatttgttaatgatgtaatgtcttctctcagcttttatcttcactgctgtttgctgtctcttgatgatgacatgttaatacccaatagattaattgcaacaaacacttatactcaaataactaagtaaaaataatttttcttgttatgtccatgaaaagtgcttcagaataaaaatccacaagactgac

SEQ ID NO: 130816 - DNA, 3391 bp, Homo sapiens
  Payload ID: 5566
  Gene Symbol: ETV1
  Gene Name: ets variant 1
  Uniprot ID: P50549
  ENST ID: ENST00000405218
  CDS Start-End: 473-1906
agtatccccaggcgccttaacaataagcagcgggttacagaggaaatcgagtctctccgtggcgcttccaggctgaggacccagcgcctaccggccgagcaccccctagggcagaggggcgagggagacccgcgggaaggggcagcaagccgcctgattgacagcccgaaatctgatcttgtgaaagagacgcggagccaatgggaggcagcgatccatcagtttggattggaggcccctggaggagaagtagaggaaaaaccaccgaattgagctctgtcagaggcgctttcggcttccaagggggaagtgctgggctataattaatgtttttattaaatttggagggaagtttttgcagcctttcgcctagcgtggccttcaggttgatagaagtccagatcctgaggaaatctccagctaaatgctcaaaatataaaatactgagctgagatttgcgaagagcagcagcatggatggattttatgaccagcaagtgccttacatggtcaccaatagtcagcgtgggagaaattgtaacgagaaaccaacaaatgtcaggaaaagaaaattcattaacagagatctggctcatgattcagaagaactctttcaagatctaagtcaattacaggaaacatggcttgcagaagctcaggtacctgacaatgatgagcagtttgtaccagactatcaggctgaaagtttggcttttcatggcctgccactgaaaatcaagaaagaaccccacagtccatgttcagaaatcagctctgcctgcagtcaagaacagccctttaaattcagctatggagaaaagtgcctgtacaatgtcagtgcctatgatcagaagccacaagtgggaatgaggccctccaacccccccacaccatccagcacgccagtgtccccactgcatcatgcatctccaaactcaactcatacaccgaaacctgaccgggccttcccagctcacctccctccatcgcagtccataccagatagcagctaccccatggaccacagatttcgccgccagctttctgaaccctgtaactcctttcctcctttgccgacgatgccaagggaaggacgtcctatgtaccaacgccagatgtctgagccaaacatccccttcccaccacaaggctttaagcaggagtaccacgacccagtgtatgaacacaacaccatggttggcagtgcggccagccaaagctttccccctcctctgatgattaaacaggaacccagagattttgcatatgactcagaagtgcctagctgccactccatttatatgaggcaagaaggcttcctggctcatcccagcagaacagaaggctgtatgtttgaaaagggccccaggcagttttatgatgacacctgtgttgtcccagaaaaattcgatggagacatcaaacaagagccaggaatgtatcgggaaggacccacataccaacggcgaggatcacttcagctctggcagtttttggtagctcttctggatgacccttcaaattctcattttattgcctggactggtcgaggcatggaatttaaactgattgagcctgaagaggtggcccgacgttggggcattcagaaaaacaggccagctatgaactatgataaacttagccgttcactccgctattactatgagaaaggaattatgcaaaaggtggctggagagagatatgtctacaagtttgtgtgtgatccagaagcccttttctccatggcctttccagataatcagcgtccactgctgaagacagacatggaacgtcacatcaacgaggaggacacagtgcctctttctcactttgatgagagcatggcctacatgccggaagggggctgctgcaacccccacccctacaacgaaggctacgtgtattaacacaagtgacagtcaagcagggcgtttttgcgcttttccttttttctgcaagatacagagaattgctgaatctttgttttatttctgttgtttgtattttatttttaaataataatacacaaaaaggggcttttcctgttgcattattctatggtctgccatggactgtgcactttatttgagggtgggtgggagtaatctaaacatttattctgtgtaacaggaagctaatgggtgaatgggcagagggatttggggattactttttacttaggcttgggatggggtcctacaagttttgagtatgatgaaactatatcatgtctgtttgatttcataacaacataagataatgtttattttatcggggtatctatggtacagttaatttcacgttgtgtaaatatccacttggagactatttgccttgggcattttcccctgtcatttatgagtctctgcaggtgtacaaaaaaaccccaatctactgtaaatggcagtttaattgttagaaatgactgtttttgcaccacttgtaaaaaggtatttagcgattgcatttgctgtttgttgttttattttgctttatatatgacttgcagaggataaccataaaatgggtaattctctctgaagttgaataatcaccatgactgtaaatgaggggcacaattttggactctggcgccaaactgagtcataggccagtagcattacgtgtatctggtgccaccttgctgtttagatacaaatcataccgtcttttaaatattttgaagcccatttcagttaaataatgacatgtcatggtcctttggaatcttcatttaaatgttaaatctggaatcaaaatgaagcaaaaaatatctgtctccttttcactttcttcagtacataaatacattatttaatcaataagaattaactgtactaaatcatgtattatgctgttctagttacagcaaacactctttaagaaaaatatccaatacactaaataggtactatagtaatttttagacatggtacccattgatatgcatttaaaccttttactgctgtgttatgttgataacatatataaatattagataatgctaatgcttctgctgctgtcttttctgtaatattctctttcatgctgaatttactatgaccatttataagcagtgcagttaactacagatagcatttcaggacaaaatagatgactcaaaccatttattgcttaaaaaatagcttacgccatgctatgctataagcagcttttatgcacattgacaaatgaagagtaagcttcagcttgctaaaggaaactgtggaaccttttgtaacttttggtgatatggaaaattatttacaaaccgtcaaagaatatgaggaagttgctgtatgacatagtgctggcactgatattatccatcatctctttttggacacttctgtaaatgtgattggattgtttgaaagaagatttaaagtttc

SEQ ID NO: 130817 - DNA, 1603 bp, Homo sapiens
  Payload ID: 5566
  Gene Symbol: ETV1
  Gene Name: ets variant 1
  Uniprot ID: P50549
  ENST ID: ENST00000403685
  CDS Start-End: 216-1595
accccctgcttggttgcaccctcagatagtacccatgagcttcactgttcagcctcggggcccaggcgcttcctggaatctctccttggccggggttaaaatgcagttcccgctcaaaatgcttataggttgatagaagtccagatcctgaggaaatctccagctaaatgctcaaaatataaaatactgagctgagatttgcgaagagcagcagcatggatggattttatgaccagcaagtgccttacatggtcaccaatagtcagcgtgggagaaattgtaacgagaaaccaacaaatgtcaggaaaagaaaattcattaacagagatctggctcatgattcagaagaactctttcaagatctaagtcaattacaggaaacatggcttgcagaagtggcttttcatggcctgccactgaaaatcaagaaagaaccccacagtccatgttcagaaatcagctctgcctgcagtcaagaacagccctttaaattcagctatggagaaaagtgcctgtacaatgtcagtgcctatgatcagaagccacaagtgggaatgaggccctccaacccccccacaccatccagcacgccagtgtccccactgcatcatgcatctccaaactcaactcatacaccgaaacctgaccgggccttcccagctcacctccctccatcgcagtccataccagatagcagctaccccatggaccacagatttcgccgccagctttctgaaccctgtaactcctttcctcctttgccgacgatgccaagggaaggacgtcctatgtaccaacgccagatgtctgagccaaacatccccttcccaccacaaggctttaagcaggagtaccacgacccagtgtatgaacacaacaccatggttggcagtgcggccagccaaagctttccccctcctctgatgattaaacaggaacccagagattttgcatatgactcagaagtgcctagctgccactccatttatatgaggcaagaaggcttcctggctcatcccagcagaacagaaggctgtatgtttgaaaagggccccaggcagttttatgatgacacctgtgttgtcccagaaaaattcgatggagacatcaaacaagagccaggaatgtatcgggaaggacccacataccaacggcgaggatcacttcagctctggcagtttttggtagctcttctggatgacccttcaaattctcattttattgcctggactggtcgaggcatggaatttaaactgattgagcctgaagaggtggcccgacgttggggcattcagaaaaacaggccagctatgaactatgataaacttagccgttcactccgctattactatgagaaaggaattatgcaaaaggtggctggagagagatatgtctacaagtttgtgtgtgatccagaagcccttttctccatggcctttccagataatcagcgtccactgctgaagacagacatggaacgtcacatcaacgaggaggacacagtgcctctttctcactttgatgagagcatggcctacatgccggaagggggctgctgcaacccccacccctacaacgaaggctacgtgtattaacacaagtg

SEQ ID NO: 130818 - DNA, 554 bp, Homo sapiens
  Payload ID: 5566
  Gene Symbol: ETV1
  Gene Name: ets variant 1
  ENST ID: ENST00000421381
  CDS Start-End: 186-554
cgttattggctgcgggaagaacctcgccgggacctaacccgaagctccgccccctcgcggttaccctggatacccgtcaggctcgggctgcagagaaggttgatagaagtccagatcctgaggaaatctccagctaaatgctcaaaatataaaatactgagctgagatttgcgaagagcagcagcatggatggattttatgaccagcaagtgccttacatggtcaccaatagtcagcgtgggagaaattgtaacgagaaaccaacaaatgtcaggaaaagaaaattcattaacagagatctggctcatgattcagaagaactctttcaagatctaagtcaattacaggaaacatggcttgcagaagctcaggtacctgacaatgatgagcagtttgtaccagactatcaggctgaaagtttggcttttcatggcctgccactgaaaatcaagaaagaaccccacagtccatgttcagaaatcagctctgcctgcagtcaagaacagccctttaaattcagctatggagaaaagtgcctgtacaatgtcagtgcc

SEQ ID NO: 130819 - DNA, 1141 bp, Homo sapiens
  Payload ID: 5566
  Gene Symbol: ETV1
  Gene Name: ets variant 1
  ENST ID: ENST00000438956
  CDS Start-End: 277-1141
agtgtcatcacaaattaccaggagaaattgcttccagctcacaatcacatctgcttttggcaagaactaatgcaccaagacttcaagttctaagcctctgttcagattttaattgcaattgatcaggtttatattattgtacctccagagacctcctagagccagaacccggctggcttgctgtttcctttagagcagcgcatatcattatttggtgttctggtggaggacttttctgatggcagaaattagtttctctgggttcatcaggacgggatgcttcaagatttaagtgcaagtgtcttctttccaccttgttcacaacacagaacgttagtggcttttcatggcctgccactgaaaatcaagaaagaaccccacagtccatgttcagaaatcagctctgcctgcagtcaagaacagccctttaaattcagctatggagaaaagtgcctgtacaatgtcagtgcctatgatcagaagccacaagtgggaatgaggccctccaacccccccacaccatccagcacgccagtgtccccactgcatcatgcatctccaaactcaactcatacaccgaaacctgaccgggccttcccagctcacctccctccatcgcagtccataccagatagcagctaccccatggaccacagatttcgccgccagctttctgaaccctgtaactcctttcctcctttgccgacgatgccaagggaaggacgtcctatgtaccaacgccagatgtctgagccaaacatccccttcccaccacaaggctttaagcaggagtaccacgacccagtgtatgaacacaacaccatggttggcagtgcggccagccaaagctttccccctcctctgatgattaaacaggaacccagagattttgcatatgactcagaagtgcctagctgccactccatttatatgaggcaagaaggcttcctggctcatcccagcagaacagaaggctgtatgtttgaaaagggccccaggcagttttatgatgacacctgtgttgtcccagaaaaattcgatggagacatcaaacaagagccaggaatgtatcgggaaggacccacataccaacggcgaggatcacttcagctctggcagtttttggtagctcttctggatg

SEQ ID NO: 130820 - DNA, 784 bp, Homo sapiens
  Payload ID: 5566
  Gene Symbol: ETV1
  Gene Name: ets variant 1
  ENST ID: ENST00000443608
  CDS Start-End: 266-784
aaattaccaggagaaattgcttccagctcacaatcacatctgcttttggcaagaactaatgcaccaagacttcaagttctaagcctctgttcagattttaattgcaattgatcaggtttatattattgtacctccagagacctcctagagccagaacccggctggcttgctgtttcctttagagcagcgcatatcattatttggtgttctggtggaggacttttctgatggcagaaattagtttctctgggttcatcaggacgggatgcttcaagatttaagtgcaagtgtcttctttccaccttgttcacaacacagaacgttagctcaggtacctgacaatgatgagcagtttgtaccagactatcaggctgaaagtttggcttttcatggcctgccactgaaaatcaagaaagaaccccacagtccatgttcagaaatcagctctgcctgcagtcaagaacagccctttaaattcagctatggagaaaagtgcctgtacaatgtcagatttcgccgccagctttctgaaccctgtaactcctttcctcctttgccgacgatgccaagggaaggacgtcctatgtaccaacgccagatgtctgagccaaacatccccttcccaccacaaggctttaagcaggagtaccacgacccagtgtatgaacacaacaccatggttggcagtgcggccagccaaagctttccccctcctctgatgattaaacaggaacccagagattttgcatatgactcagaagtgcctagctgccactccatttat

SEQ ID NO: 130821 - DNA, 6740 bp, Homo sapiens
  Payload ID: 5566
  Gene Symbol: ETV1
  Gene Name: ets variant 1
  Uniprot ID: P50549
  ENST ID: ENST00000430479
  CDS Start-End: 669-2102
gtatccccaggcgccttaacaataagcagcgggttacagaggaaatcgagtctctccgtggcgcttccaggctgaggacccagcgcctaccggccgagcaccccctagggcagaggggcgagggagacccgcgggaaggggcagcaagccgcctgattgacagcccgaaatctgatcttgtgaaagagacgcggagccaatgggaggcagcgatccatcagtttggattggaggcccctggaggagaagtagaggaaaaaccaccgaattgagctctgtcagaggcgctttcggcttccaagggggaagtgctgggctataattaatgtttttattaaatttggagggaagtttttgcagcctttcgcctagcgtggccttcagtcccgttaggtgcaaagcaagtctcgttgatcgccattgctagttttgcacacgtttgcgaatcagagctgcccggggtacaccgaccgcgcagggaaacatcgagagtgtaaataaatacatcgcctcttgttcggatttttgctactaccgaaaatatgtaaattgtgaactctgttggctctctttggatccaggttgatagaagtccagatcctgaggaaatctccagctaaatgctcaaaatataaaatactgagctgagatttgcgaagagcagcagcatggatggattttatgaccagcaagtgccttacatggtcaccaatagtcagcgtgggagaaattgtaacgagaaaccaacaaatgtcaggaaaagaaaattcattaacagagatctggctcatgattcagaagaactctttcaagatctaagtcaattacaggaaacatggcttgcagaagctcaggtacctgacaatgatgagcagtttgtaccagactatcaggctgaaagtttggcttttcatggcctgccactgaaaatcaagaaagaaccccacagtccatgttcagaaatcagctctgcctgcagtcaagaacagccctttaaattcagctatggagaaaagtgcctgtacaatgtcagtgcctatgatcagaagccacaagtgggaatgaggccctccaacccccccacaccatccagcacgccagtgtccccactgcatcatgcatctccaaactcaactcatacaccgaaacctgaccgggccttcccagctcacctccctccatcgcagtccataccagatagcagctaccccatggaccacagatttcgccgccagctttctgaaccctgtaactcctttcctcctttgccgacgatgccaagggaaggacgtcctatgtaccaacgccagatgtctgagccaaacatccccttcccaccacaaggctttaagcaggagtaccacgacccagtgtatgaacacaacaccatggttggcagtgcggccagccaaagctttccccctcctctgatgattaaacaggaacccagagattttgcatatgactcagaagtgcctagctgccactccatttatatgaggcaagaaggcttcctggctcatcccagcagaacagaaggctgtatgtttgaaaagggccccaggcagttttatgatgacacctgtgttgtcccagaaaaattcgatggagacatcaaacaagagccaggaatgtatcgggaaggacccacataccaacggcgaggatcacttcagctctggcagtttttggtagctcttctggatgacccttcaaattctcattttattgcctggactggtcgaggcatggaatttaaactgattgagcctgaagaggtggcccgacgttggggcattcagaaaaacaggccagctatgaactatgataaacttagccgttcactccgctattactatgagaaaggaattatgcaaaaggtggctggagagagatatgtctacaagtttgtgtgtgatccagaagcccttttctccatggcctttccagataatcagcgtccactgctgaagacagacatggaacgtcacatcaacgaggaggacacagtgcctctttctcactttgatgagagcatggcctacatgccggaagggggctgctgcaacccccacccctacaacgaaggctacgtgtattaacacaagtgacagtcaagcagggcgtttttgcgcttttccttttttctgcaagatacagagaattgctgaatctttgttttatttctgttgtttgtattttatttttaaataataatacacaaaaaggggcttttcctgttgcattattctatggtctgccatggactgtgcactttatttgagggtgggtgggagtaatctaaacatttattctgtgtaacaggaagctaatgggtgaatgggcagagggatttggggattactttttacttaggcttgggatggggtcctacaagttttgagtatgatgaaactatatcatgtctgtttgatttcataacaacataagataatgtttattttatcggggtatctatggtacagttaatttcacgttgtgtaaatatccacttggagactatttgccttgggcattttcccctgtcatttatgagtctctgcaggtgtacaaaaaaaccccaatctactgtaaatggcagtttaattgttagaaatgactgtttttgcaccacttgtaaaaaggtatttagcgattgcatttgctgtttgttgttttattttgctttatatatgacttgcagaggataaccataaaatgggtaattctctctgaagttgaataatcaccatgactgtaaatgaggggcacaattttggactctggcgccaaactgagtcataggccagtagcattacgtgtatctggtgccaccttgctgtttagatacaaatcataccgtcttttaaatattttgaagcccatttcagttaaataatgacatgtcatggtcctttggaatcttcatttaaatgttaaatctggaatcaaaatgaagcaaaaaatatctgtctccttttcactttcttcagtacataaatacattatttaatcaataagaattaactgtactaaatcatgtattatgctgttctagttacagcaaacactctttaagaaaaatatccaatacactaaataggtactatagtaatttttagacatggtacccattgatatgcatttaaaccttttactgctgtgttatgttgataacatatataaatattagataatgctaatgcttctgctgctgtcttttctgtaatattctctttcatgctgaatttactatgaccatttataagcagtgcagttaactacagatagcatttcaggacaaaatagatgactcaaaccatttattgcttaaaaaatagcttacgccatgctatgctataagcagcttttatgcacattgacaaatgaagagtaagcttcagcttgctaaaggaaactgtggaaccttttgtaacttttggtgatatggaaaattatttacaaaccgtcaaagaatatgaggaagttgctgtatgacatagtgctggcactgatattatccatcatctctttttggacacttctgtaaatgtgattggattgtttgaaagaagatttaaagtttcaaagttttttgttctgtttttgctttgcatttggagaaaatattgaaagcagggtatgttgtttcattcaccttgaaaaaaccatgagtaaatggggatatagaatctctgaatagctcgctaaaagattcaagcaagggacatgaattttgttccatctatcaataatatccagaagaacaacttttttaaagagtctatagcaaaaagcaaaaaaaaaaaaaaattctaaacacaaagtcaaaataaacctattgtaaaagcatttcgtgatgagcatgaaaaagattgtttaaagatgatccccccagctacccattttccaaaactacacagatcacagctcatttctctaagtggagcagttatcaagaaacccaaacaccaaaattgctactcttcacatttaatcctacaaaaagtactccaatttcaaaatatgtatgtaacctgcgatttcaatgattgttgttcatatacatcatgtattattttggcccattttgggcctaaaaaagaaaactatgccttaaaaatcagaaccttttctccccactatgcttatgtggccatctacagcacttagaataaaaacagatgttaaaatattcagtgaaagttttattggaaaaaggaattgagatatataattgagatttggtgaaattgaaggagaaaatttaagtgagtctttaaaatatattctgaatgaaaactgtattgaggattcatttttgttccttttttttctttttctcttttctcctttttcttctttttaatagtctagttttagtcagtcagtgaggaagaattgggccatgctaacgttatcacaagagaacaatggcagaaatggtattagttatataatatttaaggacaaactatatgttttgctgttttaacgtagtgactcactgaactaaatacataattgaccaacattaagtgtatttccaatacagaagggttgaaaatattacattataaactcttttgaaaaatgtatctaaaattttttaagttctgttttgattccactttttggttgagtttttatgtttttgttttcaggtagattaataaatctggcagctgatttctgcaagattcttgtgttttgaatttctcattgaattggctactcaaacatagaaatcatttgttaatgatgtaatgtcttctctcagcttttatcttcactgctgtttgctgtctcttgatgatgacatgttaatacccaatagattaattgcaacaaacacttatactcaaataactaagtaaaaataatttttcttgttatgtccatgaaaagtgcttcagaataaaaatccacaagactgacagtgcagaacatttttctcaaatcatgggcggatcttggaggtctagtttcccgtagatgctgtaaccaattaccacaacttcagtaatttacacaaatttatcttatagttctggaggcagaagttcaaaagaagccttaagagactaaaaccaagatgtccttaggtctggttccttctggaggctccaggggagattcttccagctttcacttctagagtctgctgacattccttggctcctggctacatcacttcaatctctgcttccatggtcacatactcttctactatagtcaaatttccttcctgcctcttataaggatgcttgtgattacatttaggggatgctcagataatccaggacaatctctccatctcaagatccttaacttaatgacgtgtgccaagtccctttggctagataattattcataggtcccagggattaggacatggatgtaaggggtgagggcagggctgttattcagaacaccgcacggaggaggaagactgtgtagcaaagactctaattgatttactcaggaacagtggagttctgctgagggatctaggatttgaaagtactagagtttgcttttatttaccactgagatattttccccttattctgcataaataattttgaaaactttctatattaaatttcaactattccactaaaatgtctggtaatcacatcaagcctttagattattcaaatccttccccagcccccaggaaaacactaagtcatgaaacagaaaaacagaaggtatgataataatagtaataacagttaaatcagtggtctaatccagattttattttttaatacatttcttttggtgttaatatgggttactatgtgatcttatcatttgctagtgattattacttattaggtaagaacaatgtgtaaaatatgtctattactcaaaagaacaattgcaaaatgagtcaacttatctttatataaccaggaaagaaatatattgccagaagctacagaattttgccagatgatagggatttctaaaatgagccactttgtctatcatgcagccttttcagagcttgtaatgagaaaacattacagaggagaaggtcatttggatgtttgttacttggaatcctagaaaacaaaaactaaaatttaaaaataagaagtgagtaagctattttccatttgcgatttggtatggagaagagaggaaatagaattattaaaaaaatacaaattgggtaaaagtgatggtggaaaaaatataaagaaggcaaatgtacatattaagcaattctactaagaattggaaaaatcaagtttcaaaaagatggtaatagttgggcatgatactagaaaatttcacccagtttattcagagctcaactagtacttttaggacttctttttttatatacatgagactcactttgacatacttaaaaaaaaaacagtttatggaaagtacagtttaagaggagaatttgattagactaagtggatatctttatagaaatattaatgatttcagaattttcagttacaagtgtatataccgtggctattgtttatggattcatatgtaaggtagggtcttttttgcatatagactccagtattagttactttcattctaaaattatatttatgcttctatggggaagaaaatttttaattcacttggttgtattaaaattatacttacggtttgagaaaacatgctatgaaaatcatgattatagcaaattaaatatgctcaaaatttaaatctaaaataaaagcccagaaactgaaaat

SEQ ID NO: 130822 - DNA, 546 bp, Homo sapiens
  Payload ID: 5566
  Gene Symbol: ETV1
  Gene Name: ets variant 1
  ENST ID: ENST00000433547
  CDS Start-End: 487-546
agaggcgctttcggcttccaagggggaagtgctgggctataattaatgtttttattaaatttggagggaagtttttgcagcctttcgcctagcgtggccttcaggtgggtctttccaacaactttttatgtctctccagataattgcatggttgtgggtcgcaaaaactatcctgatgaaagaggtgtctccgtctctttagtcccgttaggtgcaaagcaagtctcgttgatcgccattgctagttttgcacacgtttgcgaatcagagctgcccggggtacaccgaccgcgcagggaaacatcgagagtgtaaataaatacatcgcctcttgttcggatttttgctactaccgaaaatatgtaaattgtgaactctgttggctctctttggatccaggttgatagaagtccagatcctgaggaaatctccagctaaatgctcaaaatataaaatactgagctgagatttgcgaagagcagcagcatggatggattttatgaccagcaagtgccttacatggtcaccaatagtcagcgtgggaga

SEQ ID NO: 130823 - DNA, 580 bp, Homo sapiens
  Payload ID: 5566
  Gene Symbol: ETV1
  Gene Name: ets variant 1
  ENST ID: ENST00000431887
  CDS Start-End: 295-580
aagctccgccccctcgcggttaccctggatacccgtcaggctcgggctgcagagaaggaggatcagggcaagtggcttcagagatgcagccctcactgcttaacgtcctagttattgtccttgaaacccgagccatctcaccgctcgcccccaaccctgggctctggctgtttaaaagctggagaggaagtgaaagcgtcaagtacagttgatagaagtccagatcctgaggaaatctccagctaaatgctcaaaatataaaatactgagctgagatttgcgaagagcagcagcatggatggattttatgaccagcaagtgccttacatggtcaccaatagtcagcgtgggagaaattgtaacgagaaaccaacaaatgtcaggaaaagaaaattcattaacagagatctggctcatgattcagaagaactctttcaagatctaagtcaattacaggaaacatggcttgcagaagctcaggtacctgacaatgatgagcagtttgtaccagactatcaggctgaaagtttggcttttcatggcctgccactgaaaatcaagaaagaaccccacagtccat

SEQ ID NO: 130824 - DNA, 6231 bp, Homo sapiens
  Payload ID: 5566
  Gene Symbol: ETV1
  Gene Name: ets variant 1
  Uniprot ID: P50549
  ENST ID: ENST00000420159
  CDS Start-End: 339-1598
gtcatgcatacattagagcctctgatgagtttgtctttggggactctggggctgtactacccagtgtcatcacaaattaccaggagaaattgcttccagctcacaatcacatctgcttttggcaagaactaatgcaccaagacttcaagttctaagcctctgttcagattttaattgcaattgatcaggtttatattattgtacctccagagacctcctagagccagaacccggctggcttgctgtttcctttagagcagcgcatatcattatttggtgttctggtggaggacttttctgatggcagaaattagtttctctgggttcatcaggacgggatgcttcaagatttaagtgcaagtgtcttctttccaccttgttcacaacacagaacgttagtggcttttcatggcctgccactgaaaatcaagaaagaaccccacagtccatgttcagaaatcagctctgcctgcagtcaagaacagccctttaaattcagctatggagaaaagtgcctgtacaatgtcagtgcctatgatcagaagccacaagtgggaatgaggccctccaacccccccacaccatccagcacgccagtgtccccactgcatcatgcatctccaaactcaactcatacaccgaaacctgaccgggccttcccagctcacctccctccatcgcagtccataccagatagcagctaccccatggaccacagatttcgccgccagctttctgaaccctgtaactcctttcctcctttgccgacgatgccaagggaaggacgtcctatgtaccaacgccagatgtctgagccaaacatccccttcccaccacaaggctttaagcaggagtaccacgacccagtgtatgaacacaacaccatggttggcagtgcggccagccaaagctttccccctcctctgatgattaaacaggaacccagagattttgcatatgactcagaagtgcctagctgccactccatttatatgaggcaagaaggcttcctggctcatcccagcagaacagaaggctgtatgtttgaaaagggccccaggcagttttatgatgacacctgtgttgtcccagaaaaattcgatggagacatcaaacaagagccaggaatgtatcgggaaggacccacataccaacggcgaggatcacttcagctctggcagtttttggtagctcttctggatgacccttcaaattctcattttattgcctggactggtcgaggcatggaatttaaactgattgagcctgaagaggtggcccgacgttggggcattcagaaaaacaggccagctatgaactatgataaacttagccgttcactccgctattactatgagaaaggaattatgcaaaaggtggctggagagagatatgtctacaagtttgtgtgtgatccagaagcccttttctccatggcctttccagataatcagcgtccactgctgaagacagacatggaacgtcacatcaacgaggaggacacagtgcctctttctcactttgatgagagcatggcctacatgccggaagggggctgctgcaacccccacccctacaacgaaggctacgtgtattaacacaagtgacagtcaagcagggcgtttttgcgcttttccttttttctgcaagatacagagaattgctgaatctttgttttatttctgttgtttgtattttatttttaaataataatacacaaaaaggggcttttcctgttgcattattctatggtctgccatggactgtgcactttatttgagggtgggtgggagtaatctaaacatttattctgtgtaacaggaagctaatgggtgaatgggcagagggatttggggattactttttacttaggcttgggatggggtcctacaagttttgagtatgatgaaactatatcatgtctgtttgatttcataacaacataagataatgtttattttatcggggtatctatggtacagttaatttcacgttgtgtaaatatccacttggagactatttgccttgggcattttcccctgtcatttatgagtctctgcaggtgtacaaaaaaaccccaatctactgtaaatggcagtttaattgttagaaatgactgtttttgcaccacttgtaaaaaggtatttagcgattgcatttgctgtttgttgttttattttgctttatatatgacttgcagaggataaccataaaatgggtaattctctctgaagttgaataatcaccatgactgtaaatgaggggcacaattttggactctggcgccaaactgagtcataggccagtagcattacgtgtatctggtgccaccttgctgtttagatacaaatcataccgtcttttaaatattttgaagcccatttcagttaaataatgacatgtcatggtcctttggaatcttcatttaaatgttaaatctggaatcaaaatgaagcaaaaaatatctgtctccttttcactttcttcagtacataaatacattatttaatcaataagaattaactgtactaaatcatgtattatgctgttctagttacagcaaacactctttaagaaaaatatccaatacactaaataggtactatagtaatttttagacatggtacccattgatatgcatttaaaccttttactgctgtgttatgttgataacatatataaatattagataatgctaatgcttctgctgctgtcttttctgtaatattctctttcatgctgaatttactatgaccatttataagcagtgcagttaactacagatagcatttcaggacaaaatagatgactcaaaccatttattgcttaaaaaatagcttacgccatgctatgctataagcagcttttatgcacattgacaaatgaagagtaagcttcagcttgctaaaggaaactgtggaaccttttgtaacttttggtgatatggaaaattatttacaaaccgtcaaagaatatgaggaagttgctgtatgacatagtgctggcactgatattatccatcatctctttttggacacttctgtaaatgtgattggattgtttgaaagaagatttaaagtttcaaagttttttgttctgtttttgctttgcatttggagaaaatattgaaagcagggtatgttgtttcattcaccttgaaaaaaccatgagtaaatggggatatagaatctctgaatagctcgctaaaagattcaagcaagggacatgaattttgttccatctatcaataatatccagaagaacaacttttttaaagagtctatagcaaaaagcaaaaaaaaaaaaaaattctaaacacaaagtcaaaataaacctattgtaaaagcatttcgtgatgagcatgaaaaagattgtttaaagatgatccccccagctacccattttccaaaactacacagatcacagctcatttctctaagtggagcagttatcaagaaacccaaacaccaaaattgctactcttcacatttaatcctacaaaaagtactccaatttcaaaatatgtatgtaacctgcgatttcaatgattgttgttcatatacatcatgtattattttggcccattttgggcctaaaaaagaaaactatgccttaaaaatcagaaccttttctccccactatgcttatgtggccatctacagcacttagaataaaaacagatgttaaaatattcagtgaaagttttattggaaaaaggaattgagatatataattgagatttggtgaaattgaaggagaaaatttaagtgagtctttaaaatatattctgaatgaaaactgtattgaggattcatttttgttccttttttttctttttctcttttctcctttttcttctttttaatagtctagttttagtcagtcagtgaggaagaattgggccatgctaacgttatcacaagagaacaatggcagaaatggtattagttatataatatttaaggacaaactatatgttttgctgttttaacgtagtgactcactgaactaaatacataattgaccaacattaagtgtatttccaatacagaagggttgaaaatattacattataaactcttttgaaaaatgtatctaaaattttttaagttctgttttgattccactttttggttgagtttttatgtttttgttttcaggtagattaataaatctggcagctgatttctgcaagattcttgtgttttgaatttctcattgaattggctactcaaacatagaaatcatttgttaatgatgtaatgtcttctctcagcttttatcttcactgctgtttgctgtctcttgatgatgacatgttaatacccaatagattaattgcaacaaacacttatactcaaataactaagtaaaaataatttttcttgttatgtccatgaaaagtgcttcagaataaaaatccacaagactgacagtgcagaacatttttctcaaatcatgggcggatcttggaggtctagtttcccgtagatgctgtaaccaattaccacaacttcagtaatttacacaaatttatcttatagttctggaggcagaagttcaaaagaagccttaagagactaaaaccaagatgtccttaggtctggttccttctggaggctccaggggagattcttccagctttcacttctagagtctgctgacattccttggctcctggctacatcacttcaatctctgcttccatggtcacatactcttctactatagtcaaatttccttcctgcctcttataaggatgcttgtgattacatttaggggatgctcagataatccaggacaatctctccatctcaagatccttaacttaatgacgtgtgccaagtccctttggctagataattattcataggtcccagggattaggacatggatgtaaggggtgagggcagggctgttattcagaacaccgcacggaggaggaagactgtgtagcaaagactctaattgatttactcaggaacagtggagttctgctgagggatctaggatttgaaagtactagagtttgcttttatttaccactgagatattttccccttattctgcataaataattttgaaaactttctatattaaatttcaactattccactaaaatgtctggtaatcacatcaagcctttagattattcaaatccttccccagcccccaggaaaacactaagtcatgaaacagaaaaacagaaggtatgataataatagtaataacagttaaatcagtggtctaatccagattttattttttaatacatttcttttggtgttaatatgggttactatgtgatcttatcatttgctagtgattattacttattaggtaagaacaatgtgtaaaatatgtctattactcaaaagaacaattgcaaaatgagtcaacttatctttatataaccaggaaagaaatatattgccagaagctacagaattttgccagatgatagggatttctaaaatgagccactttgtctatcatgcagccttttcagagcttgtaatgagaaaacattacagaggagaaggtcatttggatgtttgttacttggaatcctagaaaacaaaaactaaaatttaaaaataagaagtgagtaagctattttccatttgcgatttggtatggagaagagaggaaatagaattattaaaaaaatacaaattgggtaaaagtgatggtggaaaaaatataaagaaggcaaatgtacatattaagcaattctactaagaattggaaaaatcaagtttcaaaaagatggtaatagttgggcatgatactagaaaatttcacccagtttattcagagctcaactagtacttttaggacttctttttttatatacatgagactcactttgacatacttaaaaaaaaaacagtttatggaaagtacagtttaagaggagaatttgattagactaagtggatatctttatagaaatattaatgatttcagaattttcagttacaagtgtatataccgtggctattgtttatggattcatatgtaaggtagggtcttttttgcatatagactccagtattagttactttcattctaaaattatatttatgcttctatggggaagaaaatttttaattcacttggttgtattaaaattatacttacggtttgagaaaacatgctatgaaaatcatgattatagcaaattaaatatgctcaaaatttaaatctaaaataaaagcccagaaactg

SEQ ID NO: 130825 - DNA, 2050 bp, Homo sapiens
  Payload ID: 5566
  Gene Symbol: ETV1
  Gene Name: ets variant 1
  ENST ID: ENST00000443137
  CDS Start-End: 423-1526
aagtggcttcagagatgcagccctcactgcttaacgtcctagttattgtccttgaaacccgagccatctcaccgctcgcccccaaccctgggctctggctgtttaaaagctggagaggaagtgaaagcgtcaagtacatcccgttaggtgcaaagcaagtctcgttgatcgccattgctagttttgcacacgtttgcgaatcagagctgcccggggtacaccgaccgcgcagggaaacatcgagagtgtaaataaatacatcgcctcttgttcggatttttgctactaccgaaaatatgtaaattgtgaactctgttggctctctttggatccaggttgatagaagtccagatcctgaggaaatctccagctaaatgctcaaaatataaaatactgagctgagatttgcgaagagcagcagcatggatggattttatgaccagcaagtgccttacatggtcaccaatagtcagcgtgggagaaattgtaacgagaaaccaacaaatgtcaggaaaagaaaattcattaacagagatctggctcatgattcagaagaactctttcaagatctaagtcaattacaggaaacatggcttgcagaagctcaggtacctgacaatgatgagcagtttgtaccagactatcaggctgaaagtttggcttttcatggcctgccactgaaaatcaagaaagaaccccacagtccatgttcagaaatcagctctgcctgcagtcaagaacagccctttaaattcagctatggagaaaagtgcctgtacaatgtcagtgcctatgatcagaagccacaagtgggaatgaggccctccaacccccccacaccatccagcacgccagtgtccccactgcatcatgcatctccaaactcaactcatacaccgaaacctgaccgggccttcccagctcacctccctccatcgcagtccataccagatagcagctaccccatggaccacagatttcgccgccagctttctgaaccctgtaactcctttcctcctttgccgacgatgccaagggaaggacgtcctatgtaccaacgccagatgtctgagccaaacatccccttcccaccacaaggctttaagcaggagtaccacgacccagtgtatgaacacaacaccatggttggcagtgcggccagccaaagctttccccctcctctgatgattaaacaggaacccagagattttgcatatgactcagaagtgcctagctgccactccatttatatgaggcaagaaggcttcctggctcatcccagcagaacagaaggctgtatgtttgaaaagggccccaggcagttttatgatgacacctgtgttgtcccagaaaaattcgatggtttttcaaatgttgccctttctgtaattattttaagaggtatatgtctctctactgaccataggagacatcaaacaagagccaggaatgtatcgggaaggacccacataccaacggcgaggatcacttcagctctggcagtttttggtagctcttctggatgacccttcaaattctcattttattgcctggactggtcgaggcatggaatttaaactgattgagcctgaagaggtggcccgacgttggggcattcagaaaaacaggccagctatgaactatgataaacttagccgttcactccgctattactatgagaaaggaattatgcaaaaggtggctggagagagatatgtctacaagtttgtgtgtgatccagaagcccttttctccatggcctttccagataatcagcgtccactgctgaagacagacatggaacgtcacatcaacgaggaggacacagtgcctctttctcactttgatgagagcatggcctacatgccggaagggggctgctgcaacccccacccctacaacgaaggctacgtgtattaacacaagtgacagtcaagcagggcgtttttgcgcttttccttttttctgcaagatacagagaattgctgaatctttgttttatttctgttgtttgtattttatttttaaataataatacacaaaaaggggc

SEQ ID NO: 130826 - DNA, 926 bp, Homo sapiens
  Payload ID: 5567
  Gene Symbol: ETV2
  Gene Name: ets variant 2
  ENST ID: ENST00000379023
  CDS Start-End: 440-907
gcagataagcccagcttagcccagctgaccccagaccctctcccctcactccccccatgtcgcaggatcgagaccctgaggcagacagcccgttcaccaagccccccgccccgcccccatcaccccgtaaacttctcccagcctccgccctgccctcacccagcccgctgttccccaagcctcgctccaagcccacgccacccctgcagcagggcagccccagaggccagcacctatccccgaggctggggtcgaggctcggccccgcccctgcctctgcaacttgagcctggctgcgacccctgctctgacgtctcggaaaattcccccttgcccaggcccttgggggagggggtgcatggtatgaaatggggctgagacccccggctgggggcagaggaacccgccagagaacattcagaaggccttcatcgcatccatggacctgtggaactgggatgaggcatccccacaggaagtgcctccagggaacaagctggcagggcttgaaggagccaaattaggcttctgtttccctgatctggcactccaaggggacacgccgacagcgacagcagagacatgctggaaaggtcccattcagctgtggcagttcctcctggagctgctccacgacggggcgcgtagcagctgcatccgttggactggcaacagccgcgagttccagctgtgcgaccccaaagaggtggctcggctgtggggcgagcgcaagagaaagccgggcatgaattacgagaagctgagccggggccttcgctactactatcgccgcgacatcgtgcgcaagagcggggggcgaaagtacacgtaccgcttcgggggccgcgtgcccagcctagcctatccggactgtgcgggaggcggacggggagcagagacacaataaaaattcccggtcaaacctc

SEQ ID NO: 130827 - DNA, 1571 bp, Homo sapiens
  Payload ID: 5567
  Gene Symbol: ETV2
  Gene Name: ets variant 2
  Uniprot ID: O00321
  ENST ID: ENST00000379026
  CDS Start-End: 440-1552
gcagataagcccagcttagcccagctgaccccagaccctctcccctcactccccccatgtcgcaggatcgagaccctgaggcagacagcccgttcaccaagccccccgccccgcccccatcaccccgtaaacttctcccagcctccgccctgccctcacccagcccgctgttccccaagcctcgctccaagcccacgccacccctgcagcagggcagccccagaggccagcacctatccccgaggctggggtcgaggctcggccccgcccctgcctctgcaacttgagcctggctgcgacccctgctctgacgtctcggaaaattcccccttgcccaggcccttgggggagggggtgcatggtatgaaatggggctgagacccccggctgggggcagaggaacccgccagagaacattcagaaggccttcatcgcatccatggacctgtggaactgggatgaggcatccccacaggaagtgcctccagggaacaagctggcagggcttggtaggctgccgaggctgccacaacgtgtgtggggagggtgtccaggtggggcctctgctgaccctaaccccttatcgcctgcagaaggagccaaattaggcttctgtttccctgatctggcactccaaggggacacgccgacagcgacagcagagacatgctggaaaggtacaagctcatccctggcaagcttcccacagctggactggggctccgcgttactgcacccagaagttccatggggggcggagcccgactctcaggctcttccgtggtccggggactggacagacatggcgtgcacagcctgggactcttggagcggcgcctcgcagaccctgggccccgcccctctcggcccgggccccatccccgccgccggctccgaaggcgccgcgggccagaactgcgtccccgtggcgggagaggccacctcgtggtcgcgcgcccaggccgccgggagcaacaccagctgggactgttctgtggggcccgacggcgatacctactggggcagtggcctgggcggggagccgcgcacggactgtaccatttcgtggggcgggcccgcgggcccggactgtaccacctcctggaacccggggctgcatgcgggtggcaccacctctttgaagcggtaccagagctcagctctcaccgtttgctccgaaccgagcccgcagtcggaccgtgccagtttggctcgatgccccaaaactaaccaccgaggtcccattcagctgtggcagttcctcctggagctgctccacgacggggcgcgtagcagctgcatccgttggactggcaacagccgcgagttccagctgtgcgaccccaaagaggtggctcggctgtggggcgagcgcaagagaaagccgggcatgaattacgagaagctgagccggggccttcgctactactatcgccgcgacatcgtgcgcaagagcggggggcgaaagtacacgtaccgcttcgggggccgcgtgcccagcctagcctatccggactgtgcgggaggcggacggggagcagagacacaataaaaattcccggtcaaacctc

SEQ ID NO: 130828 - DNA, 1487 bp, Homo sapiens
  Payload ID: 5567
  Gene Symbol: ETV2
  Gene Name: ets variant 2
  Uniprot ID: O00321
  ENST ID: ENST00000402764
  CDS Start-End: 440-1468
gcagataagcccagcttagcccagctgaccccagaccctctcccctcactccccccatgtcgcaggatcgagaccctgaggcagacagcccgttcaccaagccccccgccccgcccccatcaccccgtaaacttctcccagcctccgccctgccctcacccagcccgctgttccccaagcctcgctccaagcccacgccacccctgcagcagggcagccccagaggccagcacctatccccgaggctggggtcgaggctcggccccgcccctgcctctgcaacttgagcctggctgcgacccctgctctgacgtctcggaaaattcccccttgcccaggcccttgggggagggggtgcatggtatgaaatggggctgagacccccggctgggggcagaggaacccgccagagaacattcagaaggccttcatcgcatccatggacctgtggaactgggatgaggcatccccacaggaagtgcctccagggaacaagctggcagggcttgaaggagccaaattaggcttctgtttccctgatctggcactccaaggggacacgccgacagcgacagcagagacatgctggaaaggtacaagctcatccctggcaagcttcccacagctggactggggctccgcgttactgcacccagaagttccatggggggcggagcccgactctcaggctcttccgtggtccggggactggacagacatggcgtgcacagcctgggactcttggagcggcgcctcgcagaccctgggccccgcccctctcggcccgggccccatccccgccgccggctccgaaggcgccgcgggccagaactgcgtccccgtggcgggagaggccacctcgtggtcgcgcgcccaggccgccgggagcaacaccagctgggactgttctgtggggcccgacggcgatacctactggggcagtggcctgggcggggagccgcgcacggactgtaccatttcgtggggcgggcccgcgggcccggactgtaccacctcctggaacccggggctgcatgcgggtggcaccacctctttgaagcggtaccagagctcagctctcaccgtttgctccgaaccgagcccgcagtcggaccgtgccagtttggctcgatgccccaaaactaaccaccgaggtcccattcagctgtggcagttcctcctggagctgctccacgacggggcgcgtagcagctgcatccgttggactggcaacagccgcgagttccagctgtgcgaccccaaagaggtggctcggctgtggggcgagcgcaagagaaagccgggcatgaattacgagaagctgagccggggccttcgctactactatcgccgcgacatcgtgcgcaagagcggggggcgaaagtacacgtaccgcttcgggggccgcgtgcccagcctagcctatccggactgtgcgggaggcggacggggagcagagacacaataaaaattcccggtcaaacctc

SEQ ID NO: 130829 - DNA, 1335 bp, Homo sapiens
  Payload ID: 5567
  Gene Symbol: ETV2
  Gene Name: ets variant 2
  Uniprot ID: O00321
  ENST ID: ENST00000403402
  CDS Start-End: 307-1335
aggtgagcgatgaactgaggactagatgcctgggtgtctgggttaggaaggacctgggggactagactcccaagaagccgggggcctggactcctgggtctaacagaggaagagagctggggtccctcactcccaggaccaagattttaggctcctggggaaggagggagcggaggcctggactcctggctctgagggaagctagggctggggcccagactccagggcctccaagtgtcaccagctcacccattgccatctggacttttcccgacccagaacattcagaaggccttcatcgcatccatggacctgtggaactgggatgaggcatccccacaggaagtgcctccagggaacaagctggcagggcttgaaggagccaaattaggcttctgtttccctgatctggcactccaaggggacacgccgacagcgacagcagagacatgctggaaaggtacaagctcatccctggcaagcttcccacagctggactggggctccgcgttactgcacccagaagttccatggggggcggagcccgactctcaggctcttccgtggtccggggactggacagacatggcgtgcacagcctgggactcttggagcggcgcctcgcagaccctgggccccgcccctctcggcccgggccccatccccgccgccggctccgaaggcgccgcgggccagaactgcgtccccgtggcgggagaggccacctcgtggtcgcgcgcccaggccgccgggagcaacaccagctgggactgttctgtggggcccgacggcgatacctactggggcagtggcctgggcggggagccgcgcacggactgtaccatttcgtggggcgggcccgcgggcccggactgtaccacctcctggaacccggggctgcatgcgggtggcaccacctctttgaagcggtaccagagctcagctctcaccgtttgctccgaaccgagcccgcagtcggaccgtgccagtttggctcgatgccccaaaactaaccaccgaggtcccattcagctgtggcagttcctcctggagctgctccacgacggggcgcgtagcagctgcatccgttggactggcaacagccgcgagttccagctgtgcgaccccaaagaggtggctcggctgtggggcgagcgcaagagaaagccgggcatgaattacgagaagctgagccggggccttcgctactactatcgccgcgacatcgtgcgcaagagcggggggcgaaagtacacgtaccgcttcgggggccgcgtgcccagcctagcctatccggactgtgcgggaggcggacggggagcagagacacaataa

SEQ ID NO: 130830 - DNA, 1342 bp, Homo sapiens
  Payload ID: 5567
  Gene Symbol: ETV2
  Gene Name: ets variant 2
  ENST ID: ENST00000479824
  CDS Start-End: 574-1323
ctccccccatgtcgcaggatcgagaccctgaggcagacagcccgttcaccaagccccccgccccgcccccatcaccccgtaaacttctcccagcctccgccctgccctcacccagcccgctgttccccaagcctcgctccaagcccacgccacccctgcagcagggcagccccagaggccagcacctatccccgaggctggggtcgaggctcggccccgcccctgcctctgcaacttgagcctggctgcgacccctgctctgacgtctcggaaaattcccccttgcccaggcccttgggggagggggtgcatggtatgaaatggggctgagacccccggctgggggcagaggaacccgccagagaaggagccaaattaggcttctgtttccctgatctggcactccaaggggacacgccgacagcgacagcagagacatgctggaaaggtacaagctcatccctggcaagcttcccacagctggactggggctccgcgttactgcacccagaagttccatggggggcggagcccgactctcaggctcttccgtggtccggggactggacagacatggcgtgcacagcctgggactcttggagcggcgcctcgcagaccctgggccccgcccctctcggcccgggccccatccccgccgccggctccgaaggcgccgcgggccagaactgcgtccccgtggcgggagaggccacctcgtggtcgcgcgcccaggccgccgggagcaacaccagctgggactgttctgtggggcccgacggcgatacctactggggcagtggcctgggcggggagccgcgcacggactgtaccatttcgtggggcgggcccgcgggcccggactgtaccacctcctggaacccggggctgcatgcgggtggcaccacctctttgaagcggtaccagagctcagctctcaccgtttgctccgaaccgagcccgcagtcggaccgtgccagtttggctcgatgccccaaaactaaccaccgaggtcccattcagctgtggcagttcctcctggagctgctccacgacggggcgcgtagcagctgcatccgttggactggcaacagccgcgagttccagctgtgcgaccccaaagaggtggctcggctgtggggcgagcgcaagagaaagccgggcatgaattacgagaagctgagccggggccttcgctactactatcgccgcgacatcgtgcgcaagagcggggggcgaaagtacacgtaccgcttcgggggccgcgtgcccagcctagcctatccggactgtgcgggaggcggacggggagcagagacacaataaaaattcccggtcaaacctc

SEQ ID NO: 130831 - DNA, 536 bp, Homo sapiens
  Payload ID: 5567
  Gene Symbol: ETV2
  Gene Name: ets variant 2
  ENST ID: ENST00000591135
  CDS Start-End: 1-288
cagagctcagctctcaccgtttgctccgaaccgagcccgcagtcggaccgtgccagtttggctcgatgccccaaaactaaccaccgaggtcccattcagctgtggcagttcctcctggagctgctccacgacggggcgcgtagcagctgcatccgttggactggcaacagccgcgagttccagctgtgcgaccccaaagaggtggggcagctcccctgcccagccaaatccgccccgtctcttctagttcaatttagctccgcccaagggctaggttcaaccgcgtagccctcggccccgccgctccccggcccactcgaggccccgcccaacccttctcaaacccaatctcccgcctgtactcctgcctcaaccaacccagtctccaccgggctctgcgaggcctcgcccaggtctgcactgcacaccgcccccaggcccggccctccccactatcgccaagccccgccccttcccactccgaccgagcgggcctctgtcctaggtggctcggctgtggggcgagcgcaagagaa

SEQ ID NO: 130832 - DNA, 994 bp, Homo sapiens
  Payload ID: 5567
  Gene Symbol: ETV2
  Gene Name: ets variant 2
  ENST ID: ENST00000619399
  CDS Start-End: 440-994
gcagataagcccagcttagcccagctgaccccagaccctctcccctcactccccccatgtcgcaggatcgagaccctgaggcagacagcccgttcaccaagccccccgccccgcccccatcaccccgtaaacttctcccagcctccgccctgccctcacccagcccgctgttccccaagcctcgctccaagcccacgccacccctgcagcagggcagccccagaggccagcacctatccccgaggctggggtcgaggctcggccccgcccctgcctctgcaacttgagcctggctgcgacccctgctctgacgtctcggaaaattcccccttgcccaggcccttgggggagggggtgcatggtatgaaatggggctgagacccccggctgggggcagaggaacccgccagagaacattcagaaggccttcatcgcatccatggacctgtggaactgggatgaggcatccccacaggaagtgcctccagggaacaagctggcagggcttgaaggagccaaattaggcttctgtttccctgatctggcactccaaggggacacgccgacagcgacagcagagacatgctggaaaggtacaagctcatccctggcaagcttcccacagctggactggggctccgcgttactgcacccagaagttccatggggggcggagcccgactctcaggctcttccgtggtccggggactggacagacatggcgtgcacagcctgggactcttggagcggcgcctcgcagaccctgggccccgcccctctcggcccgggccccatccccgccgccggctccgaaggcgccgcgggccagaactggcgggcccgcgggcccggactgtaccacctcctggaacccggggctgcatgcgggtggcaccacctctttgaagcggtaccagagctcagctctcaccgtttgctccgaaccgagcccgcagtcggaccgtgccagtttggctcgatgccccaaaactaa

SEQ ID NO: 130833 - DNA, 941 bp, Homo sapiens
  Payload ID: 5567
  Gene Symbol: ETV2
  Gene Name: ets variant 2
  ENST ID: ENST00000621247
  CDS Start-End: 46-600
cagaggaacccgccagagaacattcagaaggccttcatcgcatccatggacctgtggaactgggatgaggcatccccacaggaagtgcctccagggaacaagctggcagggcttgaaggagccaaattaggcttctgtttccctgatctggcactccaaggggacacgccgacagcgacagcagagacatgctggaaaggtacaagctcatccctggcaagcttcccacagctggactggggctccgcgttactgcacccagaagttccatggggggcggagcccgactctcaggctcttccgtggtccggggactggacagacatggcgtgcacagcctgggactcttggagcggcgcctcgcagaccctgggccccgcccctctcggcccgggccccatccccgccgccggctccgaaggcgccgcgggccagaactgctccccgcccgcgcccggactgtaccacctcctggaacccggggctgcatgcgggtggcaccacctctttgaagcggtaccagagctcagctctcaccgtttgctccgaaccgagcccgcagtcggaccgtgccagtttggctcgatgccccaaaactaaccaccgaggtcccattcagctgtggcagttcctcctggagctgctccacgacggggcgcgtagcagctgcatccgttggactggcaacagccgcgagttccagctgtgcgaccccaaagaggtggctcggctgtggggcgagcgcaagagaaagccgggcatgaattacgagaagctgagccggggccttcgctactactatcgccgcgacatcgtgcgcaagagcggggggcgaaagtacacgtaccgcttcgggggccgcgtgcccagcctagcctatccggactgtgcgggaggcggacggggagcagagacacaataaaaattcccggtcaaacctc

SEQ ID NO: 130834 - DNA, 1539 bp, Homo sapiens
  Payload ID: 5568
  Gene Symbol: ETV3
  Gene Name: ets variant 3
  Uniprot ID: P41162
  ENST ID: ENST00000326786
  CDS Start-End: 173-604
gggaaccggcgggagggcgcctcctcctcccccgccctctctgctgaggatggaagtgacgaaagcagccgaggaggtcacttcctgctggggtggatgaggaggagccggagacgccgcggaggagaccggaccgaagacggaccgtgccgggaagagcaggcgggtgaaaatgaaagccggctgtagcatcgtggaaaagccagaaggaggtggagggtatcagtttcctgactgggcctacaaaacagagtcatccccaggctcccggcagatccagctgtggcacttcatcctggagctgctgcagaaggaagagttccgccatgtcatcgcctggcagcagggagagtacggggaatttgtcatcaaggatccagatgaggtggcccgcctctggggccgcaggaaatgcaaaccacagatgaattatgacaagctgagccgggccctcagatactattacaacaagaggatccttcataaaacaaaagggaaaagatttacctataaatttaacttcaacaagctggtgatgcccaactacccattcatcaacattcggtcaagtggtaagatacaaactcttttggtagggaattaattttgaattgaaaagaatttttaaaaatccaaatctaagacatggcatgtttaggaagattttagaaacactaaaataatgtgatcctttggattgcctcaatgttcttactcaagtcatctcacttataaggagagttataggctattcagtatcaagatagatttctttggtttatttggttggttcccttttctgcatattgtttgtaatctcctagatactattacgctatcttgtttgggaatgatgtttcataggtttgtgatgatctttacgttcaggactcagttttaacacccagcccagtggttctttcatagatgggaacctgtttctacaaacacttccgattttctgtgaaactaccaagctctcccttatcaagtgaatatcatcaaaaccacagcatccttgatcagagaagggggaggttcacatgtttgcagtgaaaagcagtgtctttgatctgcaacagcaaatcctcagagaaaaagattctggggttacttgaccttctctcctgttaagtgcagtagggcttcccctcttgactttcctggttatagctttccatcacagctccccacattctctcttgatgttgaaagcagtctctcaaaagactttgttgttgtgtggttttttgtttgtgatttttttccttatgcaaatcatactcctgcccaagaaaatacagtagttccccttatctgagcagtatatgttctaagacccctagtagattcgcaaaccacagatagtaccaaactccattcatatatatgatgttttttcttcccttaaccccactcatatgtatctgtgataacgtttaatttataaattaggcacagtaagagattaatgacaataataaaatagaaaaattataacaatatgctgtaataaacttaatgtggtctttctcaaaa

SEQ ID NO: 130835 - DNA, 5254 bp, Homo sapiens
  Payload ID: 5568
  Gene Symbol: ETV3
  Gene Name: ets variant 3
  Uniprot ID: P41162
  ENST ID: ENST00000368192
  CDS Start-End: 66-1604
ccggagacgccgcggaggagaccggaccgaagacggaccgtgccgggaagagcaggcgggtgaaaatgaaagccggctgtagcatcgtggaaaagccagaaggaggtggagggtatcagtttcctgactgggcctacaaaacagagtcatccccaggctcccggcagatccagctgtggcacttcatcctggagctgctgcagaaggaagagttccgccatgtcatcgcctggcagcagggagagtacggggaatttgtcatcaaggatccagatgaggtggcccgcctctggggccgcaggaaatgcaaaccacagatgaattatgacaagctgagccgggccctcagatactattacaacaagaggatccttcataaaacaaaagggaaaagatttacctataaatttaacttcaacaagctggtgatgcccaactacccattcatcaacattcggtcaagtggtgtggttcctcagagtgcaccaccagtgccaacagcctcttcccggttccatttcccacctctggacacccattctccaaccaatgatgtgcagccgggacggttctctgctagctccctaactgcttctggccaggagtccagtaatggtactgatagaaagactgagctttcagagctggaggatggctcagctgctgactggcgccggggtgtggatcccgtgtcctccaggaatgccattggtggaggagggattggccatcagaaacgcaagcctgacataatgcttcctctgtttgctaggccagggatgtaccctgacccccacagtcccttcgctgtctctccaatccctggccgcggaggtgtccttaatgtccccatttcaccagccctctccctgactcccaccatcttctcctatagcccatcaccaggcctgagccctttcaccagcagcagctgcttctccttcaaccctgaggaaatgaaacactaccttcattctcaagcttgttctgtgttcaactaccatctgagtcctcggacttttccccgttacccagggctcatggttccaccactgcagtgccaaatgcatcctgaggagtcaactcagttctccatcaagctgcagcccccaccagttgggcggaagaaccgggagagggttgagagcagcgaggagtcagcaccagtcaccacgcccaccatggcttctattcccccaagaatcaaggtggaacctgcctctgaaaaggatcctgagagcctcaggcagtcggcacgagagaaggaggagcacactcaagaagagggcactgtgccaagcaggaccattgaagaggaaaaaggcaccatctttgcccgtcctgctgcaccacccatctggccctctgtgcccattagcaccccaagtggagaacctctggaggtgactgaagacagtgaggataggcctggcaaagagcccagtgcacctgagaagaaagaagatgcactgatgccccccaagcttcggttgaagcggcgctggaatgatgaccctgaagcccgagagctgagcaagagtggcaagtttctctggaatgggtcaggaccccagggcttggcaacagcagctgctgatgcttagaactggaagtggattaggagctgtttatactataatcaaatacatacatgtatttatgtagcaagatttcagggtgggggggagggagttaaactggtttgatcattctaggggcatagacttgtatttttatgttttggggatgggatggggttatcttctgttgtaaattaggtgggatatgaacacacttattttcctggtgagtaggacacagggagggtattgaactcaaaggagaaggagcctctatttcctgttgaggcttatactttctgacaaggaaactcccaaagggccaagatactttttggtcccatgatagtcaggttccagacttctttcttttctattgtatttgtatgtggaaagccattaatgaatttattttactccaagagatacacataaaagggaaaagggcatggttgggaggttgagcagtaagagaccattaatactaagtattttgcctgaaatgcttctttataattatttcagggaaggaataagataatctcagacttactggggtggggcttggggaatgtttggatgttgctctttttcttcttccttcttttttttttttttttttttttggttggtgttgtttggcatttttttcttttcctttttaaagaaaatgttttcaggaaacatgaacaaacatactgccaattatagtggggctgggaaggcacaggagctggcgacctctcagctgcatagttgggacggcaaaccctgctgtgagcttctcagacttttcacctacttcacctattaagaagccatgaggagttgtaaactcttgttcagggaagaaaagagggcaggaggaagtaacccaatgcctttaaatacaaaacagatgaaaaacaaaatactcatttttccttttctattgtgggtttggggagccaaaccaagtgtgactgtgagcacgttcactgagaggcatgacaacattattgaagaggtctttccattatgtctggttctcttattttcttaagtcaagccttaactatgaacatactttaagatgatacgggtctgtcaccataaacctgtaaaagggcatcgacagcttttcagataatccaggaatgttgagacatggctaagtttctagctgatacttagtcattccctcttgatattgttgggatgggtagccaaaaggcaggcttgtgggagttaagagccaatgatacctggaaacatgggaggtagctgggggtacaagtggatgttgagactgaaggaagaggtggaaagaagacacagaaggcacccagatgccaaaaggcctggcatgaatgagagttggcatctgtcctgttgtggtgttcccattcttgccatacccatttgcccagattgttctgattctcatgttcaattgactatcccacatgagactacagtttataggcagtgaggaattgtttcttcctgggaaatgtccttccagcaacttcagaggaatgggaaagtgttaatcttacgtgaagcaaaggagcctggactaggggcagagagaaagaagcagcagcccaccttctttgtgtttgcacatgtgcctatgtcgtgtacattggtacctgactgtggctcagatctgcgtcgcagcagcgagagaagaaatcactccatatccgatgagaggaagggtggcacagagatggtgtctacaattagagacatttctgactccaccttagcctaagcaaactttatatactgagtaacatttgaaggttgtcttttaatggtggggggtgttttttcctttttaaactacagtgcttgcacaagagagggagggactcagaaaaggttagggcaggtgagggagacagtagatggcctgggatgacttgagtccatcatactattgcttggcaggtgtcctcccccatgtttgattcaaattccatgagtgacctacctttccccaggaatgggactgagagggtagtctccagcaactcagtctgcacagggctccccgttcaggctgcctttggtggttgtgcttttgtaagtttctttctctgcacttcgacttacctctgaatcagaaagcaagcccagcaggtgaatgagggatgtctgcttggcattgcccaatctaaccagggaggctggctggccacccactgtccgctagaggggagagctagcaggtgttggtatgaactcaggaatagaaacacgaggcctttttaaatacgagggagaagaatccatgatgcatacctgtaaccccctagaacccaagtgccagaattcctagatgctgcttctgtttgaacaaaatgtcactgcttttacacttgaaaaaaacacactcgaaaaatgttcaactccatgaaaaatattttttggctttaagaaattgtttggtgtttaactgtttcctttgattgccattccaccagtaaattgttggttgatttgcactgcactctggggttggggttgggaggggagggtccttatacagagccgaacctggggttgctcaggaagtgggccagggaatgtggaagtcgttgacattgcctgggccaaaagagtgggagatagtttttctcccctcagcccactcctggtagcacctgtcgccagcctggtacaaagccaggcctttttcttctgtgagcatctcatcactgtccagcagcaggtggaaaaagggggacaacaaccagacctattttttctcccccattttttccaaattttgctgtgccaaatgtttaaaattttataaatatgaatctattgaaatttccttaatcaagagcttcttcgtgtaaagtttgcttttttagctatagaaaaagaaaacagtaaatatctcttaatggcatccagccttgctgagctcaccttttttcctgaagaatgggtaggagtgaaatatttaatgtaaacatttcaccaagtccctttaccctaattttgaagctgcattaaacccaactcactaacacagggaatgattgcaccctagtcctctgtgggccaagaaactttcagaagcattaaaaaaatagttgaagtatatcacttctcaccaagtgggtagagtcagttggctgtttgtcccttgttttttatttattccataattatgtttgtgctttttgttttgtaaacagtaatggaacgtacatttttattttgtttagaagacaactttgattcaatctttcaagaactgttccattcttggtttcttcttagggggataaaaagttaccagttaatttgttttgagatatttaagcattctttgagttatagaattgtgatgcagggatttgtgaatgagacatttacatgtgaaaggtgacttcactagttacctgcttgagcagagtaaagtgtgtatatgtacataaaatgtaagtaatcttaactccattgtgcagtgccttttagatgttccgctttctataaagtcttcaaatttttgcatatatattatatatatatgatgtaatgttatagaaatatatgtataatatacatattttttccaggggtatctgatagctctgtattttgttatggaagttgaaagaaaaaagtattttacctcagaaattaaataaaaaaatacttttaagtaa

SEQ ID NO: 130836 - DNA, 1976 bp, Homo sapiens
  Payload ID: 5569
  Gene Symbol: ETV3L
  Gene Name: ets variant 3-like
  Uniprot ID: Q6ZN32
  ENST ID: ENST00000454449
  CDS Start-End: 286-1371
gtccgagtcagccctgggcagcggggaggtccccagagggggctgggccctgtctgggtatggggaagcttgctgcctctggttcccttttctccccttcactggcaacctcttgtcccttcccttttctctctttctttcctgaccctctcccttccttccttctttccctccatttttccttcctctttcactgtcctcccctctgcctccttccttcccttcctcttaagtggtgaccatttccccaaggcccagacacagcccatctcgccggagtggaccatgcactgcagctgcttggctgagggcatcccagccaaccccggcaactggatctcagggttggccttccctgattgggcctacaaagccgagtcgtccccaggctcccggcagatccagctgtggcacttcatcctggagctgctgcagaaggaagagttccgccatgtcatcgcctggcagcagggagagtacggggaatttgtcatcaaggatccagatgaggtggcccgcctctggggccgcaggaaatgcaaaccacagatgaattatgacaagctgagccgggccctcagatattactacaataagaggatcctgcataagaccaaaggcaaaaggttcacatacaagttcaacttcagcaagctcatcgtagtcaactatcctttgtgggaagtgcgggcgccgccatccccccacttgctgctgggggcccctgccctgtgtcggccagcgctggtgcccgtgggtgtgcagagtgagctcctgcacagcatgctatttgcccatcaggccatggtggagcagctgacaggacagcagaccccccgagggccaccagagacctctggggataagaaggggagcagcagcagcgtctaccgacttggctctgccccaggcccctgccggctgggcctttgctgccatttggggagcgtccaaggcgagctgcctggtgttgcctccttcactcctcccctcccgccccctctgccctccaactggacctgtctctcggggcccttcttgcctcctctcccgtcagagcagcagctcccaggggcttttaagccagacatcctgctcccaggacctaggagcctcccaggggcctggcattttccagggcttcctctcttggcagggctgggacagggtgcgggtgagaggctttggctcttgtccctcaggcccgaggggctggaagtaaagcctgctcccatgatggaggcaaagggaggcctggatcccagggaggtcttctgcccagagacccgcagactcaaaactggggaggaaagccttacttcccccaatctggagaacctcaaagcagtgtggcccttggatcctccttaactagagaggaaggtgggaagttggggaggagtcctccaaagtccatctctcctcttgcccaccgcctctgggttagccccttcccctggctggacatgggctgaaattgcaggatttgaaggggtggagttggacccaaggtggggagcattgcagggaaggtgtgaatgtggaaatgggaaaaaccaagacagggtgcccctcctctttcaccatattgctaagcagactaaggggacattcctaatctcaacttttcttcagggagacgagaataaagtttctataatttccatcctgcccacataagggggaaaattaagggtctagcctggggagaggacaggggtggttgtgttccctgagtcttgtctggggcccatctccccattccaggctaaggtctccagtccctttctcacccctccatgcaacttctctcccatccctctgatttctgagaccctggaaacccctgtcccatgcaggcacttcctcctctctccatttccccaggacccaggcaagtggggtggggagacactggccttctctgctctgtaatactccactgtgaccatgaataaaatgcccttgcaaactgt

SEQ ID NO: 130837 - DNA, 2429 bp, Homo sapiens
  Payload ID: 5570
  Gene Symbol: ETV4
  Gene Name: ets variant 4
  Uniprot ID: P43268
  ENST ID: ENST00000319349
  CDS Start-End: 300-1754
gaaacaaagggaaacggggggcggtgtggcggggcggggggtggagagctgaggccgagcgaaggaaatgcaccaatcagctgctcccccgggctcacaactgtctgctgcgcccgaaaaacaagtcggtgcgctggggacccggggccggggccgccttactccggcctagccccgcggccctcggtgcgggctccagggcatgctcgggaccccccgcggctccagcccagacgccccggcctcaggtctcggcccccgcttggggccccggccgtgcggccggagggagcggccggatggagcggaggatgaaagccggatacttggaccagcaagtgccctacaccttcagcagcaaatcgcccggaaatgggagcttgcgcgaagcgctgatcggcccgctggggaagctcatggacccgggctccctgccgcccctcgactctgaagatctcttccaggatctaagtcacttccaggagacgtggctcgctgaagctcaggtaccagacagtgatgagcagtttgttcctgatttccattcagaaaacctagctttccacagccccaccaccaggatcaagaaggagccccagagtccccgcacagacccggccctgtcctgcagcaggaagccgccactcccctaccaccatggcgagcagtgcctttactccagtgcctatgacccccccagacaaatcgccatcaagtcccctgcccctggtgcccttggacagtcgcccctacagccctttccccgggcagagcaacggaatttcctgagatcctctggcacctcccagccccaccctggccatgggtacctcggggaacatagctccgtcttccagcagcccctggacatttgccactccttcacatctcagggagggggccgggaacccctcccagccccctaccaacaccagctgtcggagccctgcccaccctatccccagcagagctttaagcaagaataccatgatcccctgtatgaacaggcgggccagccagccgtggaccagggtggggtcaatgggcacaggtacccaggggcgggggtggtgatcaaacaggaacagacggacttcgcctacgactcagatgtcaccgggtgcgcatcaatgtacctccacacagagggcttctctgggccctctccaggtgacggggccatgggctatggctatgagaaacctctgcgaccattcccagatgatgtctgcgttgtccctgagaaatttgaaggagacatcaagcaggaaggggtcggtgcatttcgagaggggccgccctaccagcgccggggtgccctgcagctgtggcaatttctggtggccttgctggatgacccaacaaatgcccatttcattgcctggacgggccggggaatggagttcaagctcattgagcctgaggaggtcgccaggctctggggcatccagaagaaccggccagccatgaattacgacaagctgagccgctcgctccgatactattatgagaaaggcatcatgcagaaggtggctggtgagcgttacgtgtacaagtttgtgtgtgagcccgaggccctcttctctttggccttcccggacaatcagcgtccagctctcaaggctgagtttgaccggcctgtcagtgaggaggacacagtccctttgtcccacttggatgagagccccgcctacctcccagagctggctggccccgcccagccatttggccccaagggtggctactcttactagcccccagcggctgttccccctgccgcaggtgggtgctgccctgtgtacatataaatgaatctggtgttggggaaaccttcatctgaaacccacagatgtctctggggcagatccccactgtcctaccagttgccctagcccagactctgagctgctcaccggagtcattgggaaggaaaagtggagaaatggcaagtctagagtctcagaaactcccctgggggtttcacctgggccctggaggaattcagctcagcttcttcctaggtccaagccccccacaccttttccccaaccacagagaacaagagtttgttctgttctgggggacagagaaggcgcttcccaacttcatactggcaggagggtgaggaggttcactgagctccccagatctcccactgcggggagacagaagcctggactctgccccacgctgtggccctggagggtcccggtttgtcagttcttggtgctctgtgttcccagaggcaggcggaggttgaagaaaggaacctgggatgaggggtgctgggtataagcagagagggatgggttcctgctccaagggaccctttgcctttcttctgccctttcctaggcccaggcctgggtttgtacttccacctccaccacatctgccagaccttaataaaggcccccacttctcccatt

SEQ ID NO: 130838 - DNA, 2182 bp, Homo sapiens
  Payload ID: 5570
  Gene Symbol: ETV4
  Gene Name: ets variant 4
  Uniprot ID: P43268
  ENST ID: ENST00000393664
  CDS Start-End: 55-1509
caggtctcggcccccgcttggggccccggccgtgcggccggagggagcggccggatggagcggaggatgaaagccggatacttggaccagcaagtgccctacaccttcagcagcaaatcgcccggaaatgggagcttgcgcgaagcgctgatcggcccgctggggaagctcatggacccgggctccctgccgcccctcgactctgaagatctcttccaggatctaagtcacttccaggagacgtggctcgctgaagctcaggtaccagacagtgatgagcagtttgttcctgatttccattcagaaaacctagctttccacagccccaccaccaggatcaagaaggagccccagagtccccgcacagacccggccctgtcctgcagcaggaagccgccactcccctaccaccatggcgagcagtgcctttactccagtgcctatgacccccccagacaaatcgccatcaagtcccctgcccctggtgcccttggacagtcgcccctacagccctttccccgggcagagcaacggaatttcctgagatcctctggcacctcccagccccaccctggccatgggtacctcggggaacatagctccgtcttccagcagcccctggacatttgccactccttcacatctcagggagggggccgggaacccctcccagccccctaccaacaccagctgtcggagccctgcccaccctatccccagcagagctttaagcaagaataccatgatcccctgtatgaacaggcgggccagccagccgtggaccagggtggggtcaatgggcacaggtacccaggggcgggggtggtgatcaaacaggaacagacggacttcgcctacgactcagatgtcaccgggtgcgcatcaatgtacctccacacagagggcttctctgggccctctccaggtgacggggccatgggctatggctatgagaaacctctgcgaccattcccagatgatgtctgcgttgtccctgagaaatttgaaggagacatcaagcaggaaggggtcggtgcatttcgagaggggccgccctaccagcgccggggtgccctgcagctgtggcaatttctggtggccttgctggatgacccaacaaatgcccatttcattgcctggacgggccggggaatggagttcaagctcattgagcctgaggaggtcgccaggctctggggcatccagaagaaccggccagccatgaattacgacaagctgagccgctcgctccgatactattatgagaaaggcatcatgcagaaggtggctggtgagcgttacgtgtacaagtttgtgtgtgagcccgaggccctcttctctttggccttcccggacaatcagcgtccagctctcaaggctgagtttgaccggcctgtcagtgaggaggacacagtccctttgtcccacttggatgagagccccgcctacctcccagagctggctggccccgcccagccatttggccccaagggtggctactcttactagcccccagcggctgttccccctgccgcaggtgggtgctgccctgtgtacatataaatgaatctggtgttggggaaaccttcatctgaaacccacagatgtctctggggcagatccccactgtcctaccagttgccctagcccagactctgagctgctcaccggagtcattgggaaggaaaagtggagaaatggcaagtctagagtctcagaaactcccctgggggtttcacctgggccctggaggaattcagctcagcttcttcctaggtccaagccccccacaccttttccccaaccacagagaacaagagtttgttctgttctgggggacagagaaggcgcttcccaacttcatactggcaggagggtgaggaggttcactgagctccccagatctcccactgcggggagacagaagcctggactctgccccacgctgtggccctggagggtcccggtttgtcagttcttggtgctctgtgttcccagaggcaggcggaggttgaagaaaggaacctgggatgaggggtgctgggtataagcagagagggatgggttcctgctccaagggaccctttgcctttcttctgccctttcctaggcccaggcctgggtttgtacttccacctccaccacatctgccagaccttaataaaggcccccacttctccca

SEQ ID NO: 130839 - DNA, 1775 bp, Homo sapiens
  Payload ID: 5570
  Gene Symbol: ETV4
  Gene Name: ets variant 4
  Uniprot ID: P43268
  ENST ID: ENST00000545954
  CDS Start-End: 197-1534
gcgcccgaaaaacaagtcggtgcgctggggacccggggccggggccgccttactccggcctagccccgcggccctcggtgcgggctccagggcatgctcgggaccccccgcggctccagcccagacgccccggcctcagaaatcgcccggaaatgggagcttgcgcgaagcgctgatcggcccgctggggaagctcatggacccgggctccctgccgcccctcgactctgaagatctcttccaggatctaagtcacttccaggagacgtggctcgctgaagctcaggtaccagacagtgatgagcagtttgttcctgatttccattcagaaaacctagctttccacagccccaccaccaggatcaagaaggagccccagagtccccgcacagacccggccctgtcctgcagcaggaagccgccactcccctaccaccatggcgagcagtgcctttactccagtgcctatgacccccccagacaaatcgccatcaagtcccctgcccctggtgcccttggacagtcgcccctacagccctttccccgggcagagcaacggaatttcctgagatcctctggcacctcccagccccaccctggccatgggtacctcggggaacatagctccgtcttccagcagcccctggacatttgccactccttcacatctcagggagggggccgggaacccctcccagccccctaccaacaccagctgtcggagccctgcccaccctatccccagcagagctttaagcaagaataccatgatcccctgtatgaacaggcgggccagccagccgtggaccagggtggggtcaatgggcacaggtacccaggggcgggggtggtgatcaaacaggaacagacggacttcgcctacgactcagatgtcaccgggtgcgcatcaatgtacctccacacagagggcttctctgggccctctccaggtgacggggccatgggctatggctatgagaaacctctgcgaccattcccagatgatgtctgcgttgtccctgagaaatttgaaggagacatcaagcaggaaggggtcggtgcatttcgagaggggccgccctaccagcgccggggtgccctgcagctgtggcaatttctggtggccttgctggatgacccaacaaatgcccatttcattgcctggacgggccggggaatggagttcaagctcattgagcctgaggaggtcgccaggctctggggcatccagaagaaccggccagccatgaattacgacaagctgagccgctcgctccgatactattatgagaaaggcatcatgcagaaggtggctggtgagcgttacgtgtacaagtttgtgtgtgagcccgaggccctcttctctttggccttcccggacaatcagcgtccagctctcaaggctgagtttgaccggcctgtcagtgaggaggacacagtccctttgtcccacttggatgagagccccgcctacctcccagagctggctggccccgcccagccatttggccccaagggtggctactcttactagcccccagcggctgttccccctgccgcaggtgggtgctgccctgtgtacatataaatgaatctggtgttggggaaaccttcatctgaaacccacagatgtctctggggcagatccccactgtcctaccagttgccctagcccagactctgagctgctcaccggagtcattgggaaggaaaagtggagaaatggcaagtctagagtctcagaaactcccctgggggtttcacctgggccctgg

SEQ ID NO: 130840 - DNA, 1628 bp, Homo sapiens
  Payload ID: 5570
  Gene Symbol: ETV4
  Gene Name: ets variant 4
  ENST ID: ENST00000545089
  CDS Start-End: 97-1389
agccctccctggacggtgtgcgaacgcagccccctcccccaccaggtctcggcccccgcttggggccccggccgtgcggccggagggagcggccggatggagcggaggatgaaagccggatacttggaccagcaagtgccctacaccttcagcagcaaatcgcccggaaatgggagcttgcgcgaagcgctgatcggcccgctggggaagctcatggacccgggctccctgccgcccctcgactctgaagatctcttccaggatctaagtcacttccaggagacgtggctcgctgaagctcaggtaccagacagtgatgagcagtttgttcctgatttccattcagaaaacctagctttccacagccccaccaccaggatcaagaaggagccccagagtccccgcacagacccggccctgtcctgcagcaggaagccgccactcccctaccaccatggcgagcagtgcctttactccagctccgtcttccagcagcccctggacatttgccactccttcacatctcagggagggggccgggaacccctcccagccccctaccaacaccagctgtcggagccctgcccaccctatccccagcagagctttaagcaagaataccatgatcccctgtatgaacaggcgggccagccagccgtggaccagggtggggtcaatgggcacaggtacccaggggcgggggtggtgatcaaacaggaacagacggacttcgcctacgactcagatgtcaccgggtgcgcatcaatgtacctccacacagagggcttctctgggccctctccaggtgacggggccatgggctatggctatgagaaacctctgcgaccattcccagatgatgtctgcgttgtccctgagaaatttgaaggagacatcaagcaggaaggggtcggtgcatttcgagaggggccgccctaccagcgccggggtgccctgcagctgtggcaatttctggtggccttgctggatgacccaacaaatgcccatttcattgcctggacgggccggggaatggagttcaagctcattgagcctgaggaggtcgccaggctctggggcatccagaagaaccggccagccatgaattacgacaagctgagccgctcgctccgatactattatgagaaaggcatcatgcagaaggtggctggtgagcgttacgtgtacaagtttgtgtgtgagcccgaggccctcttctctttggccttcccggacaatcagcgtccagctctcaaggctgagtttgaccggcctgtcagtgaggaggacacagtccctttgtcccacttggatgagagccccgcctacctcccagagctggctggccccgcccagccatttggccccaagggtggctactcttactagcccccagcggctgttccccctgccgcaggtgggtgctgccctgtgtacatataaatgaatctggtgttggggaaaccttcatctgaaacccacagatgtctctggggcagatccccactgtcctaccagttgccctagcccagactctgagctgctcaccggagtcattgggaaggaaaagtggagaaatggcaagtctagagtctcagaaactcccctgggggtttcacctgggccct

SEQ ID NO: 130841 - DNA, 2147 bp, Homo sapiens
  Payload ID: 5570
  Gene Symbol: ETV4
  Gene Name: ets variant 4
  Uniprot ID: P43268
  ENST ID: ENST00000538265
  CDS Start-End: 135-1472
cacgttcttatgtaaccgagcccgggtaaagcagggctgcagaaagcagaaacggcgagcccggctcctgggagcagaaatcgcccggaaatgggagcttgcgcgaagcgctgatcggcccgctggggaagctcatggacccgggctccctgccgcccctcgactctgaagatctcttccaggatctaagtcacttccaggagacgtggctcgctgaagctcaggtaccagacagtgatgagcagtttgttcctgatttccattcagaaaacctagctttccacagccccaccaccaggatcaagaaggagccccagagtccccgcacagacccggccctgtcctgcagcaggaagccgccactcccctaccaccatggcgagcagtgcctttactccagtgcctatgacccccccagacaaatcgccatcaagtcccctgcccctggtgcccttggacagtcgcccctacagccctttccccgggcagagcaacggaatttcctgagatcctctggcacctcccagccccaccctggccatgggtacctcggggaacatagctccgtcttccagcagcccctggacatttgccactccttcacatctcagggagggggccgggaacccctcccagccccctaccaacaccagctgtcggagccctgcccaccctatccccagcagagctttaagcaagaataccatgatcccctgtatgaacaggcgggccagccagccgtggaccagggtggggtcaatgggcacaggtacccaggggcgggggtggtgatcaaacaggaacagacggacttcgcctacgactcagatgtcaccgggtgcgcatcaatgtacctccacacagagggcttctctgggccctctccaggtgacggggccatgggctatggctatgagaaacctctgcgaccattcccagatgatgtctgcgttgtccctgagaaatttgaaggagacatcaagcaggaaggggtcggtgcatttcgagaggggccgccctaccagcgccggggtgccctgcagctgtggcaatttctggtggccttgctggatgacccaacaaatgcccatttcattgcctggacgggccggggaatggagttcaagctcattgagcctgaggaggtcgccaggctctggggcatccagaagaaccggccagccatgaattacgacaagctgagccgctcgctccgatactattatgagaaaggcatcatgcagaaggtggctggtgagcgttacgtgtacaagtttgtgtgtgagcccgaggccctcttctctttggccttcccggacaatcagcgtccagctctcaaggctgagtttgaccggcctgtcagtgaggaggacacagtccctttgtcccacttggatgagagccccgcctacctcccagagctggctggccccgcccagccatttggccccaagggtggctactcttactagcccccagcggctgttccccctgccgcaggtgggtgctgccctgtgtacatataaatgaatctggtgttggggaaaccttcatctgaaacccacagatgtctctggggcagatccccactgtcctaccagttgccctagcccagactctgagctgctcaccggagtcattgggaaggaaaagtggagaaatggcaagtctagagtctcagaaactcccctgggggtttcacctgggccctggaggaattcagctcagcttcttcctaggtccaagccccccacaccttttccccaaccacagagaacaagagtttgttctgttctgggggacagagaaggcgcttcccaacttcatactggcaggagggtgaggaggttcactgagctccccagatctcccactgcggggagacagaagcctggactctgccccacgctgtggccctggagggtcccggtttgtcagttcttggtgctctgtgttcccagaggcaggcggaggttgaagaaaggaacctgggatgaggggtgctgggtataagcagagagggatgggttcctgctccaagggaccctttgcctttcttctgccctttcctaggcccaggcctgggtttgtacttccacctccaccacatctgccagaccttaataaaggcccccacttctcccatt

SEQ ID NO: 130842 - DNA, 1727 bp, Homo sapiens
  Payload ID: 5570
  Gene Symbol: ETV4
  Gene Name:: ets variant 4
  Uniprot ID: P43268
  ENST ID: ENST00000591713
  CDS Start-End: 91-1545
gcagaaagcagaaacggcgagcccggctcctgggagcaggtctcggcccccgcttggggccccggccgtgcggccggagggagcggccggatggagcggaggatgaaagccggatacttggaccagcaagtgccctacaccttcagcagcaaatcgcccggaaatgggagcttgcgcgaagcgctgatcggcccgctggggaagctcatggacccgggctccctgccgcccctcgactctgaagatctcttccaggatctaagtcacttccaggagacgtggctcgctgaagctcaggtaccagacagtgatgagcagtttgttcctgatttccattcagaaaacctagctttccacagccccaccaccaggatcaagaaggagccccagagtccccgcacagacccggccctgtcctgcagcaggaagccgccactcccctaccaccatggcgagcagtgcctttactccagtgcctatgacccccccagacaaatcgccatcaagtcccctgcccctggtgcccttggacagtcgcccctacagccctttccccgggcagagcaacggaatttcctgagatcctctggcacctcccagccccaccctggccatgggtacctcggggaacatagctccgtcttccagcagcccctggacatttgccactccttcacatctcagggagggggccgggaacccctcccagccccctaccaacaccagctgtcggagccctgcccaccctatccccagcagagctttaagcaagaataccatgatcccctgtatgaacaggcgggccagccagccgtggaccagggtggggtcaatgggcacaggtacccaggggcgggggtggtgatcaaacaggaacagacggacttcgcctacgactcagatgtcaccgggtgcgcatcaatgtacctccacacagagggcttctctgggccctctccaggtgacggggccatgggctatggctatgagaaacctctgcgaccattcccagatgatgtctgcgttgtccctgagaaatttgaaggagacatcaagcaggaaggggtcggtgcatttcgagaggggccgccctaccagcgccggggtgccctgcagctgtggcaatttctggtggccttgctggatgacccaacaaatgcccatttcattgcctggacgggccggggaatggagttcaagctcattgagcctgaggaggtcgccaggctctggggcatccagaagaaccggccagccatgaattacgacaagctgagccgctcgctccgatactattatgagaaaggcatcatgcagaaggtggctggtgagcgttacgtgtacaagtttgtgtgtgagcccgaggccctcttctctttggccttcccggacaatcagcgtccagctctcaaggctgagtttgaccggcctgtcagtgaggaggacacagtccctttgtcccacttggatgagagccccgcctacctcccagagctggctggccccgcccagccatttggccccaagggtggctactcttactagcccccagcggctgttccccctgccgcaggtgggtgctgccctgtgtacatataaatgaatctggtgttggggaaaccttcatctgaaacccacagatgtctctggggcagatccccactgtcctaccagttgccctagcccagactctgagctgctcaccggagtcattgggaaggaaaagt

SEQ ID NO: 130843 - DNA, 581 bp, Homo sapiens
  Payload ID: 5570
  Gene Symbol: ETV4
  Gene Name: ets variant 4
  ENST ID: ENST00000586764
  CDS Start-End: 498-581
aaggaagcagtgaggggaacagacgagctccacacacaaagggacgggaggagagggatagacacaaagcctgctagaggtgatcagggaaggcttcacagaggaggcagtatcagtcccagcaactgtagcccagttgctccccgtcacccaaagacagccacacctgatcccctggctcaggcagctggaaagaggagctgagaaaaaggagagtcatgctctcagcaaacatcaagtgctgtaagcatcataaaatcatcatcatcatcatcaccatcagacactgatggcccagtgggaggcctgggaccctgaagagagcccaggtctcggcccccgcttggggccccggccgtgcggccggagggagcggccggatggagcggaggatgaaagccggatacttggaccagcaagtgccctacaccttcagcagcaaatcgcccggaaatgggagcttgcgcgaagcgctgatcggcccgctggggaagctcatggacccgggctccctgccgcccctcgactctgaagatctcttccaggatctaagtcacttccaggagacgtggctcgctgaa

SEQ ID NO: 130844 - DNA, 917 bp, Homo sapiens
  Payload ID: 5570
  Gene Symbol: ETV4
  Gene Name: ets variant 4
  Uniprot ID: P43268
  ENST ID: ENST00000586826
  CDS Start-End: 274-897
cttgcccagcccccgctgctgccttccatggcctcagccgcagccctcaagttgaggaggggttccagcatcacactccctctgggtgaactttccctgggattttgtggttggcaggcaacctgggcaaagaacagtcaccaggaagcaggctggaaggaagaaattcttgaatgtggataggacttcctcctcccctgccctcgagctccaccccaagccacttctcacatcaccccttcttcccccacagatgtcaccgggtgcgcatcaatgtacctccacacagagggcttctctgggccctctccaggtgacggggccatgggctatggctatgagaaacctctgcgaccattcccagatgatgtctgcgttgtccctgagaaatttgaaggagacatcaagcaggaaggggtcggtgcatttcgagaggggccgccctaccagcgccggggtgccctgcagctgtggcaatttctggtggccttgctggatgacccaacaaatgcccatttcattgcctggacgggccggggaatggagttcaagctcattgagcctgaggaggtcgccaggctctggggcatccagaagaaccggccagccatgaattacgacaagctgagccgctcgctccgatactattatgagaaaggcatcatgcagaaggtggctggtgagcgttacgtgtacaagtttgtgtgtgagcccgaggccctcttctctttggccttcccggacaatcagcgtccagctctcaaggctgagtttgaccggcctgtcagtgaggaggacacagtccctttgtcccacttggatgagagccccgcctacctcccagagctggctggccccgcccagccatttggccccaagggtggctactcttactagcccccagcggctgttccccc

SEQ ID NO: 130845 - DNA, 4111 bp, Homo sapiens
  Payload ID: 5571
  Gene Symbol: ETV5
  Gene Name: ets variant 5
  Uniprot ID: P41161
  ENST ID: ENST00000306376
  CDS Start-End: 248-1780
agcctggttggcagctgcggcgcagagtccagccgctggtgcgcggagcggttcaccgtcttcggagcggttcggcccagcctttcgcccaggcgcccaggcccgctgcgcgcgtgcgtgagcgcgcctgcgccgccggggccgctgcaaggggaggagagaggccgcctcaggaggatcccttttcccccagaaattactcaatgctgaaacctctcaaagtggtattagagacgctgaaagcaccatggacgggttttatgatcagcaagtcccttttatggtcccagggaaatctcgatctgaggaatgcagagggcggcctgtgattgacagaaagaggaagtttttggacacagatctggctcacgattctgaagagctatttcaggatctcagtcaacttcaagaggcttggttagctgaagcacaagttcctgatgatgaacagtttgtcccagattttcagtctgataacctggtgcttcatgccccacctccaaccaagatcaaacgggagctgcacagcccctcctctgagctgtcgtcttgtagccatgagcaggctcttggtgctaactatggagaaaagtgcctctacaactattgtgcctatgataggaagcctccctctgggttcaagccattaacccctcctacaacccccctctcacccacccatcagaatcccctatttcccccacctcaggcaactctgcccacctcagggcatgcccctgcagctggcccagttcaaggtgtgggccccgcccccgccccccattcgcttccagagcctggaccacagcagcaaacatttgcggtcccccgaccaccacatcagcccctgcagatgccaaagatgatgcctgaaaaccagtatccatcagaacagagatttcagagacaactgtctgaaccctgccaccccttccctcctcagccaggagttcctggagataatcgccccagttaccatcggcaaatgtcagaacctattgtccctgcagctcccccgccccctcagggattcaaacaagaataccatgacccactctatgaacatggggtcccgggcatgccagggcccccagcacacgggttccagtcaccaatgggaatcaagcaggagcctcgggattactgcgtcgattcagaagtgcctaactgccagtcatcctacatgagagggggttatttctccagcagccatgaaggtttttcatatgaaaaagatccccgattatactttgacgacacttgtgttgtgcctgagagactggaaggcaaagtcaaacaggagcctaccatgtatcgagaggggcccccttaccagaggcgaggttcccttcagctgtggcagttcctggtcacccttcttgatgacccagccaatgcccacttcattgcctggacaggtcgaggcatggagttcaagctgatagaaccggaagaggttgctcggcgctggggcatccagaagaaccggccagccatgaactatgacaagctgagccgctctctccgctattactatgaaaagggcatcatgcagaaggtggctggagagcgatacgtctacaaatttgtctgtgacccagatgccctcttctccatggctttcccggataaccagcgtccgttcctgaaggcagagtccgagtgccacctcagcgaggaggacaccctgccgctgacccactttgaagacagccccgcttacctcctggacatggaccgctgcagcagcctcccctatgccgaaggctttgcttactaagtttctgagtggcggagtggccaaaccctagagctagcagttcccattcaggcaaacaagggcagtggttttgtttgtgtttttggttgttcctaaagcttgccctttgagtattatctggagaacccaagctgtctctggattggcacccttaaagacagatacattggctggggagtgggaacagggaggggcagaaaaccaccaaaaggccagtgcctcaactcttgattctgatgaggtttctgggaagagatcaaaatggagtctccttaccatggacaatacatgcaaagcaatatcttgttcaggttagtacccgcaaaacgggacatagtatgtgacaatctgcatcgatcatggactactaaatgcctttacatagaagggctctgatttgcacaatttgttgaaaaatcacaaacccatagaaaagtaagtaggctaagttggggaggctcaaaccattaagggttaaaaatacatcttaaacattggaaagctcttctagctgaatctgaaatattaccccttgtctagaaaaaggggggcagtcagaacagctgttccccactccgtggttctcaaaatcataaaccatggctactcttgggaaccacccggccatgtggtcgccaagtagagcaagccccctttctcttcccaatcacgtggctgagtgtggatgacttttattttaggagaagggcgattaacacttttgacagtattttgttttgccctgatttgggggattgttttgttttggtggttgttttggaaaaacagtttataaactgatttttgtagttttggtatttaaagcaaaaaaacgaaaaacaaaaaacaaaaacaaaccttttggtaactgtgcactgtgtcctttagccagggccgtgccaacttatgaagacactgcagcttgagaggggctttgctgaggcttccccttggccatgtgaaagcccgccttgttgcctgctttgtgctttctgcaccagacaacctgatggaacatttgcacctgagttgtacatttttgaagtgtgcagggcagcctggacacaagcttagattctctatgtatagttccccgtgttcactaacatgccctctctggaaagcatatgtatataacatgtgtcatgtcctttggaaacctggtcacctggtgaaaacccttgggattcttccctgggcatgactgatgacaatttccatttcatcagtttgttttgttttcctttttctttaaatcttggactttaaaccctacctgtgtgattcagtagggtttgagacttacgtgtgatactgacaggtaagcaacagtgctagcattctagattcctgcctttttttaaaaagaaattattctcattgctgtattatattggaaaagttttaaacaaccaagctaaagctatgtgaaagttgagctcaaagtagaggaaaagttactggtggtaccttgctgcctgctctgctggtagaattctgtgctccccgtgacacttagtacattaagaatgactacactgttcctcgtatgtgaaggaggcagtgctgactccgtgagtgtgagacacgtgctttgaactgcttttctattcatggagcactccatagtctcaaactgtcccccttatgaccaacagcacatttgtgaagaggttcgcagggataaggggtgcactttatagctatggaaacatgagattctcctctattggaagctaattagcccacaaaggtggtaaacctgtagattgggccttaattagcattgtactctaatcaaaggactctttctaaaccatatttatagctttcttaacctacacatagtctatacatagatgcatattttacccccagctggctagagatttatttgttgtaaatgctgtatagatttggttttcctttctttacttaccctggtttggattttttttttttttcttttgaatggatttatgctgtcttagcaatatgacaataatcctctgtagcttgagctacccctcccctgctgtaacttacgtgacctgtgctgtcactgggcataggacagcggcatcacggttgcattcccattggactcatgcacctcccggatggtttttgtttttttcgggggttctttggggtttgtttgtttgcttcttttccagagtgtggaaagtctacagtgcagaaaggcttgaacctgccagctgatttgaaatactttcccctgcgcagggccgtatgcatcctgccaagctgcgttatattctgtactgtgtacaataaagaagtttgcttttcgtttaccaagcacccgaa

SEQ ID NO: 130846 - DNA, 564 bp, Homo sapiens
  Payload ID: 5571
  Gene Symbol: ETV5
  Gene Name: ets variant 5
  ENST ID: ENST00000422039
  CDS Start-End: 169-564
ctccgcagttgggaggagggggcgggaagcagtttgaggggaatgtctgagaggcgctgccccccagagcaccgggagggggtaaatgacacaggaggatcccttttcccccagaaattactcaatgctgaaacctctcaaagtggtattagagacgctgaaagcaccatggacgggttttatgatcagcaagtcccttttatggtcccagggaaatctcgatctgaggaatgcagagggcggcctgtgattgacagaaagaggaagtttttggacacagatctggctcacgattctgaagagctatttcaggatctcagtcaacttcaagaggcttggttagctgaagcacaagttcctgatgatgaacagtttgtcccagattttcagtctgataacccatttcttttcaaacttcctcaagagttcatgatcccttttcaattccaatttgttgccatcctttatagtcctgggtctctgtcatcatttagcaagtcagctgtgcaaagtggtgcttcatgccccacctccaaccaagatcaaacgggagctgcacagccc

SEQ ID NO: 130847 - DNA, 574 bp, Homo sapiens
  Payload ID: 5571
  Gene Symbol: ETV5
  Gene Name: ets variant 5
  ENST ID: ENST00000440773
  CDS Start-End: 125-574
agcatccccggagagaagatagagccgccccacggccttcacaggagggggaggatcccttttcccccagaaattactcaatgctgaaacctctcaaagtggtattagagacgctgaaagcaccatggacgggttttatgatcagcaagtcccttttatggtcccagggaaatctcgatctgaggaatgcagagggcggcctgtgattgacagaaagaggaagtttttggacacagatctggctcacgattctgaagagctatttcaggatctcagtcaacttcaagaggcttggttagctgaagcacaagttcctgatgatgaacagtttgtcccagattttcagtctgataacctggtgcttcatgccccacctccaaccaagatcaaacgggagctgcacagcccctcctctgagctgtcgtcttgtagccatgagcaggctcttggtgctaactatggagaaaagtgcctctacaactattgtgcctatgataggaagcctccctctgggttcaagccattaacccctcctacaacccccctctcacccacccatcagaatcccctattt

SEQ ID NO: 130848 - DNA, 366 bp, Homo sapiens
  Payload ID: 5571
  Gene Symbol: ETV5
  Gene Name: ets variant 5
  ENST ID: ENST00000433149
  CDS Start-End: 1-268
tgtccctgcagctcccccgccccctcagggattcaaacaagaataccatgacccactctatgaacatggggtcccgggcatgccagggcccccagcacacgggttccagtcaccaatgggaatcaagcaggagcctcgggattactgcgtcgattcagaagtgcctaactgccagtcatcctacatgagagggggttatttctccagcagccatgaaggttgctcggcgctggggcatccagaagaaccggccagccatgaactatgacaagctgagccgctctctccgctattactatgaaaagggcatcatgcagaaggtggctggagagcgatacgtctacaaatttgtctgtgacccagatg

SEQ ID NO: 130849 - DNA, 573 bp, Homo sapiens
  Payload ID: 5571
  Gene Symbol: ETV5
  Gene Name: ets variant 5
  ENST ID: ENST00000413301
  CDS Start-End: 177-573
tttgcgggggcaggggggagatcggaaggggcgtccggccactggtccgacaggcccagccggctagagttcacgggctgattcagaatcttcaaagtcggggaggatcccttttcccccagaaattactcaatgctgaaacctctcaaagtggtattagagacgctgaaagcaccatggacgggttttatgatcagcaagtcccttttatggtcccagggaaatctcgatctgaggaatgcagagggcggcctgtgattgacagaaagaggaagtttttggacacagatctggctcacgattctgaagagctatttcaggatctcagtcaacttcaagaggcttggttagctgaagcacaagttcctgatgatgaacagtttgtcccagattttcagtctgataacctggtgcttcatgccccacctccaaccaagatcaaacgggagctgcacagcccctcctctgagctgtcgtcttgtagccatgagcaggctcttggtgctaactatggagaaaagtgcctctacaactattgtgcctatgataggaagcctccctctgggttcaagc

SEQ ID NO: 130850 - DNA, 554 bp, Homo sapiens
  Payload ID: 5571
  Gene Symbol: ETV5
  Gene Name: ets variant 5
  ENST ID: ENST00000421809
  CDS Start-End: 135-554
gtgcgtgagcgcgcctgcgccgccggggccgctgcaaggggaggagagaggccgcctcaggaggatcccttttcccccagaaattactcaatgctgaaacctctcaaagtggtattagagacgctgaaagcaccatggacgggttttatgatcagcaagtcccttttatggtcccagggaaatctcgatctgaggaatgcagagggcggcctgtgattgacagaaagaggaagtttttggacacagatctggctcacgattctgaagagctatttcaggatctcagtcaacttcaagaggcttggttagctgaagcacaagttcctgatgatgaacagtttgtcccagattttcagtctgataacctggtgcttcatgccccacctccaaccaagatcaaacgggagctgcacagcccctcctctgagctgtcgtcttgtagccatgagcaggctcttggtgctaactatggagaaaagtgcctctacaactattgtgcctatgataggaagcctccctctgggttcaagccattaacccctcctacaaccccc

SEQ ID NO: 130851 - DNA, 2213 bp, Homo sapiens
  Payload ID: 5571
  Gene Symbol: ETV5
  Gene Name: ets variant 5
  Uniprot ID: P41161
  ENST ID: ENST00000434744
  CDS Start-End: 294-1826
ggagcgcgagtgcgggggctcccgagtggatgggggatcgcggagttgcgaggctttcacagtctctggagattcgagagccccgaggggacttggaggctcgcgagaagagacgcttggcggagctccgcagttgggaggagggggcgggaagcagtttgaggggaatgtctgagaggcgctgccccccagagcaccgggagggggtaaatgacacaggaggatcccttttcccccagaaattactcaatgctgaaacctctcaaagtggtattagagacgctgaaagcaccatggacgggttttatgatcagcaagtcccttttatggtcccagggaaatctcgatctgaggaatgcagagggcggcctgtgattgacagaaagaggaagtttttggacacagatctggctcacgattctgaagagctatttcaggatctcagtcaacttcaagaggcttggttagctgaagcacaagttcctgatgatgaacagtttgtcccagattttcagtctgataacctggtgcttcatgccccacctccaaccaagatcaaacgggagctgcacagcccctcctctgagctgtcgtcttgtagccatgagcaggctcttggtgctaactatggagaaaagtgcctctacaactattgtgcctatgataggaagcctccctctgggttcaagccattaacccctcctacaacccccctctcacccacccatcagaatcccctatttcccccacctcaggcaactctgcccacctcagggcatgcccctgcagctggcccagttcaaggtgtgggccccgcccccgccccccattcgcttccagagcctggaccacagcagcaaacatttgcggtcccccgaccaccacatcagcccctgcagatgccaaagatgatgcctgaaaaccagtatccatcagaacagagatttcagagacaactgtctgaaccctgccaccccttccctcctcagccaggagttcctggagataatcgccccagttaccatcggcaaatgtcagaacctattgtccctgcagctcccccgccccctcagggattcaaacaagaataccatgacccactctatgaacatggggtcccgggcatgccagggcccccagcacacgggttccagtcaccaatgggaatcaagcaggagcctcgggattactgcgtcgattcagaagtgcctaactgccagtcatcctacatgagagggggttatttctccagcagccatgaaggtttttcatatgaaaaagatccccgattatactttgacgacacttgtgttgtgcctgagagactggaaggcaaagtcaaacaggagcctaccatgtatcgagaggggcccccttaccagaggcgaggttcccttcagctgtggcagttcctggtcacccttcttgatgacccagccaatgcccacttcattgcctggacaggtcgaggcatggagttcaagctgatagaaccggaagaggttgctcggcgctggggcatccagaagaaccggccagccatgaactatgacaagctgagccgctctctccgctattactatgaaaagggcatcatgcagaaggtggctggagagcgatacgtctacaaatttgtctgtgacccagatgccctcttctccatggctttcccggataaccagcgtccgttcctgaaggcagagtccgagtgccacctcagcgaggaggacaccctgccgctgacccactttgaagacagccccgcttacctcctggacatggaccgctgcagcagcctcccctatgccgaaggctttgcttactaagtttctgagtggcggagtggccaaaccctagagctagcagttcccattcaggcaaacaagggcagtggttttgtttgtgtttttggttgttcctaaagcttgccctttgagtattatctggagaacccaagctgtctctggattggcacccttaaagacagatacattggctggggagtgggaacagggaggggcagaaaaccaccaaaaggccagtgcctcaactcttgattctgatgaggtttctgggaagagatcaaaatggagtctccttaccatggacaatacatgcaaagcaatatcttgttcaggttagtacccgcaaaacgggacatagtatgtgacaatctgcatcgatcatggactactaaatgcctttacatagaa

SEQ ID NO: 130852 - DNA, 160 bp, Homo sapiens
  Payload ID: 5572
  Gene Symbol: ETV6
  Gene Name: ets variant 6
  ENST ID: ENST00000266427
  CDS Start-End: 1-151
catgacctatgagaaaatgtccagagccctgcgccactactacaaactaaacattatcaggaaggagccaggacaaaggcttttgttcaggttcctctttttcctgccacgtggatcaggtctgttcctgttactgttgggtcttggctgaaaaaaaaaa

SEQ ID NO: 130853 - DNA, 5989 bp, Homo sapiens
  Payload ID: 5572
  Gene Symbol: ETV6
  Gene Name: ets variant 6
  Uniprot ID: P41212
  ENST ID: ENST00000396373
  CDS Start-End: 275-1633
gcgtcccgggtccccgcgccgcgccgcgacctgcagaccccgccgccgcgctcgggcccgtctcccacgcccccgccgccccgcgcgcccaactccgccggccgccccgccccgccccgcgcgctccagacccccggggcggctgccgggagagatgctggaagaaacttcttaaatgaccgcgtctggctggccgtggagcctttctgggttggggagaggaaaggaaagtggaaaaaacctgagaacttcctgatctctctcgctgtgagacatgtctgagactcctgctcagtgtagcattaagcaggaacgaatttcatatacacctccagagagcccagtgccgagttacgcttcctcgacgccacttcatgttccagtgcctcgagcgctcaggatggaggaagactcgatccgcctgcctgcgcacctgcgcttgcagccaatttactggagcagggatgacgtagcccagtggctcaagtgggctgaaaatgagttttctttaaggccaattgacagcaacacgtttgaaatgaatggcaaagctctcctgctgctgaccaaagaggactttcgctatcgatctcctcattcaggtgatgtgctctatgaactccttcagcatattctgaagcagaggaaacctcggattcttttttcaccattcttccaccctggaaactctatacacacacagccggaggtcatactgcatcagaaccatgaagaagataactgtgtccagaggacccccaggccatccgtggataatgtgcaccataaccctcccaccattgaactgttgcaccgctccaggtcacctatcacgacaaatcaccggccttctcctgaccccgagcagcggcccctccggtcccccctggacaacatgatccgccgcctctccccggctgagagagctcagggacccaggccgcaccaggagaacaaccaccaggagtcctaccctctgtcagtgtctcccatggagaataatcactgcccagcgtcctccgagtcccacccgaagccatccagcccccggcaggagagcacacgcgtgatccagctgatgcccagccccatcatgcaccctctgatcctgaacccccggcactccgtggatttcaaacagtccaggctctccgaggacgggctgcatagggaagggaagcccatcaacctctctcatcgggaagacctggcttacatgaaccacatcatggtctctgtctccccgcctgaagagcacgccatgcccattgggagaatagcagactgtagactgctttgggattacgtctatcagttgctttctgacagccggtacgaaaacttcatccgatgggaggacaaagaatccaaaatattccggatagtggatcccaacggactggctcgactgtggggaaaccataagaacagaacaaacatgacctatgagaaaatgtccagagccctgcgccactactacaaactaaacattatcaggaaggagccaggacaaaggcttttgttcaggtttatgaaaaccccagatgaaatcatgagtggccgaacagaccgtctggagcacctagagtcccaggagctggatgaacaaatataccaagaagatgaatgctgaaggaaccaacagtccacctcagcgggccagcagcccagggaacccctgcccaccaggattgctggaagtgtgacggagcaggcgggctgaggagagtggaaaaggaagcgacccagaaatggcagggacacttctcttgcagaccaagagggaccctggagcaccttagacaaactacccagcacaggcggggctggaattctggcggagggcatgagcctgggactccatgtcacgtttccttctgatttggaatctctccatctgtaattcctcaccctcacccttccaccgttgttagtatcatggtgtttttgtttttgtttttgttttaagaacctgcagtttgactcttcatcgttcatctaggggaagacatctgatgttgttttcctatggaaatatatatctattatatatatattttttgcaaatctcacaaagtgcggcaagcccagctggtcaggaaagagaatacttgcagaggggttcaggttcctctttttcctgccacgtggatcaggtctgttcctgttactgttgggtcttggctgaaaaaaaaaaatgcttttaaaaaagataaaatgaaaaggagagctctctttttctctctcttgctctgttcttcccttggtcccctctgtcctcccgccctgcctgcagttgagattcagatgccttctgacagagttcagcctcttggagagtcttggggattgttggcacctaaacagaatcagtgacccgggtgctttgtggccagcagcacagaatcaaacccgcatcccagcattgggccacccatctgagggaggccaaaatcatcacagatgctgctgtgctgcagacagatacatgctagtccagagagccgcccctgagatggctgtgagaaccatgtgtctaaggcgtaagataaggatggaaggctgtccaagttatttggaaggcctcggcagcttgggattagcttgggagcgcagcgctgcaaagtggaaaatatgaaaagaccacacaggcccagcagtccagaaactgggcaaaaatattctgcagtggggatttatttttccaaagcaggtaacagaggctagtgagaaagaaaagctcctctctgctccattccaaaggccatcttgtggtcagtttcatgccctcacctgatttttttttttttttttttttttcaattcctaaccttttttaaagtttcctggtctccactggacacagagctttggagacggaggatcccagagggcagtctcagttgcaatcagtgtgtgcccagcctgggcagacaggaaattcctcggatacattattttttctttctttcatagctgtgtctcagaaaggacccatttgtggctctttttcacctcaaaataagatcgatggtatcttgtaaaatgagggtagtgccacttcttagtatttttgaaagctgttttagattttttttttttttccttttctagccatctaaattgactcttccaatataggtctcagaaatccaatatttggagtacaatttcttttaatccagattacacctgccttacaaagcaccccctccttgttcccctctgtttcctctactcagttgggggagaaactcacagctcctccgggatacatatgtgccctcagcagcagctcccaggtgaagttaccagacccctgggcttctccccagctttttctgagttgagtcagacatgtagagtttgggtcacacaggcaagaggaattttccctcggccttactgacaaggacaccaacctagggtgcaaacagatggactatggttcaaggacactggaattgaggagctgatcaaggctctcttcagccttgctctgtccctgcctcttatcagagcacaggtagacacacgggcatagccagcccactcctactgtcacaggcgccccaccattcaaccttccgggaggtcagggaccttctatatgaggcgagtgggtctcagtctgcttgaatggtgatgagattctgctggatctcagcacgctgcaggtgtcttttgagagcattcagtaggacatggtgatccctatttcagcctctaagatgactggtattctatctgaaatgcagagattaagccaaatacctgatgtattgtgaaagccactgattttaagaatggagagaaagggattttttactgcatccctctgtatgaatatgaaatcagagaccagggcatgatgttgctaggattagagcctctcagtctggcctcttcacccaagtgcaagaactcagtctcttactgttcaaagaatcttaacagttgaattatggagggaaattcccttttgccccaagcatttctatatttaaagcaatatcccaggagaatatgttagacttaggatgataccttcagccacttgaagaagaaatagaaggcgctcattccaatatagtctttatttcccattcagatacaggttgagcatccctaatctgaacagttaaaacccccaaatgccccaaaatccaaaccttcctgaacgctatgacaccatgagtggaaaattccacacctaacaaacacatttgctttcttatggttcaatgtacacaaactgttttatatagaaaatgatttcaaatatcataaaattaccttcaggctatgtgtataaagtatatatgagccataaatgaattttgtgtttagactttgtgtccatccccaagatctctcattttatatatatatatatatatatatatatatatatatatatatatatatacacacacacacacatacacaaatattccaggatacaaaaaaaaacatttaaaaatccgagacccagaacacttctggtcccaagcatttcagataagggatatcaatctgtactaccaataaggatttcgtaattcccctaactgcaaatgtcctcttcatttgttctttatgagaaaacccgggtagtgccagcacctggatacagtatttacaccctgcagaccctaaagatttcagattcagttagcaaaccttgatgaagcacctgctggacactgagggacccaaagctcaatcagccataatccctgctttcagagtttatattgtacctgcctaatccacccggcgtgactcatttcaacactaagtactaggggtgttgtcaggagacaaatctgaagtcaggagaggaaaatgcaaaggagccctgccgtgtgatggatgtgcattctcacttgggtcttgaagttctcattcctacatctcaagctagccaggcagtctcctctctatcagaagaaagcactggtaattggctagactggctatgttgaaggtaacatgaactctaagatcttgacccagggcgacttggttttgcttaaggtggcatcaccaatgttccaaatcctttagggagatgagggtatccccacagaaaaagaggaataatagaccaatggattttctcctttcaccagtatgtttggaaccctctgatccaatgtcttttgatactgatctcttgtccaaatgagaatgtcgctttagctgaaattcaaatggctgtgacaatttaccgaaatgatgaagtaaccaccattcccacctttcactgcctaggctccaagtctgaatacatttttgaaataggaactcccttttgcaaaaaagaaacctgggtgtcagggaggtgaagtgacttgccctaggagcagacagcatgccaagaatggaattaggctcaggatccagcctgggctcaccctgtgtggctcattcccacccaggaaactgaagataaaagatttgggaaaacacaccaagaaaaaggggcagttttctttgcccaagcatttggtgctagttagaggctgttcactctctcctgctcctcttcggagtagaaataaaggctgtgacacaaggaagccagtggggtgggagggaggcaccataatccctccctaaaacccacagaagactaacctgatactcttttgacccaactgcatcaacactaaacagctgcagaccccctgaatctttcacacatgccaagtgaacattcttgatgatttctctttgtgaccgcaaccacctgcaaaccagaacgactctagaatttccttccccgcccccctttttgtttagtttctaatctcttgtttatgaggtgtggggtttataagggactgaatcaaatgaatgtaacaaaaaagaaaaaaaaaacaaaaaaaaatgccttttctcagggccagtgagttgcaaataatttttaaagaaaagcctataattacatcatctcaataaattttttataaaaaaaaaaaaa

SEQ ID NO: 130854 - DNA, 652 bp, Homo sapiens
  Payload ID: 5572
  Gene Symbol: ETV6
  Gene Name: ets variant 6
  ENST ID: ENST00000545027
  CDS Start-End: 1-267
tcctcgacgccacttcatgttccagtgcctcgagcgctcaggatggaggaagactcgatccgcctgcctgcgcacctgcgcttgcagccaatttactggagcagggatgacgtagcccagtggctcaagtgggctgaaaatgagttttctttaaggccaattgacagcaacacgtttgaaatgaatggcaaagctctcctgctgctgaccaaagaggactttcgctatcgatctcctcattcagacctcgactctgatgtaacttgacaaagggcgaggatcctgcagaaggtcttggcatagtccctaactacgttcaacctttatttactcctggagacctgccagaagttaataaactaaccgtcatgaggaaacgtccctcattacaggagatgagataaagccccagcacccgtatctccactgttcttcccagttgccacagaccgtttatatgaagaaatgctaaagaagttccccagaagtagagatgttattgaaacttgaaagtttatatcttcaaaattgagtaatttggaagggacacaaacatacctgaaacattttgtctcatatcatcaattctgtatgtaatctcacaataagaaaactataaaacaaccatgtaaataaatcagactatcctaaa

SEQ ID NO: 130855 - DNA, 1719 bp, Homo sapiens
  Payload ID: 5573
  Gene Symbol: ETV7
  Gene Name: ets variant 7
  Uniprot ID: Q9Y603
  ENST ID: ENST00000340181
  CDS Start-End: 243-1268
gtttcccggaaggatagcgattaccggagcgcctcgcgcgcctgcccgcctgcggaggacccgggcgcacacgccttggcgcttctcgaaagagatttcctcccacgcgaccttccagttctcggagccaggttaggggtttggcggaggaggactgcggggcgcgggcctagggccccagcagccacagccaggggagcgctcaagacagaaagccggtggcttcctcacctccacctgtaatgcaggagggagaattggctatttctcctataagccctgtggcagccatgcctcccctaggcacccacgtgcaagccagatgtgaagctcaaattaacctgctgggtgaaggggggatctgcaagctgccaggaagactccgcatccagcccgcactgtggagcagggaggacgtgctgcactggctgcgctgggcagagcaggagtactctctgccatgcaccgcggagcacgggttcgagatgaacggacgcgccctctgcatcctcaccaaggacgacttccggcaccgtgcgcccagctcaggtgacgtcctgtatgagctgctccagtacatcaagacccagcggcgagccctggtgtgtgggcccttttttggagggatcttcaggctgaagacgcccacccagcactctccagtccccccggaagaggtgactggcccctctcagatggacacccgaaggggccacctgctgcagccaccagacccagggcttaccagcaacttcggccacctggatgaccctggcctggcaaggtggacccctggcaaggaggagtccctcaacttatgtcactgtgcagagctcggctgcaggacccagggggtctgttccttccccgcgatgccgcaggcccccattgacggcaggatcgctgactgccgcctgctgtgggattacgtgtatcagctgctccttgatacccgatatgagccctacatcaagtgggaagacaaggacgccaagatcttccgagttgtggatccaaatgggctcgccagactctggggaaatcacaagaaccgggtgaacatgacctacgagaagatgtctcgtgccctgcgccactattataagcttaatatcattaagaaggaaccggggcagaaactcctgttcagatttctaaagactccgggaaagatggtccaggacaagcacagccacctggagccgctggagagccaggagcaggacagaatagagttcaaggacaagaggccagaaatctctccgtgaggggcaggtggactccaggcacccggtaccgatggggcagggaccgagtctcccatgaaggcagactcctcctcccagcagagcagcaggatccccagccagactctgtacccacaggattacagccattgcttgggaaggctgggaggcctcccatccaggacactgggggcaggagtgtcatcttttgggcagggcaatcctggggctaaatgaggtacaggggaatggactctcccctactgcacccctgggagaggaagccaggcaccgatagagcacccagccccacccctgtaaatggaatttaccagatgaagggaatgaagtccctcactgagcctcagatttcctcacctgtgaaatgggctgaggcaggaaatgggaaaaagtgttagtgcttccaggcggcactgacagcctcagtaacaataaaaacaatggtagctga

SEQ ID NO: 130856 - DNA, 1530 bp, Homo sapiens
  Payload ID: 5573
  Gene Symbol: ETV7
  Gene Name: ets variant 7
  Uniprot ID: Q9Y603
  ENST ID: ENST00000339796
  CDS Start-End: 26-979
ggtggcttcctcacctccacctgtaatgcaggagggagaattggctatttctcctataagccctgtggcagccatgcctcccctaggcacccacgtgcaagccagatgtgaagctcaaattaacctgctgggtgaaggggggatctgcaagctgccaggaagactccgcatccagcccgcactgtggagcagggaggacgtgctgcactggctgcgctgggcagagcaggagtactctctgccatgcaccgcggagcacgggttcgagatgaacggacgcgccctctgcatcctcaccaaggacgacttccggcaccgtgcgcccagctcaggtgacgtcctgtatgagctgctccagtacatcaagacccagcggcgagccctggtgtgtgggcccttttttggagggatcttcaggctgaagacgcccacccagcactctccagtccccccggaagaggtgactggcccctctcagatggacacccgaaggggccacctgctgcagccaccagacccagggcttaccagcaacttcggccacctggatgaccctggcctggcaaggtggacccctggcaaggaggagtccctcaacttatgtcactgtgcagagctcggctgcaggacccagggggtctgttccttccccgcgatgccgcaggcccccattgacggcaggatcgctgactgccgcctgctgtgggattacgtgtatcagctgctccttgatacccgatatgagccctacatcaagtgggaagacaaggacgccaagatcttccgagttgtggatccaaatgggctcgccagactctggggaaatcacaagaaccgggtgaacatgacctacgagaagatgtctcgtgccctgcgccactattataagcttaatatcattaagaaggaaccggggcagaaactcctgttcagaaatggacttcagctgatcttcatattcatatggagtttccagtgaccccaaatagccaaaacagtcttggaaagaaaaacaaagttggaggacccacacttcctgattttgaaacttgctacaaagctatagtactcaacaaagattggtaatggcataaggatatagattaagaacagttttttcaacaaatagtgttgggacaatgggtgtccacatgcaaaagaataaagttgtccccttaccttacaccatctccaaaaattaactcaaaatatgtcaaagacataaacgtaagagctaaaactgtaaaactcctagaataaaacataggagtaaatcttcatgaccttggattaggccattgtgtcttaaatataacaccaaaagaataagtaataaaaaaatagataaattgaactccatcaaaattaaaagcctttgtgcttcataggacaccatcaagaaagtaaaaaaaaaaaaaaaaacccataggatgggagaaaatatctccaaatcatatatctgataaaagaattgtatccaggattgataaagaattcctacaactcaataataaaaagacaaaaaacccc

SEQ ID NO: 130857 - DNA, 1488 bp, Homo sapiens
  Payload ID: 5573
  Gene Symbol: ETV7
  Gene Name: ets variant 7
  Uniprot ID: Q9Y603
  ENST ID: ENST00000373737
  CDS Start-End: 243-1037
gtttcccggaaggatagcgattaccggagcgcctcgcgcgcctgcccgcctgcggaggacccgggcgcacacgccttggcgcttctcgaaagagatttcctcccacgcgaccttccagttctcggagccaggttaggggtttggcggaggaggactgcggggcgcgggcctagggccccagcagccacagccaggggagcgctcaagacagaaagccggtggcttcctcacctccacctgtaatgcaggagggagaattggctatttctcctataagccctgtggcagccatgcctcccctaggcacccacgtgcaagccagatgtgaagctcaaattaacctgctgggtgaaggggggatctgcaagctgccaggaagactccgcatccagcccgcactgtggagcagggaggacgtgctgcactggctgcgctgggcagagcaggagtactctctgccatgcaccgcggagcacgggttcgagatgaacggacgcgccctctgcatcctcaccaaggacgacttccggcaccgtgcgcccagctcaggtgacgtcctgtatgagctgctccagtacatcaagacccagcggcgagccctggtgtgtgggcccttttttggagggatcttcaggctgaagacgcccacccagcactctccagtccccccggaagactgccgcctgctgtgggattacgtgtatcagctgctccttgatacccgatatgagccctacatcaagtgggaagacaaggacgccaagatcttccgagttgtggatccaaatgggctcgccagactctggggaaatcacaagaaccgggtgaacatgacctacgagaagatgtctcgtgccctgcgccactattataagcttaatatcattaagaaggaaccggggcagaaactcctgttcagatttctaaagactccgggaaagatggtccaggacaagcacagccacctggagccgctggagagccaggagcaggacagaatagagttcaaggacaagaggccagaaatctctccgtgaggggcaggtggactccaggcacccggtaccgatggggcagggaccgagtctcccatgaaggcagactcctcctcccagcagagcagcaggatccccagccagactctgtacccacaggattacagccattgcttgggaaggctgggaggcctcccatccaggacactgggggcaggagtgtcatcttttgggcagggcaatcctggggctaaatgaggtacaggggaatggactctcccctactgcacccctgggagaggaagccaggcaccgatagagcacccagccccacccctgtaaatggaatttaccagatgaagggaatgaagtccctcactgagcctcagatttcctcacctgtgaaatgggctgaggcaggaaatgggaaaaagtgttagtgcttccaggcggcactgacagcctcagtaacaataaaaacaatggtagctga

SEQ ID NO: 130858 - DNA, 1570 bp, Homo sapiens
  Payload ID: 5573
  Gene Symbol: ETV7
  Gene Name: ets variant 7
  Uniprot ID: Q9Y603
  ENST ID: ENST00000373738
  CDS Start-End: 260-1120
cccgctctttcgttttcgtttcccggaaggatagcgattaccggagcgcctcgcgcgcctgcccgcctgcggaggacccgggcgcacacgccttggcgcttctcgaaagagatttcctcccacgcgaccttccagttctcggagccaggttaggggtttggcggaggaggactgcggggcgcgggcctagggccccagcagccacagccaggggagcgctcaagacagaaagccggtggcttcctcacctccacctgtaatgcaggagggagaattggctatttctcctataagccctgtggcagccatgcctcccctaggcacccacgtgcaagccagatgtgaagctcaaattaacctgctgggtgaaggggggatctgcaagctgccaggaagactccgtgacgtcctgtatgagctgctccagtacatcaagacccagcggcgagccctggtgtgtgggcccttttttggagggatcttcaggctgaagacgcccacccagcactctccagtccccccggaagaggtgactggcccctctcagatggacacccgaaggggccacctgctgcagccaccagacccagggcttaccagcaacttcggccacctggatgaccctggcctggcaaggtggacccctggcaaggaggagtccctcaacttatgtcactgtgcagagctcggctgcaggacccagggggtctgttccttccccgcgatgccgcaggcccccattgacggcaggatcgctgactgccgcctgctgtgggattacgtgtatcagctgctccttgatacccgatatgagccctacatcaagtgggaagacaaggacgccaagatcttccgagttgtggatccaaatgggctcgccagactctggggaaatcacaagaaccgggtgaacatgacctacgagaagatgtctcgtgccctgcgccactattataagcttaatatcattaagaaggaaccggggcagaaactcctgttcagatttctaaagactccgggaaagatggtccaggacaagcacagccacctggagccgctggagagccaggagcaggacagaatagagttcaaggacaagaggccagaaatctctccgtgaggggcaggtggactccaggcacccggtaccgatggggcagggaccgagtctcccatgaaggcagactcctcctcccagcagagcagcaggatccccagccagactctgtacccacaggattacagccattgcttgggaaggctgggaggcctcccatccaggacactgggggcaggagtgtcatcttttgggcagggcaatcctggggctaaatgaggtacaggggaatggactctcccctactgcacccctgggagaggaagccaggcaccgatagagcacccagccccacccctgtaaatggaatttaccagatgaagggaatgaagtccctcactgagcctcagatttcctcacctgtgaaatgggctgaggcaggaaatgggaaaaagtgttagtgcttccaggcggcactgacagcctcagtaacaataaaaacaatggtagctg

SEQ ID NO: 130859 - DNA, 1434 bp, Homo sapiens
  Payload ID: 5573
  Gene Symbol: ETV7
  Gene Name: ets variant 7
  Uniprot ID: Q9Y603
  ENST ID: ENST00000538992
  CDS Start-End: 412-984
cccgctctttcgttttcgtttcccggaaggatagcgattaccggagcgcctcgcgcgcctgcccgcctgcggaggacccgggcgcacacgccttggcgcttctcgaaagagatttcctcccacgcgaccttccagttctcggagccaggttaggggtttggcggaggaggactgcggggcgcgggcctagggccccagcagccacagccaggggagcgctcaagacagaaagccggtggcttcctcacctccacctgtaatgcaggtgacgtcctgtatgagctgctccagtacatcaagacccagcggcgagccctggtgtgtgggcccttttttggagggatcttcaggctgaagacgcccacccagcactctccagtccccccggaagaggtgactggcccctctcagatggacacccgaaggggccacctgctgcagccaccagacccagggcttaccagcaacttcggccacctggatgaccctggcctggcaaggtggacccctggcaaggaggagtccctcaacttatgtcactgtgcagagctcggctgcaggacccagggggtctgttccttccccgcgatgccgcaggcccccattgacggcaggatcgctgactgccgcctgctgtgggattacgtgtatcagctgctccttgatacccgatatgagccctacatcaagtgggaagacaaggacgccaagatcttccgagttgtggatccaaatgggctcgccagactctggggaaatcacaagaaccgggtgaacatgacctacgagaagatgtctcgtgccctgcgccactattataagcttaatatcattaagaaggaaccggggcagaaactcctgttcagatttctaaagactccgggaaagatggtccaggacaagcacagccacctggagccgctggagagccaggagcaggacagaatagagttcaaggacaagaggccagaaatctctccgtgaggggcaggtggactccaggcacccggtaccgatggggcagggaccgagtctcccatgaaggcagactcctcctcccagcagagcagcaggatccccagccagactctgtacccacaggattacagccattgcttgggaaggctgggaggcctcccatccaggacactgggggcaggagtgtcatcttttgggcagggcaatcctggggctaaatgaggtacaggggaatggactctcccctactgcacccctgggagaggaagccaggcaccgatagagcacccagccccacccctgtaaatggaatttaccagatgaagggaatgaagtccctcactgagcctcagatttcctcacctgtgaaatgggctgaggcaggaaatgggaaaaagtgttagtgcttccaggcggcactgacagcctcagtaacaataaaaacaatggtagctg

SEQ ID NO: 130860 - DNA, 1776 bp, Homo sapiens
  Payload ID: 5573
  Gene Symbol: ETV7
  Gene Name: ets variant 7
  Uniprot ID: Q9Y603
  ENST ID: ENST00000615781
  CDS Start-End: 478-1326
cccgctctttcgttttcgtttcccggaaggatagcgattaccggagcgcctcgcgcgcctgcccgcctgcggaggacccgggcgcacacgccttggcgcttctcgaaagagatttcctcccacgcgaccttccagttctcggagccaggttaggggtttggcggaggaggactgcggggcgcgggcctagggccccagcagccacagccaggggagcgctcaagacagaaagccggtggcttcctcacctccacctgtaatgcaggagggagaattggctatttctcctataagccctgtggcagccatgcctcccctaggcacccacgtgcaagccagatgtgaagctcaaattaacctgctgggtgaaggggggatctgcaagctgccaggaagactccgcatccagcccgcactgtggagcagggaggacgtgctgcactggctgcgctgggcagagcaggagtactctctgccatgcaccgcggagcacgggttcgagatgaacggacgcgccctctgcatcctcaccaaggacgacttccggcaccgtgcgcccagctcaggtcagggaaacgcacaggctttcctctaagcgggaaccctggtgacgtcctgtatgagctgctccagtacatcaagacccagcggcgagccctggtgtgtgggcccttttttggagggatcttcaggctgaagacgcccacccagcactctccagtccccccggaagaggtgactggcccctctcagatggacacccgaaggggccacctgctgcagccaccagacccagggcttaccagcaacttcggccacctggatgaccctggcctggcaaggtggacccctggcaaggaggagtccctcaacttatgtcactgtgcagagctcggctgcaggacccagggggtctgttccttccccgcgatgccgcaggcccccattgacggcaggatcgctgactgccgcctgctgtgggattacgtgtatcagctgctccttgatacccgatatgagccctacatcaagtgggaagacaaggacgccaagatcttccgagttgtggatccaaatgggctcgccagactctggggaaatcacaagaaccgggtgaacatgacctacgagaagatgtctcgtgccctgcgccactattataagcttaatatcattaagaaggaaccggggcagaaactcctgttcagatttctaaagactccgggaaagatggtccaggacaagcacagccacctggagccgctggagagccaggagcaggacagaatagagttcaaggacaagaggccagaaatctctccgtgaggggcaggtggactccaggcacccggtaccgatggggcagggaccgagtctcccatgaaggcagactcctcctcccagcagagcagcaggatccccagccagactctgtacccacaggattacagccattgcttgggaaggctgggaggcctcccatccaggacactgggggcaggagtgtcatcttttgggcagggcaatcctggggctaaatgaggtacaggggaatggactctcccctactgcacccctgggagaggaagccaggcaccgatagagcacccagccccacccctgtaaatggaatttaccagatgaagggaatgaagtccctcactgagcctcagatttcctcacctgtgaaatgggctgaggcaggaaatgggaaaaagtgttagtgcttccaggcggcactgacagcctcagtaacaataaaaacaatggtagctg

SEQ ID NO: 130861 - DNA, 1599 bp, Homo sapiens
  Payload ID: 5573
  Gene Symbol: ETV7
  Gene Name: ets variant 7
  Uniprot ID: Q9Y603
  ENST ID: ENST00000620358
  CDS Start-End: 367-1149
cccgctctttcgttttcgtttcccggaaggatagcgattaccggagcgcctcgcgcgcctgcccgcctgcggaggacccgggcgcacacgccttggcgcttctcgaaagagatttcctcccacgcgaccttccagttctcggagccaggttaggggtttggcggaggaggactgcggggcgcgggcctagggccccagcagccacagccaggggagcgctcaagacagaaagccggtggcttcctcacctccacctgtaatgcaggcatccagcccgcactgtggagcagggaggacgtgctgcactggctgcgctgggcagagcaggagtactctctgccatgcaccgcggagcacgggttcgagatgaacggacgcgccctctgcatcctcaccaaggacgacttccggcaccgtgcgcccagctcaggtgacgtcctgtatgagctgctccagtacatcaagacccagcggcgagccctggtgtgtgggcccttttttggagggatcttcaggctgaagacgcccacccagcactctccagtccccccggaagaggtgactggcccctctcagatggacacccgaaggggccacctgctgcagccaccagacccagggcttaccagcaacttcggccacctggatgaccctggcctggcaaggtggacccctggcaaggaggagtccctcaacttatgtcactgtgcagagctcggctgcaggacccagggggtctgttccttccccgcgatgccgcaggcccccattgacggcaggatcgctgactgccgcctgctgtgggattacgtgtatcagctgctccttgatacccgatatgagccctacatcaagtgggaagacaaggacgccaagatcttccgagttgtggatccaaatgggctcgccagactctggggaaatcacaagaaccgggtgaacatgacctacgagaagatgtctcgtgccctgcgccactattataagcttaatatcattaagaaggaaccggggcagaaactcctgttcagatttctaaagactccgggaaagatggtccaggacaagcacagccacctggagccgctggagagccaggagcaggacagaatagagttcaaggacaagaggccagaaatctctccgtgaggggcaggtggactccaggcacccggtaccgatggggcagggaccgagtctcccatgaaggcagactcctcctcccagcagagcagcaggatccccagccagactctgtacccacaggattacagccattgcttgggaaggctgggaggcctcccatccaggacactgggggcaggagtgtcatcttttgggcagggcaatcctggggctaaatgaggtacaggggaatggactctcccctactgcacccctgggagaggaagccaggcaccgatagagcacccagccccacccctgtaaatggaatttaccagatgaagggaatgaagtccctcactgagcctcagatttcctcacctgtgaaatgggctgaggcaggaaatgggaaaaagtgttagtgcttccaggcggcactgacagcctcagtaacaataaaaacaatggtagctg

SEQ ID NO: 130862 - DNA, 1285 bp, Homo sapiens
  Payload ID: 5573
  Gene Symbol: ETV7
  Gene Name: ets variant 7
  Uniprot ID: Q9Y603
  ENST ID: ENST00000627426
  CDS Start-End: 76-864
gcctagggccccagcagccacagccaggggagcgctcaagacagaaagccggtggcttcctcacctccacctgtaatgcaggagggagaattggctatttctcctataagccctgtggcagccatgcctcccctaggcacccacgtgcaagccagatgtgaagctcaaattaacctgctgggtgaaggggggatctgcaagctgccaggaagactccgtgacgtcctgtatgagctgctccagtacatcaagacccagcggcgagccctggtgtgtgggcccttttttggagggatcttcaggctgaagacgcccacccagcactctccagtccccccggaagaggtgactggcccctctcagatggacacccgaaggggccacctgctgcagccaccagacccagggcttaccagcaacttcggccacctggatgaccctggcctggcaaggtggacccctggcaaggaggagtccctcaacttatgtcactgtgcagagctcggctgcaggacccagggggtctgttccttccccgcgatgccgcaggcccccattgacggcaggatcgctgactgccgcctgctgtgggattacgtgtatcagctgctccttgatacccgatatgagccctacatcaagtgggaagacaaggacgccaagatcttccgagttgtggatccaaatgggctcgccagactctggggaaatcacaagaaccgggtgaacatgacctacgagaagatgtctcgtgccctgcgccactattataagcttaatatcattaagaaggaaccggggcagaaactcctgttcagaaatggacttcagctgatcttcatattcatatggagtttccagtgaccccaaatagccaaaacagtcttggaaagaaaaacaaagttggaggacccacacttcctgattttgaaacttgctacaaagctatagtactcaacaaagattggtaatggcataaggatatagattaagaacagttttttcaacaaatagtgttgggacaatgggtgtccacatgcaaaagaataaagttgtccccttaccttacaccatctccaaaaattaactcaaaatatgtcaaagacataaacgtaagagctaaaactgtaaaactcctagaataaaacataggagtaaatcttcatgaccttggattaggccattgtgtcttaaatataacaccaaaagaataagtaataaaaaaatagataaattgaactccatcaaaattaaaagcctttgtgcttcataggacaccatcaag

SEQ ID NO: 130863 - DNA, 2698 bp, Homo sapiens
  Payload ID: 5574
  Gene Symbol: ERF
  Gene Name: Ets2 repressor factor
  Uniprot ID: P50548
  ENST ID: ENST00000222329
  CDS Start-End: 159-1805
attaacccgggaggcggcggcggggaggggagaggctctgagaggcgaggccgggtgaggcggcgagggcggcccgacgggcgcgggacgggacggggcagcgagggcgccgggagccgcggcccggaatcggggcgcttcgccccgggccccccagcatgaagaccccggcggacacagggtttgccttcccggattgggcctacaagccagagtcgtcccctggctcaaggcagatccagctgtggcactttatcctggagctgctgcggaaggaggagtaccagggcgtcattgcctggcagggggactacggggaattcgtcatcaaagaccctgatgaggtggcccggctgtggggcgttcgcaagtgcaagccccagatgaattacgacaagctgagccgggccctgcgctattactataacaagcgcattctgcacaagaccaaggggaaacggttcacctacaagttcaatttcaacaaactggtgctggtcaattacccattcattgatgtggggttggctgggggtgcagtgccccagagtgccccgccagtgccgtcgggtggtagccacttccgcttccctccctcaacgccctccgaggtgctgtcccccaccgaggacccccgctcaccaccagcctgctcttcatcttcatcttccctcttctcggctgtggtggcccgccgcctgggccgaggctcagtcagtgactgtagtgatggcacgtcagagctggaggaaccgctgggagaggatccccgcgcccgaccacccggccctccggatctgggtgccttccgagggcccccgctggcccgcctgccccatgaccctggtgtcttccgagtctatccccggcctcggggtggccctgaacccctcagccccttccctgtgtcgcctctggccggtcctggatccctgctgccccctcagctctccccggctctgcccatgacgcccacccacctggcctacactccctcgcccacgctgagcccgatgtaccccagtggtggcggggggcccagcggctcagggggaggctcccacttctccttcagccctgaggacatgaaacggtacctgcaggcccacacccaaagcgtctacaactaccacctcagcccccgcgccttcctgcactaccctgggctggtggtgccccagccccagcgccctgacaagtgcccgctgccgcccatggcacccgagaccccaccggtcccctcctcggcctcgtcatcctcttcttcttcttcctccccattcaagtttaagctccagccgcccccactcggacgccggcagcgggcagctggggagaaggccgtagccggtgctgacaagagcggtggcagtgcaggcgggctggctgagggggcaggggcgctagccccaccgcccccgccaccacagatcaaggtggagcccatctcggaaggcgagtcggaggaggtagaggtgactgacatcagtgatgaggatgaggaagacggggaggtgttcaagacgccccgtgccccacctgcaccccctaagcctgagcccggcgaggcacccggggcatcccagtgcatgcccctcaagctacgctttaagcggcgctggagtgaagactgtcgcctcgaagggggtgggggccccgctgggggctttgaggatgagggtgaggacaagaaggtgcgtggggaggggcctggggaggctggggggcccctcaccccaaggcgggtgagctctgacctccagcatgccacggcccagctctccctggagcaccgagactcctgagggctgtgggcaggggacctgtgtgccccgcaccccccatgcttcttttgctgccttaagccccctatgccctggaggtgagggcagctctcttgtctcttccctgcctcctcccttttccctccccacattttgtataaaactttaatttcttttttttaaaaatggtgggggtgggtgggtgcccagggctaggggctattccctgtctctgtgggtttctaagctctgggcaaagtggtggtagggggagggagggggaagttaagggggtcacctccattctggggaatttatatttgaattgaggctttggccttaacacccaggaacttttctattacaatcgcttaggaagtaaagccttgtctccctccctgttctctgcctcttgtacccctctgacccacccgctctgccccactcccagccctcctcagccccagccctgcctgccctgcccctccagggggccatgagtgcctaggtttctcataccccacaaggtcacagcaggggagggagggacaattttataatgaaccaaaaattccatgtgttggggggtggggggcggaggagggtgaggggtgccgcccatgggccacaaatctctacaagtgcctgctatccctctcccactccccaccccagcaccggtccaaccccttcatccccagctgctcctaggactggcccatgggcaggcgggtggggggatgggaagggggtgccctgaaaccaaactggaagccccctctgcctcccagctggggcctctggggtggggtggggggctgtggtcaagccttattctgtattggggactgagggtggggggagtagaggggccgctggagaatgtattcaaaacaataaaactttggaccttt

SEQ ID NO: 130864 - DNA, 2032 bp, Homo sapiens
  Payload ID: 5574
  Gene Symbol: ERF
  Gene Name:: Ets2 repressor factor
  Uniprot ID: P50548
  ENST ID: ENST00000440177
  CDS Start-End: 303-1724
gtgcggggcgggggggctcgtccaccgggcccgctatccctggttctgcgctgcgcggtcctgctggtgaccttcacggcggcgcgtgccctgcaccagggtttgccttcccggattgggcctacaagccagagtcgtcccctggctcaaggcagatccagctgtggcactttatcctggagctgctgcggaaggaggagtaccagggcgtcattgcctggcagggggactacggggaattcgtcatcaaagaccctgatgaggtggcccggctgtggggcgttcgcaagtgcaagccccagatgaattacgacaagctgagccgggccctgcgctattactataacaagcgcattctgcacaagaccaaggggaaacggttcacctacaagttcaatttcaacaaactggtgctggtcaattacccattcattgatgtggggttggctgggggtgcagtgccccagagtgccccgccagtgccgtcgggtggtagccacttccgcttccctccctcaacgccctccgaggtgctgtcccccaccgaggacccccgctcaccaccagcctgctcttcatcttcatcttccctcttctcggctgtggtggcccgccgcctgggccgaggctcagtcagtgactgtagtgatggcacgtcagagctggaggaaccgctgggagaggatccccgcgcccgaccacccggccctccggatctgggtgccttccgagggcccccgctggcccgcctgccccatgaccctggtgtcttccgagtctatccccggcctcggggtggccctgaacccctcagccccttccctgtgtcgcctctggccggtcctggatccctgctgccccctcagctctccccggctctgcccatgacgcccacccacctggcctacactccctcgcccacgctgagcccgatgtaccccagtggtggcggggggcccagcggctcagggggaggctcccacttctccttcagccctgaggacatgaaacggtacctgcaggcccacacccaaagcgtctacaactaccacctcagcccccgcgccttcctgcactaccctgggctggtggtgccccagccccagcgccctgacaagtgcccgctgccgcccatggcacccgagaccccaccggtcccctcctcggcctcgtcatcctcttcttcttcttcctccccattcaagtttaagctccagccgcccccactcggacgccggcagcgggcagctggggagaaggccgtagccggtgctgacaagagcggtggcagtgcaggcgggctggctgagggggcaggggcgctagccccaccgcccccgccaccacagatcaaggtggagcccatctcggaaggcgagtcggaggaggtagaggtgactgacatcagtgatgaggatgaggaagacggggaggtgttcaagacgccccgtgccccacctgcaccccctaagcctgagcccggcgaggcacccggggcatcccagtgcatgcccctcaagctacgctttaagcggcgctggagtgaagactgtcgcctcgaagggggtgggggccccgctgggggctttgaggatgagggtgaggacaagaaggtgcgtggggaggggcctggggaggctggggggcccctcaccccaaggcgggtgagctctgacctccagcatgccacggcccagctctccctggagcaccgagactcctgagggctgtgggcaggggacctgtgtgccccgcaccccccatgcttcttttgctgccttaagccccctatgccctggaggtgagggcagctctcttgtctcttccctgcctcctcccttttccctccccacattttgtataaaactttaatttcttttttttaaaaatggtgggggtgggtgggtgcccagggctaggggctattccctgtctctgtgggtttctaagctctgggcaaagtggtggtagggggagggagggggaagttaagggggtcacctccattctggggaatttatatttgaattga

SEQ ID NO: 130865 - DNA, 264 bp, Homo sapiens
  Payload ID: 5574
  Gene Symbol: ERF
  Gene Name: Ets2 repressor factor
  ENST ID: ENST00000598965
  CDS Start-End: 80-264
gggggactacggggaattcgtcatcaaagaccctgatgaggtggcccggctgtggggcgttcgcaagtgcaagccccagatgaattacgacaagctgagccgggccctgcgctattactataacaagcgcattctgcacaagaccaaggggaaacggttcacctacaagttcaatttcaacaaactggtgctggtcaattacccattcattgatgtggggttggctggtgctgtcccccaccgaggacccccgctcaccaccag

SEQ ID NO: 130866 - DNA, 555 bp, Homo sapiens
  Payload ID: 5574
  Gene Symbol: ERF
  Gene Name: Ets2 repressor factor
  ENST ID: ENST00000593944
  CDS Start-End: 262-555
gtttccttcccccggcggcggcggcggcggcggcggcggctcgggctcctgtgtgcggggtttgccttcccggattgggcctacaagccagagtcgtcccctggctcaaggcagatccagctgtggcactttatcctggagctgctgcggaaggaggagtaccagggcgtcattgcctggcagggggactacggggaattcgtcatcaaagaccctgatgaggtggcccggctgtggggcgttcgcaagtgcaagccccagatgaattacgacaagctgagccgggccctgcgctattactataacaagcgcattctgcacaagaccaaggggaaacggttcacctacaagttcaatttcaacaaactggtgctggtcaattacccattcattgatgtggggttggctgggggtgcagtgccccagagtgccccgccagtgccgtcgggtggtagccacttccgcttccctccctcaacgccctccgaggtgctgtcccccaccgaggacccccgctcaccaccagcctgctcttcatcttcatcttccctcttc

SEQ ID NO: 130867 - DNA, 2707 bp, Homo sapiens
  Payload ID: 5575
  Gene Symbol: EHMT1
  Gene Name: euchromatic histone-lysine N-methyltransferase 1
  Uniprot ID: Q9H9B1
  ENST ID: ENST00000462484
  CDS Start-End: 38-2464
gcgcgggaggggcggggccacgctgcgggcccgggccatggccgccgccgatgccgaggcagttccggcgaggggggagcctcagcaggattgctgtgtgaaaaccgagctgctgggagaagagacacctatggctgccgatgaaggctcagcagagaaacaggcaggagaggcccacatggctgcggacggtgagaccaatgggtcttgtgaaaacagcgatgccagcagtcatgcaaatgctgcaaagcacactcaggacagcgcaagggtcaacccccaggatggcaccaacacactaactcggatagcggaaaatggggtttcagaaagagactcagaagcggcgaagcaaaaccacgtcactgccgacgactttgtgcagacttctgtcatcggcagcaacggatacatcttaaataagccggccctacaggcacagcccttgaggactaccagcactctggcctcttcgctgcctggccatgctgcaaaaacccttcctggaggggctggcaaaggcaggactccaagcgcttttccccagacgccagccgccccaccagccacccttggggaggggagtgctgacacagaggacaggaagctcccggcccctggcgccgacgtcaaggtccacagggcacgcaagaccatgccgaagtccgtcgtgggcctgcatgcagccagtaaagatcccagagaagttcgagaagctagagatcataaggaaccaaaagaggagatcaacaaaaacatttctgactttggacgacagcagcttttaccccccttcccatcccttcatcagtcgctacctcagaaccagtgctacatggccaccacaaaatcacagacagcttgcttgccttttgttttagcagctgcagtatctcggaagaaaaaacgaagaatgggaacctatagcctggttcctaagaaaaagaccaaagtattaaaacagaggacggtgattgagatgtttaagagcataactcattccactgtgggttccaagggggagaaggacctgggcgccagcagcctgcacgtgaatggggagagcctggagatggactcggatgaggacgactcagaggagctcgaggaggacgacggccatggtgcagagcaggcggccgcgttccccacagaggacagcaggacttccaaggagagcatgtcggaggctgatcgcgcccagaagatggacggggagtccgaggaggagcaggagtccgtggacaccggggaggaggaggaaggcggtgacgagtctgacctgagttcggaatccagcattaagaagaaatttctcaagaggaaaggaaagaccgacagtccctggatcaagccagccaggaaaaggaggcggagaagtagaaagaagcccagcggtgccctcggttctgagtcgtataagtcatctgcaggaagcgctgagcagacggcaccaggagacagcacagggtacatggaagtttctctggactccctggatctccgagtcaaaggaattctgtcttcacaagcagaagggttggccaacggtccagatgtgctggagacagacggcctccaggaagtgcctctctgcagctgccggatggaaacaccgaagagtcgagagatcaccacactggccaacaaccagtgcatggctacagagagcgtggaccatgaattgggccggtgcacaaacagcgtggtcaagtatgagctgatgcgcccctccaacaaggccccgctcctcgtgctgtgtgaagaccaccggggccgcatggtgaagcaccagtgctgtcctggctgtggctacttctgcacagcgggtaattttatggagtgtcagcccgagagcagcatctctcaccgtttccacaaagactgtgcctctcgagtcaataacgccagctattgtccccactgtggggaggagagctccaaggccaaagaggtgacgatagctaaagcagacaccacctcgaccgtgacaccagtccccgggcaggagaagggctcggccctggagggcagggccgacaccacaacgggcagtgctgccgggccaccactctcggaggacgacaagctgcagggtgcagcctcccacgtgcccgagggctttgatccaacgggacctgctgggcttgggaggccaactcccggcctttcccagggaccagggaaggaaaccttggagagcgctctcatcgccctcgactcggaaaaacccaagaagcttcgcttccacccaaagcagctgtacttctccgccaggcaaggggagcttcagaaggtgctcctcatgctggtggacggaattgaccccaacttcaaaatggagcaccagaataagcgctctccactgcacgccgcggcagaggctggacacgtggacatctgccacatgctggttcagttctgcaggctgggaagcccaaggtcgaggggctgcctttggtgacttatggtgaggacctcgtgctgttcccgaacacagccaggaaccacgccaagaggaagatgctccagcacagccttgctgtggaccaggccgcccacagggagcaggtccattcctgggggctgactccgcctttcagagaggcgtggctccatcttcacagcctcgtagcctcttaaaggcccagcctcaaaacctcattggggcccccagccccggtaaataaattgcattcagaccata

SEQ ID NO: 130868 - DNA, 5137 bp, Homo sapiens
  Payload ID: 5575
  Gene Symbol: EHMT1
  Gene Name: euchromatic histone-lysine N-methyltransferase 1
  Uniprot ID: Q9H9B1
  ENST ID: ENST00000460843
  CDS Start-End: 67-3963
gggccgcgaggcgcgggcggggcgatggcgcgcgggaggggcggggccacgctgcgggcccgggccatggccgccgccgatgccgaggcagttccggcgaggggggagcctcagcaggattgctgtgtgaaaaccgagctgctgggagaagagacacctatggctgccgatgaaggctcagcagagaaacaggcaggagaggcccacatggctgcggacggtgagaccaatgggtcttgtgaaaacagcgatgccagcagtcatgcaaatgctgcaaagcacactcaggacagcgcaagggtcaacccccaggatggcaccaacacactaactcggatagcggaaaatggggtttcagaaagagactcagaagcggcgaagcaaaaccacgtcactgccgacgactttgtgcagacttctgtcatcggcagcaacggatacatcttaaataagccggccctacaggcacagcccttgaggactaccagcactctggcctcttcgctgcctggccatgctgcaaaaacccttcctggaggggctggcaaaggcaggactccaagcgcttttccccagacgccagccgccccaccagccacccttggggaggggagtgctgacacagaggacaggaagctcccggcccctggcgccgacgtcaaggtccacagggcacgcaagaccatgccgaagtccgtcgtgggcctgcatgcagccagtaaagatcccagagaagttcgagaagctagagatcataaggaaccaaaagaggagatcaacaaaaacatttctgactttggacgacagcagcttttaccccccttcccatcccttcatcagtcgctacctcagaaccagtgctacatggccaccacaaaatcacagacagcttgcttgccttttgttttagcagctgcagtatctcggaagaaaaaacgaagaatgggaacctatagcctggttcctaagaaaaagaccaaagtattaaaacagaggacggtgattgagatgtttaagagcataactcattccactgtgggttccaagggggagaaggacctgggcgccagcagcctgcacgtgaatggggagagcctggagatggactcggatgaggacgactcagaggagctcgaggaggacgacggccatggtgcagagcaggcggccgcgttccccacagaggacagcaggacttccaaggagagcatgtcggaggctgatcgcgcccagaagatggacggggagtccgaggaggagcaggagtccgtggacaccggggaggaggaggaaggcggtgacgagtctgacctgagttcggaatccagcattaagaagaaatttctcaagaggaaaggaaagaccgacagtccctggatcaagccagccaggaaaaggaggcggagaagtagaaagaagcccagcggtgccctcggttctgagtcgtataagtcatctgcaggaagcgctgagcagacggcaccaggagacagcacagggtacatggaagtttctctggactccctggatctccgagtcaaaggaattctgtcttcacaagcagaagggttggccaacggtccagatgtgctggagacagacggcctccaggaagtgcctctctgcagctgccggatggaaacaccgaagagtcgagagatcaccacactggccaacaaccagtgcatggctacagagagcgtggaccatgaattgggccggtgcacaaacagcgtggtcaagtatgagctgatgcgcccctccaacaaggccccgctcctcgtgctgtgtgaagaccaccggggccgcatggtgaagcaccagtgctgtcctggctgtggctacttctgcacagcgggtaattttatggagtgtcagcccgagagcagcatctctcaccgtttccacaaagactgtgcctctcgagtcaataacgccagctattgtccccactgtggggaggagagctccaaggccaaagaggtgacgatagctaaagcagacaccacctcgaccgtgacaccagtccccgggcaggagaagggctcggccctggagggcagggccgacaccacaacgggcagtgctgccgggccaccactctcggaggacgacaagctgcagggtgcagcctcccacgtgcccgagggctttgatccaacgggacctgctgggcttgggaggccaactcccggcctttcccagggaccagggaaggaaaccttggagagcgctctcatcgccctcgactcggaaaaacccaagaagcttcgcttccacccaaagcagctgtacttctccgccaggcaaggggagcttcagaaggtgctcctcatgctggtggacggaattgaccccaacttcaaaatggagcaccagaataagcgctctccactgcacgccgcggcagaggctggacacgtggacatctgccacatgctggttcaggcgggcgctaatattgacacctgctcagaagaccagaggaccccgttgatggaagcagccgaaaacaaccatctggaagcagtgaagtacctcatcaaggctggggccctggtggatcccaaggacgcagagggctctacgtgtttgcacctggctgccaagaaaggccactacgaagtggtccagtacctgctttcaaatggacagatggacgtcaactgtcaggatgacggaggctggacacccatgatctgggccacagagtacaagcacgtggacctcgtgaagctgctgctgtccaagggctctgacatcaacatccgagacaacgaggagaacatttgcctgcactgggcggcgttctccggctgcgtggacatagccgagatcctgctggctgccaagtgcgacctccacgccgtgaacatccacggagactcgccactgcacattgccgcccgggagaaccgctacgactgtgtcgtcctctttctttctcgggattcagatgtcaccttaaagaacaaggaaggagagacgcccctgcagtgtgcgagcctcaactctcaggtgtggagcgctctgcagatgagcaaggctctgcaggactcggcccccgacaggcccagccccgtggagaggatagtgagcagggacatcgctcgaggctacgagcgcatccccatcccctgtgtcaacgccgtggacagcgagccatgccccagcaactacaagtacgtctctcagaactgcgtgacgtcccccatgaacatcgacagaaatatcactcatctgcagtactgcgtgtgcatcgacgactgctcctccagcaactgcatgtgcggccagctcagcatgcgctgctggtacgacaaggatggccggctcctgccagagttcaacatggcggagcctcccttgatcttcgaatgcaaccacgcgtgctcctgctggaggaactgccgaaatcgcgtcgtacagaatggtctcagggcaaggctgcagctctaccggacgcgggacatgggctggggcgtgcggtccctgcaggacatcccaccaggcacctttgtctgcgagtatgttggggagctgatttcagactcagaagccgacgttcgagaggaagattcttacctctttgatctcgacaataaggacggggaggtttactgcatcgacgcgcggttctacgggaacgtcagccggttcatcaaccaccactgcgagcccaacctggtgcccgtgcgcgtgttcatggcccaccaggacctgcggttcccccggatcgccttcttcagcacccgcctgatcgaggccggcgagcagctcgggtttgactatggagagcgcttctgggacatcaaaggcaagctcttcagctgccgctgcggctcccccaagtgccggcactcgagcgcggccctggcccagcgtcaggccagcgcggcccaggaggcccaggaggacggcttgcccgacaccagctccgcggctgccgccgaccccctatgagacgccgccggccagcggggcgctcgggagccagggaccgccgcgtcgccgattagaggacgaggaggagagattccgcacgcaaccgaaagggtccttcggggctgcgccgccggcttcctggaggggtcggaggtgaggctgcagcccctgcgggcgggtgtggatgcctcccagccaccttcccagacctgcggcctcaccgcgggcccagtgcccaggctggagcgcacactttggtccgcgcgccagagacgctgggagtccgcactggcatcaccttctgagtttctgatgctgatttgtcgttgcgaagtttctcgtttcttcctctgacctccgaggtccccgctgcaccacggggttgctctgttctcctgtccggcccagactcttctgtgtggcgccgccgaagccaccgttagcgcgagctgctccgttcgccctgcccacggcctgcgtggctggggccgagtcccaggggccgcacggagggcacagtctcctgtcaggctcggagaggtcaggagaccgaccccaccactaactttggagaaaatgtgggtttgctttttaaaggaatcctatatctagtcctatatatcaaacctctaactgacgtttcttttcgaggaagtggcttggtgggtgcagcccccgccggttccgttgacgctggcaccttctgttgattttttaagccacatgctatgatgaataaactgatttattttctaccattactgaacattaggacaaacacaaaataaaaaacaaaacacagacaacggtgctgattctggtgtggtttctactcaccacgtgaaataaactatcaactgtataaagagaacaaagtgattttagaataaaatgcaggaaaaacttttttaaagatgttagtcttgtagcgtgaataaatttgccatcaccttttgtgtggtggcctggcaggtcatatacttttttttggcatatacctttttaaagactgtaattagtgcagtaacagtggggttttttttgtgcaactcttctaaaaacattcataatgcagtcatgtttatttttttctgttaaaatgtttttgacagttttaagagcagtcttttggctctgaccatttcttgttctgtttccaatgaaatcaataaaaaaaaagaagtactttaaa

SEQ ID NO: 130869 - DNA, 7842 bp, Homo sapiens
  Payload ID: 5575
  Gene Symbol: EHMT1
  Gene Name: euchromatic histone-lysine N-methyltransferase 1
  ENST ID: ENST00000462942
  CDS Start-End: 1-2412
atgtcggaggctgatcgcgcccagaagatggacggggagtccgaggaggagcaggagtccgtggacaccggggaggaggaggaaggcggtgacgagtctgacctgagttcggaatccagcattaagaagaaatttctcaagaggaaaggaaagaccgacagtccctggatcaagccagccaggaaaaggaggcggagaagtagaaagaagcccagcggtgccctcggttctgagtcgtataagtcatctgcaggaagcgctgagcagacggcaccaggagacagcacagggtacatggaagtttctctggactccctggatctccgagtcaaaggaattctgtcttcacaagcagaagggttggccaacggtccagatgtgctggagacagacggcctccaggaagtgcctctctgcagctgccggatggaaacaccgaagagtcgagagatcaccacactggccaacaaccagtgcatggctacagagagcgtggaccatgaattgggccggtgcacaaacagcgtggtcaagtatgagctgatgcgcccctccaacaaggccccgctcctcgtgctgtgtgaagaccaccggggccgcatggtgaagcaccagtgctgtcctggctgtggctacttctgcacagcgggtaattttatggagtgtcagcccgagagcagcatctctcaccgtttccacaaagactgtgcctctcgagtcaataacgccagctattgtccccactgtggggaggagagctccaaggccaaagaggtgacgatagctaaagcagacaccacctcgaccgtgacaccagtccccgggcaggagaagggctcggccctggagggcagggccgacaccacaacgggcagtgctgccgggccaccactctcggaggacgacaagctgcagggtgcagcctcccacgtgcccgagggctttgatccaacgggacctgctgggcttgggaggccaactcccggcctttcccagggaccagggaaggaaaccttggagagcgctctcatcgccctcgactcggaaaaacccaagaagcttcgcttccacccaaagcagctgtacttctccgccaggcaaggggagcttcagaaggtgctcctcatgctggtggacggaattgaccccaacttcaaaatggagcaccagaataagcgctctccactgcacgccgcggcagaggctggacacgtggacatctgccacatgctggttcaggcgggcgctaatattgacacctgctcagaagaccagaggaccccgttgatggaagcagccgaaaacaaccatctggaagcagtgaagtacctcatcaaggctggggccctggtggatcccaaggacgcagagggctctacgtgtttgcacctggctgccaagaaaggccactacgaagtggtccagtacctgctttcaaatggacagatggacgtcaactgtcaggatgacggaggctggacacccatgatctgggccacagagtacaagcacgtggacctcgtgaagctgctgctgtccaagggctctgacatcaacatccgagacaacgaggagaacatttgcctgcactgggcggcgttctccggctgcgtggacatagccgagatcctgctggctgccaagtgcgacctccacgccgtgaacatccacggagactcgccactgcacattgccgcccgggagaaccgctacgactgtgtcgtcctctttctttctcgggattcagatgtcaccttaaagaacaaggaaggagagacgcccctgcagtgtgcgagcctcaactctcaggtgtggagcgctctgcagatgagcaaggctctgcaggactcggcccccgacaggcccagccccgtggagaggatagtgagcagggacatcgctcgaggctacgagcgcatccccatcccctgtgtcaacgccgtggacagcgagccatgccccagcaactacaagtacgtctctcagaactgcgtgacgtcccccatgaacatcgacagaaatatcactcatctgcagtactgcgtgtgcatcgacgactgctcctccagcaactgcatgtgcggccagctcagcatgcgctgctggtacgacaaggatggccggctcctgccagagttcaacatggcggagcctcccttgatcttcgaatgcaaccacgcgtgctcctgctggaggaactgccgaaatcgcgtcgtacagaatggtctcagggcaaggctgcagctctaccggacgcgggacatgggctggggcgtgcggtccctgcaggacatcccaccaggcacctttgtctgcgagtatgttggggagctgatttcagactcagaagccgacgttcgagaggaagattcttacctctttgatctcgacaataagatctcctcggcttagcagctgaagactgacgctgcctgatcgcatcccctaggaagccccctggatcatcacggacgccgagcttcgggtaactcttatggtggagggggaaaacgtccagaaacaaatgaatcctcaggtctggaactcaggagaagactctggactgagctatggatctggaaactcctgaacagagcagtggttccaagctggagacgattttgcacctgggggacgtctgcaaggtctggagacagtttgggttgtcacaaccgaaggagtgctatggcacttagtgggatcaggcagggatgttgttaaacactgtacagtgcacaggacagccctccccaacagagttcctggaccgtacatgttaatggtgctggggctgagaggccactgatggactcgtggagctggcgaggcggccctggagtctgtggcctgtgagggaagcgggaacctctgagggagtgcagcgttcagcagcatccacccatccagccacgaggcctggcagaggggtgggagaggaggtggacctgccgtagaccccacaagcctgtcaaggagctgggacttggagtgaaaaggagagcgacgtggtcagaactgtgccttagaaagaccactctggacacagagagggggctggggagaggcgagggctgcatggtgctgtggctgcctgctggaatggcaggctaggccattgtgggcagcagtgagggaaggggtgattcgggagctggaagaggcaggacagggcaacgggctggacttgatgggtgagagaagctagtgacctttggcatgtagcaaacagttctcatgccctgccaccagcatcatgccagggcaggctgggctctcaccctcacagaatgtcccatgaataattatgtaactaaaagtgctgtgtgttgcaggtagcaactaaccggggctggtggcgtgggcagtaaaaagaatttaccaagactgttgtaggtaaagaaaggcagatttatgagagaaagtaggaaaatacgttgcaagaaagcaatgggcaatcaccaagagaggcgctggcagcaagagctgaaggcgtgctggggattttataggatggggcttgtgccggagagggccatgtgcagtgctgataacgcccaggttgcagggagctaacgcgtttttctatcagccgaggatctggtgataactgggcgtaggaagattgtgatttgtctgcacgggagggccgtgtgtcctggaccatgaagaaaggcagactcacagcttctccgctctctctgttgctttcccctggtcccaccagtctgactcctttccctcattaggactccgcagcatggacaccatgaagggaggcagagcctgtgacaggaacgctcagccagggaggcttctctgatgagggccagagctgtccaggccaggcctggggggacagacgcacattcacgttcaaggttttatttgaacatggtttcaatgaatcctctcaatgttttgaaattgcaacttagtttcagtcgtctacaaaacctttgctcccccgtagcagcaccccctttatgttgttattatcacaaattacatcttgacacactgggccaccagcaggacttataattattgtaataggcagttgtctctttaaattgcaaggcacttacagcgaaggtgcctgcatgctccctctagtcccccagggaagcagcccgagcccctgggaagggccaggtattaacttgccagacatcgcagctcattccaggctcccagccactcttccgtcagtggattccaattctgaaaatcggctcatgtccagaaacagcacgggagtgtgacttcctgctggggcagcccctcagcccctgccctctgttgactcttacatgtgaagcttcccccttgttggccactggtttcacccctcagggcaccgtgctctgttaccaccccctgttactgcccccaagcccctcggtggccgcctgcctcatcttccccacggggattagggagcccggctctgtagctgcgtctcccatcatcagcacaggctgcagagggggaacccctcgactctcccaccctcagcacaggctgcagatggggaacccctcaactctcccaccctcagcacaggctgcagacggggaacccctcgactctcccaccctcagcacaggctgcagagggggaacccctcgactctcccaccctcagcacaggctgcagacggggaacccctcgactctcccaccctcagcacaggctgcagacggggaacctcttgactctcccaccctcagcacaggctgcagacggggaatgcctcgacttcctggtgatgctggtgttctccctagggcttcctgcacacccacctccctccaccccattccttcctctaccagctgtcagagaacttgagggtttctgcttcactgtgagctggctaccacttttttcaaggcttttaagagccattccaagttttccccacctcctgggtcctgagaaagtgccccactgcagcaaatgcttccagacccttggtcaagctcctcactctcccatcccgggacttctcttctgccccagctgaggccatcaaccagttcttgcaattacttagctgtgcagcccctttctccctttttaggcttagcaccctgccccttcccgttggtctgtgctgggatttagccctcgcaattggcctggcaggcaggtgggacagctcctgaggcgagcacttgcttcctggtgagacaggtgattccgtaacatctccagcacagtagatgtgctcacctttatggggcaggaggacctgtgcacttccagaggttccagaggactggagggtcctcatcgttacatctttgggacccagattttccccaggggacccttactttctacctttgcagagctgacccaccggtggcccttcactctggttaagtgcctgtttacctctgtggtagaggcactccagtctcacaccgagcttggtaacagttctcaggatgtcggtatggggaaccagcccgctgtcctgtctttgttggtttggttgctccccactcccagtttttcaggggcctgcatcatcccaccagccacagcgctgtgctccaccgagatattttcccaggtcatcactcatgaagctcccaccgtgtgccagggaccaccggacctcccagccaaccaggacagcagcctctgcaccctttgggtggtgggcaggacagtcccagatcctctcctgatgccacttatgttagtccaggtcttccaagatgcagatgggataaaggtataaggatttggttagattttattagatgatgaaggctgagtgtggtggctcgtgcctgtaatcccagcactttgagaggccaaggtgggcagatcacttgaactcaggagttcgaggccagcctgggcaacatggtgaaacaccgtctcaacaaaaacaaacaaacaaaaattagcctggcatggtggtgtgtgcctgtagtccttgctacctgggaggctggaatgggagggttgcttgagtccaggaggtggaggttgcagtgagccgagatcatgcccctgtactgcagcctaggtgatgggaatgaagccctttcaaaaaaagagagaagattttattagatgatgaagattagatattgttgttattattagagatgaagcatggaggtagctaagaaacttggaagagcttcagaatgtgagtagctctaacttccagagaggaagagagggaacgaaggttgactgggagtgacctagatcactaaacaacctaaggaaggttcaggaaagctgccagggagttcttgagccaaagaagtgtggcctcagcacaaatgcagagacagattctgagcacaagagctgaggccattggtcatgacattcccatagttggaggcctatgaagcacactttcaaggaaactgcaactgtttaaaataacagtaatgtcctatgtgtgttttttttaaaagaaaggctgaaagttaattagctcatcatccacccgaagaagcaaaatcaacctaaaacaagaggtataaagagaagcactaattagatagaaactaacatgcactggagacaatcaaaccaaaactggttctttggcaacactaatcagaatggcaaccctctgggcaggtggggaagggggagcataaataaacaatttaaaggtaggccaggtgcagtggctgacacctgtaatcccagcactttgggaggctgaggtgggaggatcacttgagcccaggagttggagaccagcctgggcaacatagcaagaccctgtctctggaaaaaatttaaaaactagctggacatggtggcatgcacctgtgatcccagctactcgggaggctgaggtgggaggctggcttgagcctgggaggttgaggctgcagtgagctgagattctaccactgcagtccagtctgggtgacagagcaagaccatgtctcaataaataaataaataaataaataaataaataaagtggacacagccatagatataacatagatttaaaagataatatgaacaattttaggccaatacatttctagaaaaatataactgcactaacactgactcaagaggaaatagagaacccgaatagtcttataactcttaaagagatagaatcagtaattaaaatcacaaacaaaacatcaggcccagtcagtgagttccactgaactttcaaaatataaattccctatagaaatgctctctaactcatttacaaggctagcataacctggatatccaaacctgatgagaatagtgcagtgcacagctgcaaaaagtctagacaagttattggtaaaccagatctgaattgtacgcaaagatgattatgtttgatttaccccaggaatgacaggttggtttaactttaggaaatcagtttatgtaagccattcccttaacacatagaaggagaaaaattaggtcatttcaatgcagaaaaagcatttgacagaatttatcacctattcgtgagaaaaactcctagaaattaagactagaggggaactttgtgacctgatgaacggtatcttttgaacaaaaaaaaaaagaacaggcctggcgcagtggctcatgcctgtaatcccagcactgtgggaggccaaggtgggcagatcaccctgaggtcagtagttcaagaccaacatggcaaaaccccatctctactaaaaatacaaaaattagccaggtgtggtggcacgcgcctataatcccagctactcaggaggctgagacaggagaattgcttgaacctgggaggtggtggaggttgcagtgagctgagatagtgccactgcacttcagcctgggcaacagatcgagatttcgtct

SEQ ID NO: 130870 - DNA, 558 bp, Homo sapiens
  Payload ID: 5575
  Gene Symbol: EHMT1
  Gene Name: euchromatic histone-lysine N-methyltransferase 1
  ENST ID: ENST00000626216
  CDS Start-End: 239-558
ggccacgctgcgggcccgggccatggccgccgccgatgccgagataggtggtcttgctctgtggccctgctggagtgcagtggtgccatcatggctcacttcagtcttgaactcctgagctcaagtgatcctcctacttcagcctcctgagtagctgggactacaggcagttccggcgaggggggagcctcagcaggattgctgtgtgaaaaccgagctgctgggagaagagacacctatggctgccgatgaaggctcagcagagaaacaggcaggagaggcccacatggctgcggacggtgagaccaatgggtcttgtgaaaacagcgatgccagcagtcatgcaaatgctgcaaagcacactcaggacagcgcaagggtcaacccccaggatggcaccaacacactaactcggatagcggaaaatggggtttcagaaagagactcagaagcggcgaagcaaaaccacgtcactgccgacgactttgtgcagacttctgtcatcggcagcaacggatacatcttaaataagccggccctacaggcacagcccttgag

SEQ ID NO: 130871 - DNA, 1297 bp, Homo sapiens
  Payload ID: 5575
  Gene Symbol: EHMT1
  Gene Name: euchromatic histone-lysine N-methyltransferase 1
  ENST ID: ENST00000626066
  CDS Start-End: 1-1297
tgggagaagagacacctatggctgccgatgaaggctcagcagagaaacaggcaggagaggcccacatggctgcggacggtgagaccaatgggtcttgtgaaaacagcgatgccagcagtcatgcaaatgctgcaaagcacactcaggacagcgcaagggtcaacccccaggatggcaccaacacactaactcggatagcggaaaatggggtttcagaaagagactcagaagcggcgaagcaaaaccacgtcactgccgacgactttgtgcagacttctgtcatcggcagcaacggatacatcttaaataagccggccctacaggcacagcccttgaggactaccagcactctggcctcttcgctgcctggccatgctgcaaaaacccttcctggaggggctggcaaaggcaggactccaagcgcttttccccagacgccagccgccccaccagccacccttggggaggggagtgctgacacagaggacaggaagctcccggcccctggcgccgacgtcaaggtccacagggcacgcaagaccatgccgaagtccgtcgtgggcctgcatgcagccagtaaagatcccagagaagttcgagaagctagagatcataaggaaccaaaagaggagatcaacaaaaacatttctgactttggacgacagcagcttttaccccccttcccatcccttcatcagtcgctacctcagaaccagtgctacatggccaccacaaaatcacagacagcagctgcagtatctcggaagaaaaaacgaagaatgggaacctatagcctggttcctaagaaaaagaccaaagtattaaaacagaggacggtgattgagatgtttaagagcataactcattccactgtgggttccaagggggagaaggacctgggcgccagcagcctgcacgtgaatggggagagcctggagatggactcggatgaggacgactcagaggagctcgaggaggacgacggccatggtgcagagcaggcggccgcgttccccacagaggacagcaggacttccaaggagagcatgtcggaggctgatcgcgcccagaagatggacggggagtccgaggaggagcaggagtccgtggacaccggggaggaggaggaaggcggtgacgagtctgacctgagttcggaatccagcattaagaagaaatttctcaagaggaaaggaaagaccgacagtccctggatcaagccagccaggaaaaggaggcggagaagtagaaagaagcccagcggtgccctcggttctgagtcgtataagtcatctgc

SEQ ID NO: 130872 - DNA, 709 bp, Homo sapiens
  Payload ID: 5575
  Gene Symbol: EHMT1
  Gene Name: euchromatic histone-lysine N-methyltransferase 1
  ENST ID: ENST00000630754
  CDS Start-End: 298-709
gcggggccacgctgcgggcccgggccatggccgccgccgatgccgagactgtgttgatcaggctggttgaactcctgggctcaagcaatcttcccgctgccatatgaatatgaatatgtgcacacccgtggttccagctactcaggaggctgaggtgggaggatcacgagcctgggagttcgaggctgcggtgagctgtgattgcaccactgcactccagcctgggcagttccggcgaggggggagcctcagcaggattgctgtgtgaaaaccgagctgctgggagaagagacacctatggctgccgatgaaggctcagcagagaaacaggcaggagaggcccacatggctgcggacggtgagaccaatgggtcttgtgaaaacagcgatgccagcagtcatgcaaatgctgcaaagcacactcaggacagcgcaagggtcaacccccaggatggcaccaacacactaactcggatagcggaaaatggggtttcagaaagagactcagaagcggcgaagcaaaaccacgtcactgccgacgactttgtgcagacttctgtcatcggcagcaacggatacatcttaaataagccggccctacaggcacagcccttgaggactaccagcactctggcctcttcgctgcctggccatgctgcaaaaacccttcctggaggggctggcaaaggcaggactccaagcgcttttc

SEQ ID NO: 130873 - DNA, 2679 bp, Homo sapiens
  Payload ID: 5575
  Gene Symbol: EHMT1
  Gene Name: euchromatic histone-lysine N-methyltransferase 1
  Uniprot ID: Q9H9B1
  ENST ID: ENST00000371394
  CDS Start-End: 37-237
cgcgggaggggcggggccacgctgcgggcccgggccatggccgccgccgatgccgagagacacctatggctgccgatgaaggctcagcagagaaacaggcaggagaggcccacatggctgcggacggtgagaccaatgggtcttgtgaaaacagcgatgccagcagtcatgcaaatgctgcaaagcacactcaggacagcgcaagggtcaacccccaggatggcaccaacacactaactcggatagcggaaaatggggtttcagaaagagactcagaagcggcgaagcaaaaccacgtcactgccgacgactttgtgcagacttctgtcatcggcagcaacggatacatcttaaataagccggccctacaggcacagcccttgaggactaccagcactctggcctcttcgctgcctggccatgctgcaaaaacccttcctggaggggctggcaaaggcaggactccaagcgcttttccccagacgccagccgccccaccagccacccttggggaggggagtgctgacacagaggacaggaagctcccggcccctggcgccgacgtcaaggtccacagggcacgcaagaccatgccgaagtccgtcgtgggcctgcatgcagccagtaaagatcccagagaagttcgagaagctagagatcataaggaaccaaaagaggagatcaacaaaaacatttctgactttggacgacagcagcttttaccccccttcccatcccttcatcagtcgctacctcagaaccagtgctacatggccaccacaaaatcacagacagcttgcttgccttttgttttagcagctgcagtatctcggaagaaaaaacgaagaatgggaacctatagcctggttcctaagaaaaagaccaaagtattaaaacagaggacggtgattgagatgtttaagagcataactcattccactgtgggttccaagggggagaaggacctgggcgccagcagcctgcacgtgaatggggagagcctggagatggactcggatgaggacgactcagaggagctcgaggaggacgacggccatggtgcagagcaggcggccgcgttccccacagaggacagcaggacttccaaggagagcatgtcggaggctgatcgcgcccagaagatggacggggagtccgaggaggagcaggagtccgtggacaccggggaggaggaggaaggcggtgacgagtctgacctgagttcggaatccagcattaagaagaaatttctcaagaggaaaggaaagaccgacagtccctggatcaagccagccaggaaaaggaggcggagaagtagaaagaagcccagcggtgccctcggttctgagtcgtataagtcatctgcaggaagcgctgagcagacggcaccaggagacagcacagggtacatggaagtttctctggactccctggatctccgagtcaaaggaattctgtcttcacaagcagaagggttggccaacggtccagatgtgctggagacagacggcctccaggaagtgcctctctgcagctgccggatggaaacaccgaagagtcgagagatcaccacactggccaacaaccagtgcatggctacagagagcgtggaccatgaattgggccggtgcacaaacagcgtggtcaagtatgagctgatgcgcccctccaacaaggccccgctcctcgtgctgtgtgaagaccaccggggccgcatggtgaagcaccagtgctgtcctggctgtggctacttctgcacagcgggtaattttatggagtgtcagcccgagagcagcatctctcaccgtttccacaaagactgtgcctctcgagtcaataacgccagctattgtccccactgtggggaggagagctccaaggccaaagaggtgacgatagctaaagcagacaccacctcgaccgtgacaccagtccccgggcaggagaagggctcggccctggagggcagggccgacaccacaacgggcagtgctgccgggccaccactctcggaggacgacaagctgcagggtgcagcctcccacgtgcccgagggctttgatccaacgggacctgctgggcttgggaggccaactcccggcctttcccagggaccagggaaggaaaccttggagagcgctctcatcgccctcgactcggaaaaacccaagaagcttcgcttccacccaaagcagctgtacttctccgccaggcaaggggagcttcagaaggtgctcctcatgctggtggacggaattgaccccaacttcaaaatggagcaccagaataagcgctctccactgcacgccgcggcagaggctggacacgtggacatctgccacatgctggttcaggcgggcgctaatattgacacctgctcagaagaccagaggaccccgttgatggaagcagccgaaaacaaccatctggaagcagtgaagtacctcatcaaggctggggccctggtggatcccaagatacagaaaacttctaaagtttatacggagtctcaagagacccagagaagccaaacaattttgtgaaagaacagagttggagaactcacacttgctgatttcaaaacttactatatacggccacagtaatgaaaacagtgtgggactggcataaagacagaaatagagaccaatggaataaaataaaaagcccagaaataaa

SEQ ID NO: 130874 - DNA, 689 bp, Homo sapiens
  Payload ID: 5575
  Gene Symbol: EHMT1
  Gene Name: euchromatic histone-lysine N-methyltransferase 1
  ENST ID: ENST00000629808
  CDS Start-End: 1-689
tgccttttgttttagcagctgcagtatctcggaagaaaaaacgaagaatgggaacctatagcctggttcctaagaaaaagaccaaagtattaaaacagaggacggtgattgagatgtttaagagcataactcattccactgtgggttccaagggggagaaggacctgggcgccagcagcctgcacgtgaatggggagagcctggagatggactcggatgaggacgactcagaggagctcgaggaggacgacggccatggtgcagagcaggcggccgcgttccccacagaggacagcaggacttccaaggagagcatgtcggaggctgatcgcgcccagaagagttcggaatccagcattaagaagaaatttctcaagaggaaaggaaagaccgacagtccctggatcaagccagccaggaaaaggaggcggagaagtagaaagaagcccagcggtgccctcggttctgagtcgtataagtcatctgcaggaagcgctgagcagacggcaccaggagacagcacagggtacatggaagtttctctggactccctggatctccgagtcaaaggaattctgtcttcacaagcagaagggttggccaacggtccagatgtgctggagacagacggcctccaggaagtgcctctctgcagctgccggatggaaacaccgaagagtcgagagatc

SEQ ID NO: 130875 - DNA, 781 bp, Homo sapiens
  Payload ID: 5575
  Gene Symbol: EHMT1
  Gene Name: euchromatic histone-lysine N-methyltransferase 1
  ENST ID: ENST00000486164
  CDS Start-End: 1-326
ccccgttgatggaagcagccgaaaacaaccatctggaagcagtgaagtacctcatcaaggctggggccctggtggatcccaaggacgcagagggctctacgtgtttgcacctggctgccaagaaaggccactacgaagtggtccagtacctgctttcaaatggacagatggacgtcaactgtcaggatgacggaggctggacacccatgatctgggccacagagtacaagcacgtggacctcgtgaagctgctgctgtccaagggctctgacatcaacatccgagacaacgtaggctgcatatattcaaagtacacacttgggtgaattttcacccagaagccattgttgctgtcggaagagtgagcccagtcctccctcatgccctgatgatcttcaggaggagaacatttgcctgcactgggcggcgttctccggctgcgtggacatagccgagatcctgctggctgccaagtgcgacctccacgccgtgaacatccacggagactcgccactgcacattgccgcccgggagaaccgctacgactgtgtcgtcctctttctttctcgggattcagatgtcaccttaaagaacaaggaaggagagacgcccctgcagtgtgcgagcctcaactctcaggtgtggagcgctctgcagatgagcaaggctctgcaggactcggcccccgacaggcccagccccgtggagaggatagtgagcagggacatcgctcgaggctacgagcgcatccccatcccctgtgtcaacgccgtggacagcg

SEQ ID NO: 130876 - DNA, 503 bp, Homo sapiens
  Payload ID: 5575
  Gene Symbol: EHMT1
  Gene Name: euchromatic histone-lysine N-methyltransferase 1
  ENST ID: ENST00000465566
  CDS Start-End: 1-503
tggatcaagccagccaggaaaaggaggcggagaagtagaaagaagcccagcggtgccctcggttctgagtcgtataagtcatctgcaggaagcgctgagcagacggcaccaggagacagcacagggtacatggaagtttctctggactccctggatctccgagtcaaaggaattctgtcttcacaagcagaagggttggccaacggtccagatgtgctggagacagacggcctccaggaagtgcctctctgcagctgccggatggaaacaccgaagagtcgagagatcaccacactggccaacaaccagtgcatggctacagagagcgtggaccatgaaggtaattttatggagtgtcagcccgagagcagcatctctcaccgtttccacaaagactgtgcctctcgagtcaataacgccagctattgtccccactgtggggaggagagctccaaggccaaagaggtgacgatagctaaagcagacaccacctcgaccgtgac

SEQ ID NO: 130877 - DNA, 1182 bp, Homo sapiens
  Payload ID: 5575
  Gene Symbol: EHMT1
  Gene Name: euchromatic histone-lysine N-methyltransferase 1
  ENST ID: ENST00000493484
  CDS Start-End: 114-437
agagcctcgcggagggtgagcggccggcggcttcgaccttggagtcccaggctgtgtgggacttggcgggcgctaatattgacacctgctcagaagaccagaggaccccgttgatggaagcagccgaaaacaaccatctggaagcagtgaagtacctcatcaaggctggggccctggtggatcccaaggacgcagagggctctacgtgtttgcacctggctgccaagaaaggccactacgaagtggtccagtacctgctttcaaatggacagatggacgtcaactgtcaggatgacggaggctggacacccatgatctgggccacagagtacaagcacgtggacctcgtgaagctgctgctgtccaagggctctgacatcaacatccgagacaacagggttccagaggccagaaatgggaagtccagccacaaataaacccactaaattgataataagaaagaagatttgacacagaaaaagaagatttctaaaagcacactattaaatctccaatgtgctgaagtctggtgtctgaggagggagggctgacacttcctctcagagcttgagaacggcgtgggcacgggcccttgccattcattgttggcacggggaggtctgcatttggaacccctcgctgcatgtaagcagaccccacctcccacctagaaacagggaccactggctgtgggcacccgctgcctccctgcaggcacgcaggcctctctggagtgactggtcctgagctgcagtgcctcctccgtgggctgcagggcttccatgactgtatccagggggtttctacctcattccaccggagttctttcccactgcgggttaggatgacggcaccatgaagagaggagccctgagccggcagaaggaagagaagagggaagcagaggagccctgagctggtggaaggctgtggcgggtaccttggaggaagagaggagggaagcaaaggcagagaacaaggcagaggccacccccaggtggggccacctcacccaccgcccccggagactgcgtggcggggaaggcggccctagtgtggctggtcggcctgcatgcctgggcagtttgcagcctgtccaggtgtcagagctgttagctctctgatgctggtggctgttcccccagaatggaagcattgattaaatttcaagtttgttattta

SEQ ID NO: 130878 - DNA, 710 bp, Homo sapiens
  Payload ID: 5575
  Gene Symbol: EHMT1
  Gene Name: euchromatic histone-lysine N-methyltransferase 1
  ENST ID: ENST00000492232
  CDS Start-End: 294-710
agctctgaggaaactccagctcagcgcacagcatgaggaggacgagggaacaatagggcgttcctttgtgcctgcccttgaaacgcggtggaggccactcagtgagcccgggcagtgccatcgctcacgtgtccccagcagcagtggcgtctgtggggatgctgtgcactggaaattggcactgttttgggtagtggttctgagaggaactgtttaaccaggcagttccggcgaggggggagcctcagcaggattgctgtgtgaaaaccgagctgctgggagaagagacacctatggctgccgatgaaggctcagcagagaaacaggcaggagaggcccacatggctgcggacggtgagaccaatgggtcttgtgaaaacagcgatgccagcagtcatgcaaatgctgcaaagcacactcaggacagcgcaagggtcaacccccaggatggcaccaacacactaactcggatagcggaaaatggggtttcagaaagagactcagaagcggcgaagcaaaaccacgtcactgccgacgactttgtgcagacttctgtcatcggcagcaacggatacatcttaaataagccggccctacaggcacagcccttgaggactaccagcactctggcctcttcgctgcctggccatgctgcaaaaacccttcctggaggggctggcaaaggcaggactccaagcgcttttccccag

SEQ ID NO: 130879 - DNA, 691 bp, Homo sapiens
  Payload ID: 5575
  Gene Symbol: EHMT1
  Gene Name: euchromatic histone-lysine N-methyltransferase 1
  ENST ID: ENST00000482340
  CDS Start-End: 67-420
caggctgtgtgggacttggcgggcgctaatattgacacctgctcagaagaccagaggaccccgttgatggaagcagccgaaaacaaccatctggaagcagtgaagtacctcatcaaggctggggccctggtggatcccaaggacgcagagggctctacgtgtttgcacctggctgccaagaaaggccactacgaagtggtccagtacctgctttcaaatggacagatggacgtcaactgtcaggatgacggaggctggacacccatgatctgggccacagagtacaagcacgtggacctcgtgaagctgctgctgtccaagggctctgacatcaacatccgagacaacgatgacggcaccatgaagagaggagccctgagccggcagaaggaagagaagagggaagcagaggagccctgagctggtggaaggctgtggcgggtaccttggaggaagagaggagggaagcaaaggcagagaacaaggcagaggccacccccaggtggggccacctcacccaccgcccccggagactgcgtggcggggaaggcggccctagtgtggctggtcggcctgcatgcctgggcagtttgcagcctgtccaggtgtcagagctgttagctctctgatgctggtggctgttcccccagaatggaagcattgattaaatttcaagtttgttatttataca

SEQ ID NO: 130880 - DNA, 882 bp, Homo sapiens
  Payload ID: 5575
  Gene Symbol: EHMT1
  Gene Name: euchromatic histone-lysine N-methyltransferase 1
  ENST ID: ENST00000629417
  CDS Start-End: 479-882
agagatggggtttcaccatgttggccaggctggtcttgaactcctgacttcaaatgatccacccgcctcggcctcccaaagtgctgagattacaggcgtgagccaccgcgcccggccattacgcctgactaattttttttgtatttttagtagagagagggtttcaccgtgtcagccaggatggtcttgatctcctgacctcgtgatctgcctgcctcggccctgcaaagtgctgggattacaggcgtgagccaccgcgcccggcctatattttatttttttagacagggtctcactctgttgcccaggctggagtgcagtggcgcgatctctgctcgctgcaacctccgcctcccgggttcaggtgatcctcctgcctcagcctctgaagtagccgggactacaggcagttccggcgaggggggagcctcagcaggattgctgtgtgaaaaccgagctgctgggagaagagacacctatggctgccgatgaaggctcagcagagaaacaggcaggagaggcccacatggctgcggacggtgagaccaatgggtcttgtgaaaacagcgatgccagcagtcatgcaaatgctgcaaagcacactcaggacagcgcaagggtcaacccccaggatggcaccaacacactaactcggatagcggaaaatggggtttcagaaagagactcagaagcggcgaagcaaaaccacgtcactgccgacgactttgtgcagacttctgtcatcggcagcaacggatacatcttaaataagccggccctacaggcacagcccttgaggactaccagcactctggcctcttcgctgcctggccatgctgcaaaaacccttcctggaggggctggcaaaggcaggactccaag

SEQ ID NO: 130881 - DNA, 818 bp, Homo sapiens
  Payload ID: 5575
  Gene Symbol: EHMT1
  Gene Name: euchromatic histone-lysine N-methyltransferase 1
  ENST ID: ENST00000460486
  CDS Start-End: 14-818
tttggagttgaaaatgttgtacttttctaggagccatttccccaggccatgtggaggtcaggtatctgctggttctggcctcactctactcctcctcctcctccccgctctgtggagagggtggcttgaaggagacgggcagcaggcagttccggcgaggggggagcctcagcaggattgctgtgtgaaaaccgagctgctgggagaagagacacctatggctgccgatgaaggctcagcagagaaacaggcaggagaggcccacatggctgcggacggtgagaccaatgggtcttgtgaaaacagcgatgccagcagtcatgcaaatgctgcaaagcacactcaggacagcgcaagggtcaacccccaggatggcaccaacacactaactcggatagcggaaaatggggtttcagaaagagactcagaagcggcgaagcaaaaccacgtcactgccgacgactttgtgcagacttctgtcatcggcagcaacggatacatcttaaataagccggccctacaggcacagcccttgaggactaccagcactctggcctcttcgctgcctggccatgctgcaaaaacccttcctggaggggctggcaaaggcaggactccaagcgcttttccccagacgccagccgccccaccagccacccttggggaggggagtgctgacacagaggacaggaagctcccggcccctggcgccgacgtcaaggtccacagggcacgcaagaccatgccgaagtccgtcgtgggcctgcatgcagccagtaaagatcccagagaagttcgagaagctagagatcataagg

SEQ ID NO: 130882 - DNA, 4047 bp, Homo sapiens
  Payload ID: 5576
  Gene Symbol: EHMT2
  Gene Name: euchromatic histone-lysine N-methyltransferase 2
  ENST ID: ENST00000375528
  CDS Start-End: 21-3722
ctcttctctcggccccagagatgcggggtctaccgagagggagggggttgatgcgggcccgggggaggggtcgtgcggcccctccgggcagccgaggccgcggaaggggggggccccacagaggaagaggtaggccccggagcctactctctcttcccagggcccaggcatcctggaccccccaactctctactgggctgaccagccctcctgtcccttgtctcccctcccagggggaggcccccgctgagatgggggcgctgctgctggagaaggaaaccagaggagccaccgagagagttcatggctctttgggggacacccctcgtagtgaagaaaccctgcccaaggccacccccgactccctggagcctgctggcccctcatctccagcctctgtcactgtcactgttggtgatgagggggctgacacccctgtaggggctacaccactcattggggatgaatctgagaatcttgagggagatggggacctccgtgggggccggatcctgctgggccatgccacaaagtcattcccctcttcccccagcaaggggggttcctgtcctagccgggccaagatgtcaatgacaggggcgggaaaatcacctccatctgtccagagtttggctatgaggctactgagtatgccaggagcccagggagctgcagcagcagggtctgaaccccctccagccaccacgagcccagagggacagcccaaggtccaccgagcccgcaaaaccatgtccaaaccaggaaatggacagcccccggtccctgagaagcggccccctgaaatacagcatttccgcatgagtgatgatgtccactcactgggaaaggtgacctcagatctggccaaaaggaggaagctgaactcaggaggtggcctgtcagaggagttaggttctgcccggcgttcaggagaagtgaccctgacgaaaggggaccccgggtccctggaggagtgggagacggtggtgggtgatgacttcagtctctactatgattcctactctgtggatgagcgcgtggactccgacagcaagtctgaagttgaagctctaactgaacaactaagtgaagaggaggaggaggaagaggaggaagaagaagaagaggaagaggaggaggaagaggaagaagaagaggaagatgaggagtcagggaatcagtcagataggagtggttccagtggccggcgcaaggccaagaagaaatggcgaaaagacagcccatgggtgaagccgtctcggaaacggcgcaagcgggagcctccgcgggccaaggagccacgaggggtgtccaatgacacatcttcgctggagacagagcgagggtttgaggagttgcccctgtgcagctgccgcatggaggcacccaagattgaccgcatcagcgagagggcggggcacaagtgcatggccactgagagtgtggacggagagctgtcaggctgcaatgccgccatcctcaagcgggagaccatgaggccatccagccgtgtggccctgatggtgctctgtgagacccaccgcgcccgcatggtcaaacaccactgctgcccgggctgcggctacttctgcacggcgggcaccttcctggagtgccaccctgacttccgtgtggcccaccgcttccacaaggcctgtgtgtctcagctgaatgggatggtcttctgtccccactgtggggaggatgcttctgaagctcaagaggtgaccatcccccggggtgacggggtgaccccaccggccggcactgcagctcctgcacccccacccctgtcccaggatgtccccgggagagcagacacttctcagcccagtgcccggatgcgagggcatggggaaccccggcgcccgccctgcgatcccctggctgacaccattgacagctcagggccctccctgaccctgcccaatgggggctgcctttcagccgtggggctgccactggggccaggccgggaggccctggaaaaggccctggtcatccaggagtcagagaggcggaagaagctccgtttccaccctcggcagttgtacctgtccgtgaagcagggcgagctgcagaaggtgatcctgatgctgttggacaacctggaccccaacttccagagcgaccagcagagcaagcgcacgcccctgcatgcagccgcccagaagggctccgtggagatctgccatgtgctgctgcaggctggagccaacataaatgcagtggacaaacagcagcggacgccactgatggaggccgtggtgaacaaccacctggaggtagcccgttacatggtgcagcgtggtggctgtgtctatagcaaggaggaggacggttccacctgcctccaccacgcagccaaaatcgggaacttggagatggtcagcctgctgctgagcacaggacaggtggacgtcaacgcccaggacagtggggggtggacgcccatcatctgggctgcagagcacaagcacatcgaggtgatccgcatgctactgacgcggggcgccgacgtcaccctcactgacaacgaggagaacatctgcctgcactgggcctccttcacgggcagcgccgccatcgccgaagtccttctgaatgcgcgctgtgacctccatgctgtcaactaccatggggacacccccctgcacatcgcagctcgggagagctaccatgactgcgtgctgttattcctgtcacgtggggccaaccctgagctgcggaacaaagagggggacacagcatgggacctgactcccgagcgctccgacgtgtggtttgcgcttcaactcaaccgcaagctccgacttggggtgggaaatcgggccatccgcacagagaagatcatctgccgggacgtggctcggggctatgagaacgtgcccattccctgtgtcaacggtgtggatggggagccctgccctgaggattacaagtacatctcagagaactgcgagacgtccaccatgaacatcgatcgcaacatcacccacctgcagcactgcacgtgtgtggacgactgctctagctccaactgcctgtgcggccagctcagcatccggtgctggtatgacaaggatgggcgattgctccaggaatttaacaagattgagcctccgctgattttcgagtgtaaccaggcgtgctcatgctggagaaactgcaagaaccgggtcgtacagagtggcatcaaggtgcggctacagctctaccgaacagccaagatgggctggggggtccgcgccctgcagaccatcccacaggggaccttcatctgcgagtatgtcggggagctgatctctgatgctgaggctgatgtgagagaggatgattcttacctcttcgacttagacaacaaggatggagaggtgtactgcatagatgcccgttactatggcaacatcagccgcttcatcaaccacctgtgtgaccccaacatcattcccgtccgggtcttcatgctgcaccaagacctgcgatttccacgcatcgccttcttcagttcccgagacatccggactggggaggagctagggtttgactatggcgaccgcttctgggacatcaaaagcaaatatttcacctgccaatgtggctctgagaagtgcaagcactcagccgaagccattgccctggagcagagccgtctggcccgcctggacccacaccctgagctgctgcccgagctcggctccctgccccctgtcaacacatgagaacggaccacaccctctctccccagcatggatggccacagctcagccgcctcctctgccaccagctgctcgcagcccatgcctgggggtgctgccatcttctctccccaccaccctttcacacattcctgaccagagatcccagccaggccctggaggtctgacagcccctccctcccagagctggttcctccctgggagggcaacttcagggctggccaccccccgtgttccccatcctcagttgaagtttgatgaattgaagtcgggcctctatgccaactggttccttttgttctcaataaatgttgggtttggtaataaa

SEQ ID NO: 130883 - DNA, 3856 bp, Homo sapiens
  Payload ID: 5576
  Gene Symbol: EHMT2
  Gene Name: euchromatic histone-lysine N-methyltransferase 2
  Uniprot ID: Q96KQ7
  ENST ID: ENST00000375530
  CDS Start-End: 1-3531
atggcggcggcggcgggagctgcagcggcggcggccgccgagggggaggcccccgctgagatgggggcgctgctgctggagaaggaaaccagaggagccaccgagagagttcatggctctttgggggacacccctcgtagtgaagaaaccctgcccaaggccacccccgactccctggagcctgctggcccctcatctccagcctctgtcactgtcactgttggtgatgagggggctgacacccctgtaggggctacaccactcattggggatgaatctgagaatcttgagggagatggggacctccgtgggggccggatcctgctgggccatgccacaaagtcattcccctcttcccccagcaaggggggttcctgtcctagccgggccaagatgtcaatgacaggggcgggaaaatcacctccatctgtccagagtttggctatgaggctactgagtatgccaggagcccagggagctgcagcagcagggtctgaaccccctccagccaccacgagcccagagggacagcccaaggtccaccgagcccgcaaaaccatgtccaaaccaggaaatggacagcccccggtccctgagaagcggccccctgaaatacagcatttccgcatgagtgatgatgtccactcactgggaaaggtgacctcagatctggccaaaaggaggaagctgaactcaggaggtggcctgtcagaggagttaggttctgcccggcgttcaggagaagtgaccctgacgaaaggggaccccgggtccctggaggagtgggagacggtggtgggtgatgacttcagtctctactatgattcctactctgtggatgagcgcgtggactccgacagcaagtctgaagttgaagctctaactgaacaactaagtgaagaggaggaggaggaagaggaggaagaagaagaagaggaagaggaggaggaagaggaagaagaagaggaagatgaggagtcagggaatcagtcagataggagtggttccagtggccggcgcaaggccaagaagaaatggcgaaaagacagcccatgggtgaagccgtctcggaaacggcgcaagcgggagcctccgcgggccaaggagccacgaggggtgtccaatgacacatcttcgctggagacagagcgagggtttgaggagttgcccctgtgcagctgccgcatggaggcacccaagattgaccgcatcagcgagagggcggggcacaagtgcatggccactgagagtgtggacggagagctgtcaggctgcaatgccgccatcctcaagcgggagaccatgaggccatccagccgtgtggccctgatggtgctctgtgagacccaccgcgcccgcatggtcaaacaccactgctgcccgggctgcggctacttctgcacggcgggcaccttcctggagtgccaccctgacttccgtgtggcccaccgcttccacaaggcctgtgtgtctcagctgaatgggatggtcttctgtccccactgtggggaggatgcttctgaagctcaagaggtgaccatcccccggggtgacggggtgaccccaccggccggcactgcagctcctgcacccccacccctgtcccaggatgtccccgggagagcagacacttctcagcccagtgcccggatgcgagggcatggggaaccccggcgcccgccctgcgatcccctggctgacaccattgacagctcagggccctccctgaccctgcccaatgggggctgcctttcagccgtggggctgccactggggccaggccgggaggccctggaaaaggccctggtcatccaggagtcagagaggcggaagaagctccgtttccaccctcggcagttgtacctgtccgtgaagcagggcgagctgcagaaggtgatcctgatgctgttggacaacctggaccccaacttccagagcgaccagcagagcaagcgcacgcccctgcatgcagccgcccagaagggctccgtggagatctgccatgtgctgctgcaggctggagccaacataaatgcagtggacaaacagcagcggacgccactgatggaggccgtggtgaacaaccacctggaggtagcccgttacatggtgcagcgtggtggctgtgtctatagcaaggaggaggacggttccacctgcctccaccacgcagccaaaatcgggaacttggagatggtcagcctgctgctgagcacaggacaggtggacgtcaacgcccaggacagtggggggtggacgcccatcatctgggctgcagagcacaagcacatcgaggtgatccgcatgctactgacgcggggcgccgacgtcaccctcactgacaacgaggagaacatctgcctgcactgggcctccttcacgggcagcgccgccatcgccgaagtccttctgaatgcgcgctgtgacctccatgctgtcaactaccatggggacacccccctgcacatcgcagctcgggagagctaccatgactgcgtgctgttattcctgtcacgtggggccaaccctgagctgcggaacaaagagggggacacagcatgggacctgactcccgagcgctccgacgtgtggtttgcgcttcaactcaaccgcaagctccgacttggggtgggaaatcgggccatccgcacagagaagatcatctgccgggacgtggctcggggctatgagaacgtgcccattccctgtgtcaacggtgtggatggggagccctgccctgaggattacaagtacatctcagagaactgcgagacgtccaccatgaacatcgatcgcaacatcacccacctgcagcactgcacgtgtgtggacgactgctctagctccaactgcctgtgcggccagctcagcatccggtgctggtatgacaaggatgggcgattgctccaggaatttaacaagattgagcctccgctgattttcgagtgtaaccaggcgtgctcatgctggagaaactgcaagaaccgggtcgtacagagtggcatcaaggtgcggctacagctctaccgaacagccaagatgggctggggggtccgcgccctgcagaccatcccacaggggaccttcatctgcgagtatgtcggggagctgatctctgatgctgaggctgatgtgagagaggatgattcttacctcttcgacttagacaacaaggatggagaggtgtactgcatagatgcccgttactatggcaacatcagccgcttcatcaaccacctgtgtgaccccaacatcattcccgtccgggtcttcatgctgcaccaagacctgcgatttccacgcatcgccttcttcagttcccgagacatccggactggggaggagctagggtttgactatggcgaccgcttctgggacatcaaaagcaaatatttcacctgccaatgtggctctgagaagtgcaagcactcagccgaagccattgccctggagcagagccgtctggcccgcctggacccacaccctgagctgctgcccgagctcggctccctgccccctgtcaacacatgagaacggaccacaccctctctccccagcatggatggccacagctcagccgcctcctctgccaccagctgctcgcagcccatgcctgggggtgctgccatcttctctccccaccaccctttcacacattcctgaccagagatcccagccaggccctggaggtctgacagcccctccctcccagagctggttcctccctgggagggcaacttcagggctggccaccccccgtgttccccatcctcagttgaagtttgatgaattgaagtcgggcctctatgccaactggttccttttgttctcaataaatgttgggtttggtaataaa

SEQ ID NO: 130884 - DNA, 3965 bp, Homo sapiens
  Payload ID: 5576
  Gene Symbol: EHMT2
  Gene Name: euchromatic histone-lysine N-methyltransferase 2
  Uniprot ID: Q96KQ7
  ENST ID: ENST00000375537
  CDS Start-End: 8-3640
agcggcgatggcggcggcggcgggagctgcagcggcggcggccgccgagggggaggcccccgctgagatgggggcgctgctgctggagaaggaaaccagaggagccaccgagagagttcatggctctttgggggacacccctcgtagtgaagaaaccctgcccaaggccacccccgactccctggagcctgctggcccctcatctccagcctctgtcactgtcactgttggtgatgagggggctgacacccctgtaggggctacaccactcattggggatgaatctgagaatcttgagggagatggggacctccgtgggggccggatcctgctgggccatgccacaaagtcattcccctcttcccccagcaaggggggttcctgtcctagccgggccaagatgtcaatgacaggggcgggaaaatcacctccatctgtccagagtttggctatgaggctactgagtatgccaggagcccagggagctgcagcagcagggtctgaaccccctccagccaccacgagcccagagggacagcccaaggtccaccgagcccgcaaaaccatgtccaaaccaggaaatggacagcccccggtccctgagaagcggccccctgaaatacagcatttccgcatgagtgatgatgtccactcactgggaaaggtgacctcagatctggccaaaaggaggaagctgaactcaggaggtggcctgtcagaggagttaggttctgcccggcgttcaggagaagtgaccctgacgaaaggggaccccgggtccctggaggagtgggagacggtggtgggtgatgacttcagtctctactatgattcctactctgtggatgagcgcgtggactccgacagcaagtctgaagttgaagctctaactgaacaactaagtgaagaggaggaggaggaagaggaggaagaagaagaagaggaagaggaggaggaagaggaagaagaagaggaagatgaggagtcagggaatcagtcagataggagtggttccagtggccggcgcaaggccaagaagaaatggcgaaaagacagcccatgggtgaagccgtctcggaaacggcgcaagcgggagcctccgcgggccaaggagccacgaggagtgaatggtgtgggctcctcaggccccagtgagtacatggaggtccctctggggtccctggagctgcccagcgaggggaccctctcccccaaccacgctggggtgtccaatgacacatcttcgctggagacagagcgagggtttgaggagttgcccctgtgcagctgccgcatggaggcacccaagattgaccgcatcagcgagagggcggggcacaagtgcatggccactgagagtgtggacggagagctgtcaggctgcaatgccgccatcctcaagcgggagaccatgaggccatccagccgtgtggccctgatggtgctctgtgagacccaccgcgcccgcatggtcaaacaccactgctgcccgggctgcggctacttctgcacggcgggcaccttcctggagtgccaccctgacttccgtgtggcccaccgcttccacaaggcctgtgtgtctcagctgaatgggatggtcttctgtccccactgtggggaggatgcttctgaagctcaagaggtgaccatcccccggggtgacggggtgaccccaccggccggcactgcagctcctgcacccccacccctgtcccaggatgtccccgggagagcagacacttctcagcccagtgcccggatgcgagggcatggggaaccccggcgcccgccctgcgatcccctggctgacaccattgacagctcagggccctccctgaccctgcccaatgggggctgcctttcagccgtggggctgccactggggccaggccgggaggccctggaaaaggccctggtcatccaggagtcagagaggcggaagaagctccgtttccaccctcggcagttgtacctgtccgtgaagcagggcgagctgcagaaggtgatcctgatgctgttggacaacctggaccccaacttccagagcgaccagcagagcaagcgcacgcccctgcatgcagccgcccagaagggctccgtggagatctgccatgtgctgctgcaggctggagccaacataaatgcagtggacaaacagcagcggacgccactgatggaggccgtggtgaacaaccacctggaggtagcccgttacatggtgcagcgtggtggctgtgtctatagcaaggaggaggacggttccacctgcctccaccacgcagccaaaatcgggaacttggagatggtcagcctgctgctgagcacaggacaggtggacgtcaacgcccaggacagtggggggtggacgcccatcatctgggctgcagagcacaagcacatcgaggtgatccgcatgctactgacgcggggcgccgacgtcaccctcactgacaacgaggagaacatctgcctgcactgggcctccttcacgggcagcgccgccatcgccgaagtccttctgaatgcgcgctgtgacctccatgctgtcaactaccatggggacacccccctgcacatcgcagctcgggagagctaccatgactgcgtgctgttattcctgtcacgtggggccaaccctgagctgcggaacaaagagggggacacagcatgggacctgactcccgagcgctccgacgtgtggtttgcgcttcaactcaaccgcaagctccgacttggggtgggaaatcgggccatccgcacagagaagatcatctgccgggacgtggctcggggctatgagaacgtgcccattccctgtgtcaacggtgtggatggggagccctgccctgaggattacaagtacatctcagagaactgcgagacgtccaccatgaacatcgatcgcaacatcacccacctgcagcactgcacgtgtgtggacgactgctctagctccaactgcctgtgcggccagctcagcatccggtgctggtatgacaaggatgggcgattgctccaggaatttaacaagattgagcctccgctgattttcgagtgtaaccaggcgtgctcatgctggagaaactgcaagaaccgggtcgtacagagtggcatcaaggtgcggctacagctctaccgaacagccaagatgggctggggggtccgcgccctgcagaccatcccacaggggaccttcatctgcgagtatgtcggggagctgatctctgatgctgaggctgatgtgagagaggatgattcttacctcttcgacttagacaacaaggatggagaggtgtactgcatagatgcccgttactatggcaacatcagccgcttcatcaaccacctgtgtgaccccaacatcattcccgtccgggtcttcatgctgcaccaagacctgcgatttccacgcatcgccttcttcagttcccgagacatccggactggggaggagctagggtttgactatggcgaccgcttctgggacatcaaaagcaaatatttcacctgccaatgtggctctgagaagtgcaagcactcagccgaagccattgccctggagcagagccgtctggcccgcctggacccacaccctgagctgctgcccgagctcggctccctgccccctgtcaacacatgagaacggaccacaccctctctccccagcatggatggccacagctcagccgcctcctctgccaccagctgctcgcagcccatgcctgggggtgctgccatcttctctccccaccaccctttcacacattcctgaccagagatcccagccaggccctggaggtctgacagcccctccctcccagagctggttcctccctgggagggcaacttcagggctggccaccccccgtgttccccatcctcagttgaagtttgatgaattgaagtcgggcctctatgccaactggttccttttgttctcaataaatgttgggtttggtaataaa

SEQ ID NO: 130885 - DNA, 3856 bp, Homo sapiens
  Payload ID: 5576
  Gene Symbol: EHMT2
  Gene Name: euchromatic histone-lysine N-methyltransferase 2
  Uniprot ID: Q96KQ7
  ENST ID: ENST00000383372
  CDS Start-End: 1-3531
atggcggcggcggcgggagctgcagcggcggcggccgccgagggggaggcccccgctgagatgggggcgctgctgctggagaaggaaaccagaggagccaccgagagagttcatggctctttgggggacacccctcgtagtgaagaaaccctgcccaaggccacccccgactccctggagcctgctggcccctcatctccagcctctgtcactgtcactgttggtgatgagggggctgacacccctgtaggggctacaccactcattggggatgaatctgagaatcttgagggagatggggacctccgtgggggccggatcctgctgggccatgccacaaagtcattcccctcttcccccagcaaggggggttcctgtcctagccgggccaagatgtcaatgacaggggcgggaaaatcacctccatctgtccagagtttggctatgaggctactgagtatgccaggagcccagggagctgcagcagcagggtctgaaccccctccagccaccacgagcccagagggacagcccaaggtccaccgagcccgcaaaaccatgtccaaaccaggaaatggacagcccccggtccctgagaagcggccccctgaaatacagcatttccgcatgagtgatgatgtccactcactgggaaaggtgacctcagatctggccaaaaggaggaagctgaactcaggaggtggcctgtcggaggagttaggttctgcccggcgttcaggagaagtgaccctgacgaaaggggaccccgggtccctggaggagtgggagacggtggtgggtgatgacttcagtctctactatgattcctactctgtggatgagcgcgtggactccgacagcaagtctgaagttgaagctctaactgaacaactaagtgaagaggaggaggaggaagaggaggaagaagaagaagaggaagaggaggaggaagaggaagaagaagaggaagatgaggagtcagggaatcagtcagataggagtggttccagtggccggcgcaaggccaagaagaaatggcgaaaagacagcccatgggtgaagccgtctcggaaacggcgcaagcgggagcctccgcgggccaaggagccacgaggggtgtccaatgacacatcttcgctggagacagagcgagggtttgaggagttgcccctgtgcagctgccgcatggaggcacccaagattgaccgcatcagcgagagggcggggcacaagtgcatggccactgagagtgtggacggagagctgtcaggctgcaatgccgccatcctcaagcgggagaccatgaggccatccagccgtgtggccctgatggtgctctgtgagacccaccgcgcccgcatggtcaaacaccactgctgcccgggctgcggctacttctgcacggcgggcaccttcctggagtgccaccctgacttccgtgtggcccaccgcttccacaaggcctgtgtgtctcagctgaatgggatggtcttctgtccccactgtggggaggatgcttctgaagctcaagaggtgaccatcccccggggtgacggggtgaccccaccggccggcactgcagctcctgcacccccacccctgtcccaggatgtccccgggagagcagacacttctcagcccagtgcccggatgcgagggcatggggaaccccggcgcccgccctgcgatcccctggctgacaccattgacagctcagggccctccctgaccctgcccaatgggggctgcctttcagccgtggggctgccactggggccaggccgggaggccctggaaaaggccctggtcatccaggagtcagagaggcggaagaagctccgtttccaccctcggcagttgtacctgtccgtgaagcagggcgagctgcagaaggtgatcctgatgctgttggacaacctggaccccaacttccagagcgaccagcagagcaagcgcacgcccctgcatgcagccgcccagaagggctccgtggagatctgccatgtgctgctgcaggctggagccaacataaatgcagtggacaaacagcagcggacgccactgatggaggccgtggtgaacaaccacctggaggtagcccgttacatggtgcagcgtggtggctgtgtctatagcaaggaggaggacggttccacctgcctccaccacgcagccaaaatcgggaacttggagatggtcagcctgctgctgagcacaggacaggtggacgtcaacgcccaggacagtggggggtggacgcccatcatctgggctgcagagcacaagcacatcgaggtgatccgcatgctactgacgcggggcgccgacgtcaccctcactgacaacgaggagaacatctgcctgcactgggcctccttcacgggcagcgccgccatcgccgaagtccttctgaatgcgcgctgtgacctccatgctgtcaactaccatggggacacccccctgcacatcgcagctcgggagagctaccatgactgcgtgctgttattcctgtcacgtggggccaaccctgagctgcggaacaaagagggggacacagcatgggacctgactcccgagcgctccgacgtgtggtttgcgcttcaactcaaccgcaagctccgacttggggtgggaaatcgggccatccgcacagagaagatcatctgccgggacgtggctcggggctatgagaacgtgcccattccctgtgtcaacggtgtggatggggagccctgccctgaggattacaagtacatctcagagaactgcgagacgtccaccatgaacatcgatcgcaacatcacccacctgcagcactgcacgtgtgtggacgactgctctagctccaactgcctgtgcggccagctcagcatccggtgctggtatgacaaggatgggcgattgctccaggaatttaacaagattgagcctccgctgattttcgagtgtaaccaggcgtgctcatgctggagaaactgcaagaaccgggtcgtacagagtggcatcaaggtgcggctacagctctaccgaacagccaagatgggctggggggtccgcgccctgcagaccatcccacaggggaccttcatctgcgagtatgtcggggagctgatctctgatgctgaggctgatgtgagagaggatgattcttacctcttcgacttagacaacaaggatggagaggtgtactgcatagatgcccgttactatggcaacatcagccgcttcatcaaccacctgtgtgaccccaacatcattcccgtccgggtcttcatgctgcaccaagacctgcgatttccacgcatcgccttcttcagttcccgagacatccggactggggaggagctagggtttgactatggcgaccgcttctgggacatcaaaagcaaatatttcacctgccaatgtggctctgagaagtgcaagcactcagccgaagccattgccctggagcagagccgtctggcccgcctggacccacaccctgagctgctgcccgagctcggctccctgccccctgtcaacacatgagaacggaccacaccctctctccccagcatggatggccacagctcagccgcctcctctgccaccagctgctcgcagcccatgcctgggggtgctgccatcttctctccccaccaccctttcacacattcctgaccagagatcccagccaggccctggaggtctgacagcccctccctcccagagctggttcctccctgggagggcaacttcagggctggccaccccccgtgttccccatcctcagttgaagtttgatgaattgaagtcgggcctctatgccaactggttccttttgttctcaataaatgttgggtttggtaataaa

SEQ ID NO: 130886 - DNA, 3980 bp, Homo sapiens
  Payload ID: 5576
  Gene Symbol: EHMT2
  Gene Name: euchromatic histone-lysine N-methyltransferase 2
  Uniprot ID: Q96KQ7
  ENST ID: ENST00000383373
  CDS Start-End: 23-3655
tcggcccccagcgcaagcggcgatggcggcggcggcgggagctgcagcggcggcggccgccgagggggaggcccccgctgagatgggggcgctgctgctggagaaggaaaccagaggagccaccgagagagttcatggctctttgggggacacccctcgtagtgaagaaaccctgcccaaggccacccccgactccctggagcctgctggcccctcatctccagcctctgtcactgtcactgttggtgatgagggggctgacacccctgtaggggctacaccactcattggggatgaatctgagaatcttgagggagatggggacctccgtgggggccggatcctgctgggccatgccacaaagtcattcccctcttcccccagcaaggggggttcctgtcctagccgggccaagatgtcaatgacaggggcgggaaaatcacctccatctgtccagagtttggctatgaggctactgagtatgccaggagcccagggagctgcagcagcagggtctgaaccccctccagccaccacgagcccagagggacagcccaaggtccaccgagcccgcaaaaccatgtccaaaccaggaaatggacagcccccggtccctgagaagcggccccctgaaatacagcatttccgcatgagtgatgatgtccactcactgggaaaggtgacctcagatctggccaaaaggaggaagctgaactcaggaggtggcctgtcggaggagttaggttctgcccggcgttcaggagaagtgaccctgacgaaaggggaccccgggtccctggaggagtgggagacggtggtgggtgatgacttcagtctctactatgattcctactctgtggatgagcgcgtggactccgacagcaagtctgaagttgaagctctaactgaacaactaagtgaagaggaggaggaggaagaggaggaagaagaagaagaggaagaggaggaggaagaggaagaagaagaggaagatgaggagtcagggaatcagtcagataggagtggttccagtggccggcgcaaggccaagaagaaatggcgaaaagacagcccatgggtgaagccgtctcggaaacggcgcaagcgggagcctccgcgggccaaggagccacgaggagtgaatggtgtgggctcctcaggccccagtgagtacatggaggtccctctggggtccctggagctgcccagcgaggggaccctctcccccaaccacgctggggtgtccaatgacacatcttcgctggagacagagcgagggtttgaggagttgcccctgtgcagctgccgcatggaggcacccaagattgaccgcatcagcgagagggcggggcacaagtgcatggccactgagagtgtggacggagagctgtcaggctgcaatgccgccatcctcaagcgggagaccatgaggccatccagccgtgtggccctgatggtgctctgtgagacccaccgcgcccgcatggtcaaacaccactgctgcccgggctgcggctacttctgcacggcgggcaccttcctggagtgccaccctgacttccgtgtggcccaccgcttccacaaggcctgtgtgtctcagctgaatgggatggtcttctgtccccactgtggggaggatgcttctgaagctcaagaggtgaccatcccccggggtgacggggtgaccccaccggccggcactgcagctcctgcacccccacccctgtcccaggatgtccccgggagagcagacacttctcagcccagtgcccggatgcgagggcatggggaaccccggcgcccgccctgcgatcccctggctgacaccattgacagctcagggccctccctgaccctgcccaatgggggctgcctttcagccgtggggctgccactggggccaggccgggaggccctggaaaaggccctggtcatccaggagtcagagaggcggaagaagctccgtttccaccctcggcagttgtacctgtccgtgaagcagggcgagctgcagaaggtgatcctgatgctgttggacaacctggaccccaacttccagagcgaccagcagagcaagcgcacgcccctgcatgcagccgcccagaagggctccgtggagatctgccatgtgctgctgcaggctggagccaacataaatgcagtggacaaacagcagcggacgccactgatggaggccgtggtgaacaaccacctggaggtagcccgttacatggtgcagcgtggtggctgtgtctatagcaaggaggaggacggttccacctgcctccaccacgcagccaaaatcgggaacttggagatggtcagcctgctgctgagcacaggacaggtggacgtcaacgcccaggacagtggggggtggacgcccatcatctgggctgcagagcacaagcacatcgaggtgatccgcatgctactgacgcggggcgccgacgtcaccctcactgacaacgaggagaacatctgcctgcactgggcctccttcacgggcagcgccgccatcgccgaagtccttctgaatgcgcgctgtgacctccatgctgtcaactaccatggggacacccccctgcacatcgcagctcgggagagctaccatgactgcgtgctgttattcctgtcacgtggggccaaccctgagctgcggaacaaagagggggacacagcatgggacctgactcccgagcgctccgacgtgtggtttgcgcttcaactcaaccgcaagctccgacttggggtgggaaatcgggccatccgcacagagaagatcatctgccgggacgtggctcggggctatgagaacgtgcccattccctgtgtcaacggtgtggatggggagccctgccctgaggattacaagtacatctcagagaactgcgagacgtccaccatgaacatcgatcgcaacatcacccacctgcagcactgcacgtgtgtggacgactgctctagctccaactgcctgtgcggccagctcagcatccggtgctggtatgacaaggatgggcgattgctccaggaatttaacaagattgagcctccgctgattttcgagtgtaaccaggcgtgctcatgctggagaaactgcaagaaccgggtcgtacagagtggcatcaaggtgcggctacagctctaccgaacagccaagatgggctggggggtccgcgccctgcagaccatcccacaggggaccttcatctgcgagtatgtcggggagctgatctctgatgctgaggctgatgtgagagaggatgattcttacctcttcgacttagacaacaaggatggagaggtgtactgcatagatgcccgttactatggcaacatcagccgcttcatcaaccacctgtgtgaccccaacatcattcccgtccgggtcttcatgctgcaccaagacctgcgatttccacgcatcgccttcttcagttcccgagacatccggactggggaggagctagggtttgactatggcgaccgcttctgggacatcaaaagcaaatatttcacctgccaatgtggctctgagaagtgcaagcactcagccgaagccattgccctggagcagagccgtctggcccgcctggacccacaccctgagctgctgcccgagctcggctccctgccccctgtcaacacatgagaacggaccacaccctctctccccagcatggatggccacagctcagccgcctcctctgccaccagctgctcgcagcccatgcctgggggtgctgccatcttctctccccaccaccctttcacacattcctgaccagagatcccagccaggccctggaggtctgacagcccctccctcccagagctggttcctccctgggagggcaacttcagggctggccaccccccgtgttccccatcctcagttgaagtttgatgaattgaagtcgggcctctatgccaactggttccttttgttctcaataaatgttgggtttggtaataaa

SEQ ID NO: 130887 - DNA, 4129 bp, Homo sapiens
  Payload ID: 5576
  Gene Symbol: EHMT2
  Gene Name: euchromatic histone-lysine N-methyltransferase 2
  ENST ID: ENST00000395728
  CDS Start-End: 1-3804
atgcggggtctaccgagagggagggggttgatgcgggcccgggggaggggtcgtgcggcccctccgggcagccgaggccgcggaaggggggggccccacagaggaagaggtaggccccggagcctactctctcttcccagggcccaggcatcctggaccccccaactctctactgggctgaccagccctcctgtcccttgtctcccctcccagggggaggcccccgctgagatgggggcgctgctgctggagaaggaaaccagaggagccaccgagagagttcatggctctttgggggacacccctcgtagtgaagaaaccctgcccaaggccacccccgactccctggagcctgctggcccctcatctccagcctctgtcactgtcactgttggtgatgagggggctgacacccctgtaggggctacaccactcattggggatgaatctgagaatcttgagggagatggggacctccgtgggggccggatcctgctgggccatgccacaaagtcattcccctcttcccccagcaaggggggttcctgtcctagccgggccaagatgtcaatgacaggggcgggaaaatcacctccatctgtccagagtttggctatgaggctactgagtatgccaggagcccagggagctgcagcagcagggtctgaaccccctccagccaccacgagcccagagggacagcccaaggtccaccgagcccgcaaaaccatgtccaaaccaggaaatggacagcccccggtccctgagaagcggccccctgaaatacagcatttccgcatgagtgatgatgtccactcactgggaaaggtgacctcagatctggccaaaaggaggaagctgaactcaggaggtggcctgtcagaggagttaggttctgcccggcgttcaggagaagtgaccctgacgaaaggggaccccgggtccctggaggagtgggagacggtggtgggtgatgacttcagtctctactatgattcctactctgtggatgagcgcgtggactccgacagcaagtctgaagttgaagctctaactgaacaactaagtgaagaggaggaggaggaagaggaggaagaagaagaagaggaagaggaggaggaagaggaagaagaagaggaagatgaggagtcagggaatcagtcagataggagtggttccagtggccggcgcaaggccaagaagaaatggcgaaaagacagcccatgggtgaagccgtctcggaaacggcgcaagcgggagcctccgcgggccaaggagccacgaggagtgaatggtgtgggctcctcaggccccagtgagtacatggaggtccctctggggtccctggagctgcccagcgaggggaccctctcccccaaccacgctggggtgtccaatgacacatcttcgctggagacagagcgagggtttgaggagttgcccctgtgcagctgccgcatggaggcacccaagattgaccgcatcagcgagagggcggggcacaagtgcatggccactgagagtgtggacggagagctgtcaggctgcaatgccgccatcctcaagcgggagaccatgaggccatccagccgtgtggccctgatggtgctctgtgagacccaccgcgcccgcatggtcaaacaccactgctgcccgggctgcggctacttctgcacggcgggcaccttcctggagtgccaccctgacttccgtgtggcccaccgcttccacaaggcctgtgtgtctcagctgaatgggatggtcttctgtccccactgtggggaggatgcttctgaagctcaagaggtgaccatcccccggggtgacggggtgaccccaccggccggcactgcagctcctgcacccccacccctgtcccaggatgtccccgggagagcagacacttctcagcccagtgcccggatgcgagggcatggggaaccccggcgcccgccctgcgatcccctggctgacaccattgacagctcagggccctccctgaccctgcccaatgggggctgcctttcagccgtggggctgccactggggccaggccgggaggccctggaaaaggccctggtcatccaggagtcagagaggcggaagaagctccgtttccaccctcggcagttgtacctgtccgtgaagcagggcgagctgcagaaggtgatcctgatgctgttggacaacctggaccccaacttccagagcgaccagcagagcaagcgcacgcccctgcatgcagccgcccagaagggctccgtggagatctgccatgtgctgctgcaggctggagccaacataaatgcagtggacaaacagcagcggacgccactgatggaggccgtggtgaacaaccacctggaggtagcccgttacatggtgcagcgtggtggctgtgtctatagcaaggaggaggacggttccacctgcctccaccacgcagccaaaatcgggaacttggagatggtcagcctgctgctgagcacaggacaggtggacgtcaacgcccaggacagtggggggtggacgcccatcatctgggctgcagagcacaagcacatcgaggtgatccgcatgctactgacgcggggcgccgacgtcaccctcactgacaacgaggagaacatctgcctgcactgggcctccttcacgggcagcgccgccatcgccgaagtccttctgaatgcgcgctgtgacctccatgctgtcaactaccatggggacacccccctgcacatcgcagctcgggagagctaccatgactgcgtgctgttattcctgtcacgtggggccaaccctgagctgcggaacaaagagggggacacagcatgggacctgactcccgagcgctccgacgtgtggtttgcgcttcaactcaaccgcaagctccgacttggggtgggaaatcgggccatccgcacagagaagatcatctgccgggacgtggctcggggctatgagaacgtgcccattccctgtgtcaacggtgtggatggggagccctgccctgaggattacaagtacatctcagagaactgcgagacgtccaccatgaacatcgatcgcaacatcacccacctgcagcactgcacgtgtgtggacgactgctctagctccaactgcctgtgcggccagctcagcatccggtgctggtatgacaaggatgggcgattgctccaggaatttaacaagattgagcctccgctgattttcgagtgtaaccaggcgtgctcatgctggagaaactgcaagaaccgggtcgtacagagtggcatcaaggtgcggctacagctctaccgaacagccaagatgggctggggggtccgcgccctgcagaccatcccacaggggaccttcatctgcgagtatgtcggggagctgatctctgatgctgaggctgatgtgagagaggatgattcttacctcttcgacttagacaacaaggatggagaggtgtactgcatagatgcccgttactatggcaacatcagccgcttcatcaaccacctgtgtgaccccaacatcattcccgtccgggtcttcatgctgcaccaagacctgcgatttccacgcatcgccttcttcagttcccgagacatccggactggggaggagctagggtttgactatggcgaccgcttctgggacatcaaaagcaaatatttcacctgccaatgtggctctgagaagtgcaagcactcagccgaagccattgccctggagcagagccgtctggcccgcctggacccacaccctgagctgctgcccgagctcggctccctgccccctgtcaacacatgagaacggaccacaccctctctccccagcatggatggccacagctcagccgcctcctctgccaccagctgctcgcagcccatgcctgggggtgctgccatcttctctccccaccaccctttcacacattcctgaccagagatcccagccaggccctggaggtctgacagcccctccctcccagagctggttcctccctgggagggcaacttcagggctggccaccccccgtgttccccatcctcagttgaagtttgatgaattgaagtcgggcctctatgccaactggttccttttgttctcaataaatgttgggtttggtaataaa

SEQ ID NO: 130888 - DNA, 4129 bp, Homo sapiens
  Payload ID: 5576
  Gene Symbol: EHMT2
  Gene Name: euchromatic histone-lysine N-methyltransferase 2
  ENST ID: ENST00000400006
  CDS Start-End: 1-3804
atgcggggtctaccgagagggagggggttgatgcgggcccgggggaggggtcgtgcggcccctccgggcagccgaggccgcggaaggggggggccccacagaggaagaggtaggccccggagcctactctctcttcccagggcccaggcatcctggaccccccaactctctactgggctgaccagccctcctgtcccttgtctcccctcccagggggaggcccccgctgagatgggggcgctgctgctggagaaggaaaccagaggagccaccgagagagttcatggctctttgggggacacccctcgtagtgaagaaaccctgcccaaggccacccccgactccctggagcctgctggcccctcatctccagcctctgtcactgtcactgttggtgatgagggggctgacacccctgtaggggctacaccactcattggggatgaatctgagaatcttgagggagatggggacctccgtgggggccggatcctgctgggccatgccacaaagtcattcccctcttcccccagcaaggggggttcctgtcctagccgggccaagatgtcaatgacaggggcgggaaaatcacctccatctgtccagagtttggctatgaggctactgagtatgccaggagcccagggagctgcagcagcagggtctgaaccccctccagccaccacgagcccagagggacagcccaaggtccaccgagcccgcaaaaccatgtccaaaccaggaaatggacagcccccggtccctgagaagcggccccctgaaatacagcatttccgcatgagtgatgatgtccactcactgggaaaggtgacctcagatctggccaaaaggaggaagctgaactcaggaggtggcctgtcggaggagttaggttctgcccggcgttcaggagaagtgaccctgacgaaaggggaccccgggtccctggaggagtgggagacggtggtgggtgatgacttcagtctctactatgattcctactctgtggatgagcgcgtggactccgacagcaagtctgaagttgaagctctaactgaacaactaagtgaagaggaggaggaggaagaggaggaagaagaagaagaggaagaggaggaggaagaggaagaagaagaggaagatgaggagtcagggaatcagtcagataggagtggttccagtggccggcgcaaggccaagaagaaatggcgaaaagacagcccatgggtgaagccgtctcggaaacggcgcaagcgggagcctccgcgggccaaggagccacgaggagtgaatggtgtgggctcctcaggccccagtgagtacatggaggtccctctggggtccctggagctgcccagcgaggggaccctctcccccaaccacgctggggtgtccaatgacacatcttcgctggagacagagcgagggtttgaggagttgcccctgtgcagctgccgcatggaggcacccaagattgaccgcatcagcgagagggcggggcacaagtgcatggccactgagagtgtggacggagagctgtcaggctgcaatgccgccatcctcaagcgggagaccatgaggccatccagccgtgtggccctgatggtgctctgtgagacccaccgcgcccgcatggtcaaacaccactgctgcccgggctgcggctacttctgcacggcgggcaccttcctggagtgccaccctgacttccgtgtggcccaccgcttccacaaggcctgtgtgtctcagctgaatgggatggtcttctgtccccactgtggggaggatgcttctgaagctcaagaggtgaccatcccccggggtgacggggtgaccccaccggccggcactgcagctcctgcacccccacccctgtcccaggatgtccccgggagagcagacacttctcagcccagtgcccggatgcgagggcatggggaaccccggcgcccgccctgcgatcccctggctgacaccattgacagctcagggccctccctgaccctgcccaatgggggctgcctttcagccgtggggctgccactggggccaggccgggaggccctggaaaaggccctggtcatccaggagtcagagaggcggaagaagctccgtttccaccctcggcagttgtacctgtccgtgaagcagggcgagctgcagaaggtgatcctgatgctgttggacaacctggaccccaacttccagagcgaccagcagagcaagcgcacgcccctgcatgcagccgcccagaagggctccgtggagatctgccatgtgctgctgcaggctggagccaacataaatgcagtggacaaacagcagcggacgccactgatggaggccgtggtgaacaaccacctggaggtagcccgttacatggtgcagcgtggtggctgtgtctatagcaaggaggaggacggttccacctgcctccaccacgcagccaaaatcgggaacttggagatggtcagcctgctgctgagcacaggacaggtggacgtcaacgcccaggacagtggggggtggacgcccatcatctgggctgcagagcacaagcacatcgaggtgatccgcatgctactgacgcggggcgccgacgtcaccctcactgacaacgaggagaacatctgcctgcactgggcctccttcacgggcagcgccgccatcgccgaagtccttctgaatgcgcgctgtgacctccatgctgtcaactaccatggggacacccccctgcacatcgcagctcgggagagctaccatgactgcgtgctgttattcctgtcacgtggggccaaccctgagctgcggaacaaagagggggacacagcatgggacctgactcccgagcgctccgacgtgtggtttgcgcttcaactcaaccgcaagctccgacttggggtgggaaatcgggccatccgcacagagaagatcatctgccgggacgtggctcggggctatgagaacgtgcccattccctgtgtcaacggtgtggatggggagccctgccctgaggattacaagtacatctcagagaactgcgagacgtccaccatgaacatcgatcgcaacatcacccacctgcagcactgcacgtgtgtggacgactgctctagctccaactgcctgtgcggccagctcagcatccggtgctggtatgacaaggatgggcgattgctccaggaatttaacaagattgagcctccgctgattttcgagtgtaaccaggcgtgctcatgctggagaaactgcaagaaccgggtcgtacagagtggcatcaaggtgcggctacagctctaccgaacagccaagatgggctggggggtccgcgccctgcagaccatcccacaggggaccttcatctgcgagtatgtcggggagctgatctctgatgctgaggctgatgtgagagaggatgattcttacctcttcgacttagacaacaaggatggagaggtgtactgcatagatgcccgttactatggcaacatcagccgcttcatcaaccacctgtgtgaccccaacatcattcccgtccgggtcttcatgctgcaccaagacctgcgatttccacgcatcgccttcttcagttcccgagacatccggactggggaggagctagggtttgactatggcgaccgcttctgggacatcaaaagcaaatatttcacctgccaatgtggctctgagaagtgcaagcactcagccgaagccattgccctggagcagagccgtctggcccgcctggacccacaccctgagctgctgcccgagctcggctccctgccccctgtcaacacatgagaacggaccacaccctctctccccagcatggatggccacagctcagccgcctcctctgccaccagctgctcgcagcccatgcctgggggtgctgccatcttctctccccaccaccctttcacacattcctgaccagagatcccagccaggccctggaggtctgacagcccctccctcccagagctggttcctccctgggagggcaacttcagggctggccaccccccgtgttccccatcctcagttgaagtttgatgaattgaagtcgggcctctatgccaactggttccttttgttctcaataaatgttgggtttggtaataaa

SEQ ID NO: 130889 - DNA, 4047 bp, Homo sapiens
  Payload ID: 5576
  Gene Symbol: EHMT2
  Gene Name: euchromatic histone-lysine N-methyltransferase 2
  ENST ID: ENST00000400008
  CDS Start-End: 21-3722
ctcttctctcggccccagagatgcggggtctaccgagagggagggggttgatgcgggcccgggggaggggtcgtgcggcccctccgggcagccgaggccgcggaaggggggggccccacagaggaagaggtaggccccggagcctactctctcttcccagggcccaggcatcctggaccccccaactctctactgggctgaccagccctcctgtcccttgtctcccctcccagggggaggcccccgctgagatgggggcgctgctgctggagaaggaaaccagaggagccaccgagagagttcatggctctttgggggacacccctcgtagtgaagaaaccctgcccaaggccacccccgactccctggagcctgctggcccctcatctccagcctctgtcactgtcactgttggtgatgagggggctgacacccctgtaggggctacaccactcattggggatgaatctgagaatcttgagggagatggggacctccgtgggggccggatcctgctgggccatgccacaaagtcattcccctcttcccccagcaaggggggttcctgtcctagccgggccaagatgtcaatgacaggggcgggaaaatcacctccatctgtccagagtttggctatgaggctactgagtatgccaggagcccagggagctgcagcagcagggtctgaaccccctccagccaccacgagcccagagggacagcccaaggtccaccgagcccgcaaaaccatgtccaaaccaggaaatggacagcccccggtccctgagaagcggccccctgaaatacagcatttccgcatgagtgatgatgtccactcactgggaaaggtgacctcagatctggccaaaaggaggaagctgaactcaggaggtggcctgtcggaggagttaggttctgcccggcgttcaggagaagtgaccctgacgaaaggggaccccgggtccctggaggagtgggagacggtggtgggtgatgacttcagtctctactatgattcctactctgtggatgagcgcgtggactccgacagcaagtctgaagttgaagctctaactgaacaactaagtgaagaggaggaggaggaagaggaggaagaagaagaagaggaagaggaggaggaagaggaagaagaagaggaagatgaggagtcagggaatcagtcagataggagtggttccagtggccggcgcaaggccaagaagaaatggcgaaaagacagcccatgggtgaagccgtctcggaaacggcgcaagcgggagcctccgcgggccaaggagccacgaggggtgtccaatgacacatcttcgctggagacagagcgagggtttgaggagttgcccctgtgcagctgccgcatggaggcacccaagattgaccgcatcagcgagagggcggggcacaagtgcatggccactgagagtgtggacggagagctgtcaggctgcaatgccgccatcctcaagcgggagaccatgaggccatccagccgtgtggccctgatggtgctctgtgagacccaccgcgcccgcatggtcaaacaccactgctgcccgggctgcggctacttctgcacggcgggcaccttcctggagtgccaccctgacttccgtgtggcccaccgcttccacaaggcctgtgtgtctcagctgaatgggatggtcttctgtccccactgtggggaggatgcttctgaagctcaagaggtgaccatcccccggggtgacggggtgaccccaccggccggcactgcagctcctgcacccccacccctgtcccaggatgtccccgggagagcagacacttctcagcccagtgcccggatgcgagggcatggggaaccccggcgcccgccctgcgatcccctggctgacaccattgacagctcagggccctccctgaccctgcccaatgggggctgcctttcagccgtggggctgccactggggccaggccgggaggccctggaaaaggccctggtcatccaggagtcagagaggcggaagaagctccgtttccaccctcggcagttgtacctgtccgtgaagcagggcgagctgcagaaggtgatcctgatgctgttggacaacctggaccccaacttccagagcgaccagcagagcaagcgcacgcccctgcatgcagccgcccagaagggctccgtggagatctgccatgtgctgctgcaggctggagccaacataaatgcagtggacaaacagcagcggacgccactgatggaggccgtggtgaacaaccacctggaggtagcccgttacatggtgcagcgtggtggctgtgtctatagcaaggaggaggacggttccacctgcctccaccacgcagccaaaatcgggaacttggagatggtcagcctgctgctgagcacaggacaggtggacgtcaacgcccaggacagtggggggtggacgcccatcatctgggctgcagagcacaagcacatcgaggtgatccgcatgctactgacgcggggcgccgacgtcaccctcactgacaacgaggagaacatctgcctgcactgggcctccttcacgggcagcgccgccatcgccgaagtccttctgaatgcgcgctgtgacctccatgctgtcaactaccatggggacacccccctgcacatcgcagctcgggagagctaccatgactgcgtgctgttattcctgtcacgtggggccaaccctgagctgcggaacaaagagggggacacagcatgggacctgactcccgagcgctccgacgtgtggtttgcgcttcaactcaaccgcaagctccgacttggggtgggaaatcgggccatccgcacagagaagatcatctgccgggacgtggctcggggctatgagaacgtgcccattccctgtgtcaacggtgtggatggggagccctgccctgaggattacaagtacatctcagagaactgcgagacgtccaccatgaacatcgatcgcaacatcacccacctgcagcactgcacgtgtgtggacgactgctctagctccaactgcctgtgcggccagctcagcatccggtgctggtatgacaaggatgggcgattgctccaggaatttaacaagattgagcctccgctgattttcgagtgtaaccaggcgtgctcatgctggagaaactgcaagaaccgggtcgtacagagtggcatcaaggtgcggctacagctctaccgaacagccaagatgggctggggggtccgcgccctgcagaccatcccacaggggaccttcatctgcgagtatgtcggggagctgatctctgatgctgaggctgatgtgagagaggatgattcttacctcttcgacttagacaacaaggatggagaggtgtactgcatagatgcccgttactatggcaacatcagccgcttcatcaaccacctgtgtgaccccaacatcattcccgtccgggtcttcatgctgcaccaagacctgcgatttccacgcatcgccttcttcagttcccgagacatccggactggggaggagctagggtttgactatggcgaccgcttctgggacatcaaaagcaaatatttcacctgccaatgtggctctgagaagtgcaagcactcagccgaagccattgccctggagcagagccgtctggcccgcctggacccacaccctgagctgctgcccgagctcggctccctgccccctgtcaacacatgagaacggaccacaccctctctccccagcatggatggccacagctcagccgcctcctctgccaccagctgctcgcagcccatgcctgggggtgctgccatcttctctccccaccaccctttcacacattcctgaccagagatcccagccaggccctggaggtctgacagcccctccctcccagagctggttcctccctgggagggcaacttcagggctggccaccccccgtgttccccatcctcagttgaagtttgatgaattgaagtcgggcctctatgccaactggttccttttgttctcaataaatgttgggtttggtaataaa

SEQ ID NO: 130890 - DNA, 4047 bp, Homo sapiens
  Payload ID: 5576
  Gene Symbol: EHMT2
  Gene Name: euchromatic histone-lysine N-methyltransferase 2
  ENST ID: ENST00000427405
  CDS Start-End: 21-3722
ctcttctctcggccccagagatgcggggtctaccgagagggagggggttgatgcgggcccgggggaggggtcgtgcggcccctccgggcagccgaggccgcggaaggggggggccccacagaggaagaggtaggccccggagcctactctctcttcccagggcccaggcatcctggaccccccaactctctactgggctgaccagccctcctgtcccttgtctcccctcccagggggaggcccccgctgagatgggggcgctgctgctggagaaggaaaccagaggagccaccgagagagttcatggctctttgggggacacccctcgtagtgaagaaaccctgcccaaggccaaccccgactccctggagcctgctggcccctcatctccagcctctgtcactgtcactgttggtgatgagggggctgacacccctgtaggggctacaccactcattggggatgaatctgagaatcttgagggagatggggacctccgtgggggccggatcctgctgggccatgccacaaagtcattcccctcttcccccagcaaggggggttcctgtcctagccgggccaagatgtcaatgacaggggcgggaaaatcacctccatctgtccagagtttggctatgaggctactgagtatgccaggagcccagggagctgcagcagcagggtctgaaccccctccagccaccacgagcccagagggacagcccaaggtccaccgagcccgcaaaaccatgtccaaaccaggaaatggacagcccccggtccctgagaagcggccccctgaaatacagcatttccgcatgagtgatgatgtccactcactgggaaaggtgacctcagatctggccaaaaggaggaagctgaactcaggaggtggcctgtcggaggagttaggttctgcccggcgttcaggagaagtgaccctgacgaaaggggaccccgggtccctggaggagtgggagacggtggtgggtgatgacttcagtctctactatgattcctactctgtggatgagcgcgtggactccgacagcaagtctgaagttgaagctctaactgaacaactaagtgaagaggaggaggaggaagaggaggaagaagaagaagaggaagaggaggaggaagaggaagaagaagaggaagatgaggagtcagggaatcagtcagataggagtggttccagtggccggcgcaaggccaagaagaaatggcgaaaagacagcccatgggtgaagccgtctcggaaacggcgcaagcgggagcctccgcgggccaaggagccacgaggggtgtccaatgacacatcttcgctggagacagagcgagggtttgaggagttgcccctgtgcagctgccgcatggaggcacccaagattgaccgcatcagcgagagggcggggcacaagtgcatggccactgagagtgtggacggagagctgtcaggctgcaatgccgccatcctcaagcgggagaccatgaggccatccagccgtgtggccctgatggtgctctgtgagacccaccgcgcccgcatggtcaaacaccactgctgcccgggctgcggctacttctgcacggcgggcaccttcctggagtgccaccctgacttccgtgtggcccaccgcttccacaaggcctgtgtgtctcagctgaatgggatggtcttctgtccccactgtggggaggatgcttctgaagctcaagaggtgaccatcccccggggtgacggggtgaccccaccggccggcactgcagctcctgcacccccacccctgtcccaggatgtccccgggagagcagacacttctcagcccagtgcccggatgcgagggcatggggaaccccggcgcccgccctgcgatcccctggctgacaccattgacagctcagggccctccctgaccctgcccaatgggggctgcctttcagccgtggggctgccactggggccaggccgggaggccctggaaaaggccctggtcatccaggagtcagagaggcggaagaagctccgtttccaccctcggcagttgtacctgtccgtgaagcagggcgagctgcagaaggtgatcctgatgctgttggacaacctggaccccaacttccagagcgaccagcagagcaagcgcacgcccctgcatgcagccgcccagaagggctccgtggagatctgccatgtgctgctgcaggctggagccaacataaatgcagtggacaaacagcagcggacgccactgatggaggccgtggtgaacaaccacctggaggtagcccgttacatggtgcagcgtggtggctgtgtctatagcaaggaggaggacggttccacctgcctccaccacgcagccaaaatcgggaacttggagatggtcagcctgctgctgagcacaggacaggtggacgtcaacgcccaggacagtggggggtggacgcccatcatctgggctgcagagcacaagcacatcgaggtgatccgcatgctactgacgcggggcgccgacgtcaccctcactgacaacgaggagaacatctgcctgcactgggcctccttcacgggcagcgccgccatcgccgaagtccttctgaatgcgcgctgtgacctccatgctgtcaactaccatggggacacccccctgcacatcgcagctcgggagagctaccatgactgcgtgctgttattcctgtcacgtggggccaaccctgagctgcggaacaaagagggggacacagcatgggacctgactcccgagcgctccgacgtgtggtttgcgcttcaactcaaccgcaagctccgacttggggtgggaaatcgggccatccgcacagagaagatcatctgccgggacgtggctcggggctatgagaacgtgcccattccctgtgtcaacggtgtggatggggagccctgccctgaggattacaagtacatctcagagaactgcgagacgtccaccatgaacatcgatcgcaacatcacccacctgcagcactgcacgtgtgtggacgactgctctagctccaactgcctgtgcggccagctcagcatccggtgctggtatgacaaggatgggcgattgctccaggaatttaacaagattgagcctccgctgattttcgagtgtaaccaggcgtgctcatgctggagaaactgcaagaaccgggtcgtacagagtggcatcaaggtgcggctacagctctaccgaacagccaagatgggctggggggtccgcgccctgcagaccatcccacaggggaccttcatctgcgagtatgtcggggagctgatctctgatgctgaggctgatgtgagagaggatgattcttacctcttcgacttagacaacaaggatggagaggtgtactgcatagatgcccgttactatggcaacatcagccgcttcatcaaccacctgtgtgaccccaacatcattcccgtccgggtcttcatgctgcaccaagacctgcgatttccacgcatcgccttcttcagttcccgagacatccggactggggaggagctagggtttgactatggcgaccgcttctgggacatcaaaagcaaatatttcacctgccaatgtggctctgagaagtgcaagcactcagccgaagccattgccctggagcagagccgtctggcccgcctggacccacaccctgagctgctgcccgagctcggctccctgccccctgtcaacacatgagaacggaccacaccctctctccccagcatggatggccacagctcagccgcctcctctgccaccagctgctcgcagcccatgcctgggggtgctgccatcttctctccccaccaccctttcacacattcctgaccagagatcccagccaggccctggaggtctgacagcccctccctcccagagctggttcctccctgggagggcaacttcagggctggccaccccccgtgttccccatcctcagttgaagtttgatgaattgaagtcgggcctctatgccaactggttccttttgttctcaataaatgttgggtttggtaataaa

SEQ ID NO: 130891 - DNA, 3965 bp, Homo sapiens; identical to SEQ ID NO: 130884
  Payload ID: 5576
  Gene Symbol: EHMT2
  Gene Name: euchromatic histone-lysine N-methyltransferase 2
  Uniprot ID: Q96KQ7
  ENST ID: ENST00000450075
  CDS Start-End: 8-3640

SEQ ID NO: 130892 - DNA, 894 bp, Homo sapiens
  Payload ID: 5576
  Gene Symbol: EHMT2
  Gene Name: euchromatic histone-lysine N-methyltransferase 2
  ENST ID: ENST00000447162
  CDS Start-End: 1-894
gagcaagcgcacgcccctgcatgcagccgcccagaagggctccgtggagatctgccatgtgctgctgcaggctggagccaacataaatgcagtggacaaacagcagcggacgccactgatggaggccgtggtgaacaaccacctggaggtagcccgttacatggtgcagcgtggtggctgtgtctatagcaaggaggaggacggttccacctgcctccaccacgcagccaaaatcgggaacttggagatggtcagcctgctgctgagcacaggacaggtggacgtcaacgcccagggccagctgcccccaccctcactcccttcccacccacaggacagtggggggtggacgcccatcatctgggctgcagagcacaagcacatcgaggtgatccgcatgctactgacgcggggcgccgacgtcaccctcactgacaacgaggagaacatctgcctgcactgggcctccttcacgggcagcgccgccatcgccgaagtccttctgaatgcgcgctgtgacctccatgctgtcaactaccatggggacacccccctgcacatcgcagctcgggagagctaccatgactgcgtgctgttattcctgtcacgtggggccaaccctgagctgcggaacaaagagggggacacagcatgggacctgactcccgagcgctccgacgtgtggtttgcgcttcaactcaaccgcaagctccgacttggggtgggaaatcgggccatccgcacagagaagatcatctgccgggacgtggctcggggctatgagaacgtgcccattccctgtgtcaacggtgtggatggggagccctgccctgaggattacaagtacatctcagagaactgcgagacgtccaccatgaacatcgatcgcaacat

SEQ ID NO: 130893 - DNA, 894 bp, Homo sapiens; identical to SEQ ID NO: 130892
  Payload ID: 5576
  Gene Symbol: EHMT2
  Gene Name: euchromatic histone-lysine N-methyltransferase 2
  ENST ID: ENST00000419454
  CDS Start-End: 1-894

SEQ ID NO: 130894 - DNA, 3965 bp, Homo sapiens
  Payload ID: 5576
  Gene Symbol: EHMT2
  Gene Name: euchromatic histone-lysine N-methyltransferase 2
  Uniprot ID: Q96KQ7
  ENST ID: ENST00000420336
  CDS Start-End: 8-3640
agcggcgatggcggcggcggcgggagctgcagcggcggcggccgccgagggggaggcccccgctgagatgggggcgctgctgctggagaaggaaaccagaggagccaccgagagagttcatggctctttgggggacacccctcgtagtgaagaaaccctgcccaaggccaaccccgactccctggagcctgctggcccctcatctccagcctctgtcactgtcactgttggtgatgagggggctgacacccctgtaggggctacaccactcattggggatgaatctgagaatcttgagggagatggggacctccgtgggggccggatcctgctgggccatgccacaaagtcattcccctcttcccccagcaaggggggttcctgtcctagccgggccaagatgtcaatgacaggggcgggaaaatcacctccatctgtccagagtttggctatgaggctactgagtatgccaggagcccagggagctgcagcagcagggtctgaaccccctccagccaccacgagcccagagggacagcccaaggtccaccgagcccgcaaaaccatgtccaaaccaggaaatggacagcccccggtccctgagaagcggccccctgaaatacagcatttccgcatgagtgatgatgtccactcactgggaaaggtgacctcagatctggccaaaaggaggaagctgaactcaggaggtggcctgtcggaggagttaggttctgcccggcgttcaggagaagtgaccctgacgaaaggggaccccgggtccctggaggagtgggagacggtggtgggtgatgacttcagtctctactatgattcctactctgtggatgagcgcgtggactccgacagcaagtctgaagttgaagctctaactgaacaactaagtgaagaggaggaggaggaagaggaggaagaagaagaagaggaagaggaggaggaagaggaagaagaagaggaagatgaggagtcagggaatcagtcagataggagtggttccagtggccggcgcaaggccaagaagaaatggcgaaaagacagcccatgggtgaagccgtctcggaaacggcgcaagcgggagcctccgcgggccaaggagccacgaggagtgaatggtgtgggctcctcaggccccagtgagtacatggaggtccctctggggtccctggagctgcccagcgaggggaccctctcccccaaccacgctggggtgtccaatgacacatcttcgctggagacagagcgagggtttgaggagttgcccctgtgcagctgccgcatggaggcacccaagattgaccgcatcagcgagagggcggggcacaagtgcatggccactgagagtgtggacggagagctgtcaggctgcaatgccgccatcctcaagcgggagaccatgaggccatccagccgtgtggccctgatggtgctctgtgagacccaccgcgcccgcatggtcaaacaccactgctgcccgggctgcggctacttctgcacggcgggcaccttcctggagtgccaccctgacttccgtgtggcccaccgcttccacaaggcctgtgtgtctcagctgaatgggatggtcttctgtccccactgtggggaggatgcttctgaagctcaagaggtgaccatcccccggggtgacggggtgaccccaccggccggcactgcagctcctgcacccccacccctgtcccaggatgtccccgggagagcagacacttctcagcccagtgcccggatgcgagggcatggggaaccccggcgcccgccctgcgatcccctggctgacaccattgacagctcagggccctccctgaccctgcccaatgggggctgcctttcagccgtggggctgccactggggccaggccgggaggccctggaaaaggccctggtcatccaggagtcagagaggcggaagaagctccgtttccaccctcggcagttgtacctgtccgtgaagcagggcgagctgcagaaggtgatcctgatgctgttggacaacctggaccccaacttccagagcgaccagcagagcaagcgcacgcccctgcatgcagccgcccagaagggctccgtggagatctgccatgtgctgctgcaggctggagccaacataaatgcagtggacaaacagcagcggacgccactgatggaggccgtggtgaacaaccacctggaggtagcccgttacatggtgcagcgtggtggctgtgtctatagcaaggaggaggacggttccacctgcctccaccacgcagccaaaatcgggaacttggagatggtcagcctgctgctgagcacaggacaggtggacgtcaacgcccaggacagtggggggtggacgcccatcatctgggctgcagagcacaagcacatcgaggtgatccgcatgctactgacgcggggcgccgacgtcaccctcactgacaacgaggagaacatctgcctgcactgggcctccttcacgggcagcgccgccatcgccgaagtccttctgaatgcgcgctgtgacctccatgctgtcaactaccatggggacacccccctgcacatcgcagctcgggagagctaccatgactgcgtgctgttattcctgtcacgtggggccaaccctgagctgcggaacaaagagggggacacagcatgggacctgactcccgagcgctccgacgtgtggtttgcgcttcaactcaaccgcaagctccgacttggggtgggaaatcgggccatccgcacagagaagatcatctgccgggacgtggctcggggctatgagaacgtgcccattccctgtgtcaacggtgtggatggggagccctgccctgaggattacaagtacatctcagagaactgcgagacgtccaccatgaacatcgatcgcaacatcacccacctgcagcactgcacgtgtgtggacgactgctctagctccaactgcctgtgcggccagctcagcatccggtgctggtatgacaaggatgggcgattgctccaggaatttaacaagattgagcctccgctgattttcgagtgtaaccaggcgtgctcatgctggagaaactgcaagaaccgggtcgtacagagtggcatcaaggtgcggctacagctctaccgaacagccaagatgggctggggggtccgcgccctgcagaccatcccacaggggaccttcatctgcgagtatgtcggggagctgatctctgatgctgaggctgatgtgagagaggatgattcttacctcttcgacttagacaacaaggatggagaggtgtactgcatagatgcccgttactatggcaacatcagccgcttcatcaaccacctgtgtgaccccaacatcattcccgtccgggtcttcatgctgcaccaagacctgcgatttccacgcatcgccttcttcagttcccgagacatccggactggggaggagctagggtttgactatggcgaccgcttctgggacatcaaaagcaaatatttcacctgccaatgtggctctgagaagtgcaagcactcagccgaagccattgccctggagcagagccgtctggcccgcctggacccacaccctgagctgctgcccgagctcggctccctgccccctgtcaacacatgagaacggaccacaccctctctccccagcatggatggccacagctcagccgcctcctctgccaccagctgctcgcagcccatgcctgggggtgctgccatcttctctccccaccaccctttcacacattcctgaccagagatcccagccaggccctggaggtctgacagcccctccctcccagagctggttcctccctgggagggcaacttcagggctggccaccccccgtgttccccatcctcagttgaagtttgatgaattgaagtcgggcctctatgccaactggttccttttgttctcaataaatgttgggtttggtaataaa

SEQ ID NO: 130895 - DNA, 4129 bp, Homo sapiens; identical to SEQ ID NO: 130887
  Payload ID: 5576
  Gene Symbol: EHMT2
  Gene Name: euchromatic histone-lysine N-methyltransferase 2
  ENST ID: ENST00000420930
  CDS Start-End: 1-3804

SEQ ID NO: 130896 - DNA, 4129 bp, Homo sapiens; identical to SEQ ID NO: 130887
  Payload ID: 5576
  Gene Symbol: EHMT2
  Gene Name: euchromatic histone-lysine N-methyltransferase 2
  ENST ID: ENST00000436403
  CDS Start-End: 1-3804

SEQ ID NO: 130897 - DNA, 3094 bp, Homo sapiens
  Payload ID: 5576
  Gene Symbol: EHMT2
  Gene Name: euchromatic histone-lysine N-methyltransferase 2
  ENST ID: ENST00000425250
  CDS Start-End: 1-2769
tctgaagttgaagctctaactgaacaactaagtgaagaggaggaggaggaagaggaggaagaagaagaagaggaagaggaggaggaagaggaagaagaagaggaagatgaggagtcagggaatcagtcagataggagtggttccagtggccggcgcaaggccaagaagaaatggcgaaaagacagcccatgggtgaagccgtctcggaaacggcgcaagcgggagcctccgcgggccaaggagccacgaggagtgaatggtgtgggctcctcaggccccagtgagtacatggaggtccctctggggtccctggagctgcccagcgaggggaccctctcccccaaccacgctggggtgtccaatgacacatcttcgctggagacagagcgagggtttgaggagttgcccctgtgcagctgccgcatggaggcacccaagattgaccgcatcagcgagagggcggggcacaagtgcatggccactgagagtgtggacggagagctgtcaggctgcaatgccgccatcctcaagcgggagaccatgaggccatccagccgtgtggccctgatggtgctctgtgagacccaccgcgcccgcatggtcaaacaccactgctgcccgggctgcggctacttctgcacggcgggcaccttcctggagtgccaccctgacttccgtgtggcccaccgcttccacaaggcctgtgtgtctcagctgaatgggatggtcttctgtccccactgtggggaggatgcttctgaagctcaagaggtgaccatcccccggggtgacggggtgaccccaccggccggcactgcagctcctgcacccccacccctgtcccaggatgtccccgggagagcagacacttctcagcccagtgcccggatgcgagggcatggggaaccccggcgcccgccctgcgatcccctggctgacaccattgacagctcagggccctccctgaccctgcccaatgggggctgcctttcagccgtggggctgccactggggccaggccgggaggccctggaaaaggccctggtcatccaggagtcagagaggcggaagaagctccgtttccaccctcggcagttgtacctgtccgtgaagcagggcgagctgcagaaggtgatcctgatgctgttggacaacctggaccccaacttccagagcgaccagcagagcaagcgcacgcccctgcatgcagccgcccagaagggctccgtggagatctgccatgtgctgctgcaggctggagccaacataaatgcagtggacaaacagcagcggacgccactgatggaggccgtggtgaacaaccacctggaggtagcccgttacatggtgcagcgtggtggctgtgtctatagcaaggaggaggacggttccacctgcctccaccacgcagccaaaatcgggaacttggagatggtcagcctgctgctgagcacaggacaggtggacgtcaacgcccaggacagtggggggtggacgcccatcatctgggctgcagagcacaagcacatcgaggtgatccgcatgctactgacgcggggcgccgacgtcaccctcactgacaacgaggagaacatctgcctgcactgggcctccttcacgggcagcgccgccatcgccgaagtccttctgaatgcgcgctgtgacctccatgctgtcaactaccatggggacacccccctgcacatcgcagctcgggagagctaccatgactgcgtgctgttattcctgtcacgtggggccaaccctgagctgcggaacaaagagggggacacagcatgggacctgactcccgagcgctccgacgtgtggtttgcgcttcaactcaaccgcaagctccgacttggggtgggaaatcgggccatccgcacagagaagatcatctgccgggacgtggctcggggctatgagaacgtgcccattccctgtgtcaacggtgtggatggggagccctgccctgaggattacaagtacatctcagagaactgcgagacgtccaccatgaacatcgatcgcaacatcacccacctgcagcactgcacgtgtgtggacgactgctctagctccaactgcctgtgcggccagctcagcatccggtgctggtatgacaaggatgggcgattgctccaggaatttaacaagattgagcctccgctgattttcgagtgtaaccaggcgtgctcatgctggagaaactgcaagaaccgggtcgtacagagtggcatcaaggtgcggctacagctctaccgaacagccaagatgggctggggggtccgcgccctgcagaccatcccacaggggaccttcatctgcgagtatgtcggggagctgatctctgatgctgaggctgatgtgagagaggatgattcttacctcttcgacttagacaacaaggatggagaggtgtactgcatagatgcccgttactatggcaacatcagccgcttcatcaaccacctgtgtgaccccaacatcattcccgtccgggtcttcatgctgcaccaagacctgcgatttccacgcatcgccttcttcagttcccgagacatccggactggggaggagctagggtttgactatggcgaccgcttctgggacatcaaaagcaaatatttcacctgccaatgtggctctgagaagtgcaagcactcagccgaagccattgccctggagcagagccgtctggcccgcctggacccacaccctgagctgctgcccgagctcggctccctgccccctgtcaacacatgagaacggaccacaccctctctccccagcatggatggccacagctcagccgcctcctctgccaccagctgctcgcagcccatgcctgggggtgctgccatcttctctccccaccaccctttcacacattcctgaccagagatcccagccaggccctggaggtctgacagcccctccctcccagagctggttcctccctgggagggcaacttcagggctggccaccccccgtgttccccatcctcagttgaagtttgatgaattgaagtcgggcctctatgccaactggttccttttgttctcaataaatgttgggtttggtaataaa

SEQ ID NO: 130898 - DNA, 3856 bp, Homo sapiens
  Payload ID: 5576
  Gene Symbol: EHMT2
  Gene Name: euchromatic histone-lysine N-methyltransferase 2
  ENST ID: ENST00000454705
  CDS Start-End: 1-3531
atggcggcggcggcgggagctgcagcggcggcggccgccgagggggaggcccccgctgagatgggggcgctgctgctggagaaggaaaccagaggagccaccgagagagttcatggctctttgggggacacccctcgtagtgaagaaaccctgcccaaggccaaccccgactccctggagcctgctggcccctcatctccagcctctgtcactgtcactgttggtgatgagggggctgacacccctgtaggggctacaccactcattggggatgaatctgagaatcttgagggagatggggacctccgtgggggccggatcctgctgggccatgccacaaagtcattcccctcttcccccagcaaggggggttcctgtcctagccgggccaagatgtcaatgacaggggcgggaaaatcacctccatctgtccagagtttggctatgaggctactgagtatgccaggagcccagggagctgcagcagcagggtctgaaccccctccagccaccacgagcccagagggacagcccaaggtccaccgagcccgcaaaaccatgtccaaaccaggaaatggacagcccccggtccctgagaagcggccccctgaaatacagcatttccgcatgagtgatgatgtccactcactgggaaaggtgacctcagatctggccaaaaggaggaagctgaactcaggaggtggcctgtcggaggagttaggttctgcccggcgttcaggagaagtgaccctgacgaaaggggaccccgggtccctggaggagtgggagacggtggtgggtgatgacttcagtctctactatgattcctactctgtggatgagcgcgtggactccgacagcaagtctgaagttgaagctctaactgaacaactaagtgaagaggaggaggaggaagaggaggaagaagaagaagaggaagaggaggaggaagaggaagaagaagaggaagatgaggagtcagggaatcagtcagataggagtggttccagtggccggcgcaaggccaagaagaaatggcgaaaagacagcccatgggtgaagccgtctcggaaacggcgcaagcgggagcctccgcgggccaaggagccacgaggggtgtccaatgacacatcttcgctggagacagagcgagggtttgaggagttgcccctgtgcagctgccgcatggaggcacccaagattgaccgcatcagcgagagggcggggcacaagtgcatggccactgagagtgtggacggagagctgtcaggctgcaatgccgccatcctcaagcgggagaccatgaggccatccagccgtgtggccctgatggtgctctgtgagacccaccgcgcccgcatggtcaaacaccactgctgcccgggctgcggctacttctgcacggcgggcaccttcctggagtgccaccctgacttccgtgtggcccaccgcttccacaaggcctgtgtgtctcagctgaatgggatggtcttctgtccccactgtggggaggatgcttctgaagctcaagaggtgaccatcccccggggtgacggggtgaccccaccggccggcactgcagctcctgcacccccacccctgtcccaggatgtccccgggagagcagacacttctcagcccagtgcccggatgcgagggcatggggaaccccggcgcccgccctgcgatcccctggctgacaccattgacagctcagggccctccctgaccctgcccaatgggggctgcctttcagccgtggggctgccactggggccaggccgggaggccctggaaaaggccctggtcatccaggagtcagagaggcggaagaagctccgtttccaccctcggcagttgtacctgtccgtgaagcagggcgagctgcagaaggtgatcctgatgctgttggacaacctggaccccaacttccagagcgaccagcagagcaagcgcacgcccctgcatgcagccgcccagaagggctccgtggagatctgccatgtgctgctgcaggctggagccaacataaatgcagtggacaaacagcagcggacgccactgatggaggccgtggtgaacaaccacctggaggtagcccgttacatggtgcagcgtggtggctgtgtctatagcaaggaggaggacggttccacctgcctccaccacgcagccaaaatcgggaacttggagatggtcagcctgctgctgagcacaggacaggtggacgtcaacgcccaggacagtggggggtggacgcccatcatctgggctgcagagcacaagcacatcgaggtgatccgcatgctactgacgcggggcgccgacgtcaccctcactgacaacgaggagaacatctgcctgcactgggcctccttcacgggcagcgccgccatcgccgaagtccttctgaatgcgcgctgtgacctccatgctgtcaactaccatggggacacccccctgcacatcgcagctcgggagagctaccatgactgcgtgctgttattcctgtcacgtggggccaaccctgagctgcggaacaaagagggggacacagcatgggacctgactcccgagcgctccgacgtgtggtttgcgcttcaactcaaccgcaagctccgacttggggtgggaaatcgggccatccgcacagagaagatcatctgccgggacgtggctcggggctatgagaacgtgcccattccctgtgtcaacggtgtggatggggagccctgccctgaggattacaagtacatctcagagaactgcgagacgtccaccatgaacatcgatcgcaacatcacccacctgcagcactgcacgtgtgtggacgactgctctagctccaactgcctgtgcggccagctcagcatccggtgctggtatgacaaggatgggcgattgctccaggaatttaacaagattgagcctccgctgattttcgagtgtaaccaggcgtgctcatgctggagaaactgcaagaaccgggtcgtacagagtggcatcaaggtgcggctacagctctaccgaacagccaagatgggctggggggtccgcgccctgcagaccatcccacaggggaccttcatctgcgagtatgtcggggagctgatctctgatgctgaggctgatgtgagagaggatgattcttacctcttcgacttagacaacaaggatggagaggtgtactgcatagatgcccgttactatggcaacatcagccgcttcatcaaccacctgtgtgaccccaacatcattcccgtccgggtcttcatgctgcaccaagacctgcgatttccacgcatcgccttcttcagttcccgagacatccggactggggaggagctagggtttgactatggcgaccgcttctgggacatcaaaagcaaatatttcacctgccaatgtggctctgagaagtgcaagcactcagccgaagccattgccctggagcagagccgtctggcccgcctggacccacaccctgagctgctgcccgagctcggctccctgccccctgtcaacacatgagaacggaccacaccctctctccccagcatggatggccacagctcagccgcctcctctgccaccagctgctcgcagcccatgcctgggggtgctgccatcttctctccccaccaccctttcacacattcctgaccagagatcccagccaggccctggaggtctgacagcccctccctcccagagctggttcctccctgggagggcaacttcagggctggccaccccccgtgttccccatcctcagttgaagtttgatgaattgaagtcgggcctctatgccaactggttccttttgttctcaataaatgttgggtttggtaataaa

SEQ ID NO: 130899 - DNA, 3856 bp, Homo sapiens; identical to SEQ ID NO: 130883
  Payload ID: 5576
  Gene Symbol: EHMT2
  Gene Name: euchromatic histone-lysine N-methyltransferase 2
  Uniprot ID: Q96KQ7
  ENST ID: ENST00000450229
  CDS Start-End: 1-3531

SEQ ID NO: 130900 - DNA, 4047 bp, Homo sapiens; identical to SEQ ID NO: 130882
  Payload ID: 5576
  Gene Symbol: EHMT2
  Gene Name: euchromatic histone-lysine N-methyltransferase 2
  ENST ID: ENST00000428442
  CDS Start-End: 21-3722

SEQ ID NO: 130901 - DNA, 4047 bp, Homo sapiens; identical to SEQ ID NO: 130890
  Payload ID: 5576
  Gene Symbol: EHMT2
  Gene Name: euchromatic histone-lysine N-methyltransferase 2
  ENST ID: ENST00000450323
  CDS Start-End: 21-3722

SEQ ID NO: 130902 - DNA, 3856 bp, Homo sapiens; identical to SEQ ID NO: 130898
  Payload ID: 5576
  Gene Symbol: EHMT2
  Gene Name: euchromatic histone-lysine N-methyltransferase 2
  ENST ID: ENST00000440987
  CDS Start-End: 1-3531

SEQ ID NO: 130903 - DNA, 894 bp, Homo sapiens; identical to SEQ ID NO: 130892
  Payload ID: 5576
  Gene Symbol: EHMT2
  Gene Name: euchromatic histone-lysine N-methyltransferase 2
  ENST ID: ENST00000451745
  CDS Start-End: 1-894

SEQ ID NO: 130904 - DNA, 894 bp, Homo sapiens; identical to SEQ ID NO: 130892
  Payload ID: 5576
  Gene Symbol: EHMT2
  Gene Name: euchromatic histone-lysine N-methyltransferase 2
  ENST ID: ENST00000424396
  CDS Start-End: 1-894

SEQ ID NO: 130905 - DNA, 4047 bp, Homo sapiens; identical to SEQ ID NO: 130882
  Payload ID: 5576
  Gene Symbol: EHMT2
  Gene Name: euchromatic histone-lysine N-methyltransferase 2
  ENST ID: ENST00000443951
  CDS Start-End: 21-3722

SEQ ID NO: 130906 - DNA, 3965 bp, Homo sapiens; identical to SEQ ID NO: 130884
  Payload ID: 5576
  Gene Symbol: EHMT2
  Gene Name: euchromatic histone-lysine N-methyltransferase 2
  Uniprot ID: Q96KQ7
  ENST ID: ENST00000429506
  CDS Start-End: 8-3640

SEQ ID NO: 130907 - DNA, 894 bp, Homo sapiens; identical to SEQ ID NO: 130892
  Payload ID: 5576
  Gene Symbol: EHMT2
  Gene Name: euchromatic histone-lysine N-methyltransferase 2
  ENST ID: ENST00000448415
  CDS Start-End: 1-894

SEQ ID NO: 130908 - DNA, 4129 bp, Homo sapiens
  Payload ID: 5576
  Gene Symbol: EHMT2
  Gene Name: euchromatic histone-lysine N-methyltransferase 2
  ENST ID: ENST00000415323
  CDS Start-End: 1-3804
atgcggggtctaccgagagggagggggttgatgcgggcccgggggaggggtcgtgcggcccctccgggcagccgaggccgcggaaggggggggccccacagaggaagaggtaggccccggagcctactctctcttcccagggcccaggcatcctggaccccccaactctctactgggctgaccagccctcctgtcccttgtctcccctcccagggggaggcccccgctgagatgggggcgctgctgctggagaaggaaaccagaggagccaccgagagagttcatggctctttgggggacacccctcgtagtgaagaaaccctgcccaaggccaaccccgactccctggagcctgctggcccctcatctccagcctctgtcactgtcactgttggtgatgagggggctgacacccctgtaggggctacaccactcattggggatgaatctgagaatcttgagggagatggggacctccgtgggggccggatcctgctgggccatgccacaaagtcattcccctcttcccccagcaaggggggttcctgtcctagccgggccaagatgtcaatgacaggggcgggaaaatcacctccatctgtccagagtttggctatgaggctactgagtatgccaggagcccagggagctgcagcagcagggtctgaaccccctccagccaccacgagcccagagggacagcccaaggtccaccgagcccgcaaaaccatgtccaaaccaggaaatggacagcccccggtccctgagaagcggccccctgaaatacagcatttccgcatgagtgatgatgtccactcactgggaaaggtgacctcagatctggccaaaaggaggaagctgaactcaggaggtggcctgtcggaggagttaggttctgcccggcgttcaggagaagtgaccctgacgaaaggggaccccgggtccctggaggagtgggagacggtggtgggtgatgacttcagtctctactatgattcctactctgtggatgagcgcgtggactccgacagcaagtctgaagttgaagctctaactgaacaactaagtgaagaggaggaggaggaagaggaggaagaagaagaagaggaagaggaggaggaagaggaagaagaagaggaagatgaggagtcagggaatcagtcagataggagtggttccagtggccggcgcaaggccaagaagaaatggcgaaaagacagcccatgggtgaagccgtctcggaaacggcgcaagcgggagcctccgcgggccaaggagccacgaggagtgaatggtgtgggctcctcaggccccagtgagtacatggaggtccctctggggtccctggagctgcccagcgaggggaccctctcccccaaccacgctggggtgtccaatgacacatcttcgctggagacagagcgagggtttgaggagttgcccctgtgcagctgccgcatggaggcacccaagattgaccgcatcagcgagagggcggggcacaagtgcatggccactgagagtgtggacggagagctgtcaggctgcaatgccgccatcctcaagcgggagaccatgaggccatccagccgtgtggccctgatggtgctctgtgagacccaccgcgcccgcatggtcaaacaccactgctgcccgggctgcggctacttctgcacggcgggcaccttcctggagtgccaccctgacttccgtgtggcccaccgcttccacaaggcctgtgtgtctcagctgaatgggatggtcttctgtccccactgtggggaggatgcttctgaagctcaagaggtgaccatcccccggggtgacggggtgaccccaccggccggcactgcagctcctgcacccccacccctgtcccaggatgtccccgggagagcagacacttctcagcccagtgcccggatgcgagggcatggggaaccccggcgcccgccctgcgatcccctggctgacaccattgacagctcagggccctccctgaccctgcccaatgggggctgcctttcagccgtggggctgccactggggccaggccgggaggccctggaaaaggccctggtcatccaggagtcagagaggcggaagaagctccgtttccaccctcggcagttgtacctgtccgtgaagcagggcgagctgcagaaggtgatcctgatgctgttggacaacctggaccccaacttccagagcgaccagcagagcaagcgcacgcccctgcatgcagccgcccagaagggctccgtggagatctgccatgtgctgctgcaggctggagccaacataaatgcagtggacaaacagcagcggacgccactgatggaggccgtggtgaacaaccacctggaggtagcccgttacatggtgcagcgtggtggctgtgtctatagcaaggaggaggacggttccacctgcctccaccacgcagccaaaatcgggaacttggagatggtcagcctgctgctgagcacaggacaggtggacgtcaacgcccaggacagtggggggtggacgcccatcatctgggctgcagagcacaagcacatcgaggtgatccgcatgctactgacgcggggcgccgacgtcaccctcactgacaacgaggagaacatctgcctgcactgggcctccttcacgggcagcgccgccatcgccgaagtccttctgaatgcgcgctgtgacctccatgctgtcaactaccatggggacacccccctgcacatcgcagctcgggagagctaccatgactgcgtgctgttattcctgtcacgtggggccaaccctgagctgcggaacaaagagggggacacagcatgggacctgactcccgagcgctccgacgtgtggtttgcgcttcaactcaaccgcaagctccgacttggggtgggaaatcgggccatccgcacagagaagatcatctgccgggacgtggctcggggctatgagaacgtgcccattccctgtgtcaacggtgtggatggggagccctgccctgaggattacaagtacatctcagagaactgcgagacgtccaccatgaacatcgatcgcaacatcacccacctgcagcactgcacgtgtgtggacgactgctctagctccaactgcctgtgcggccagctcagcatccggtgctggtatgacaaggatgggcgattgctccaggaatttaacaagattgagcctccgctgattttcgagtgtaaccaggcgtgctcatgctggagaaactgcaagaaccgggtcgtacagagtggcatcaaggtgcggctacagctctaccgaacagccaagatgggctggggggtccgcgccctgcagaccatcccacaggggaccttcatctgcgagtatgtcggggagctgatctctgatgctgaggctgatgtgagagaggatgattcttacctcttcgacttagacaacaaggatggagaggtgtactgcatagatgcccgttactatggcaacatcagccgcttcatcaaccacctgtgtgaccccaacatcattcccgtccgggtcttcatgctgcaccaagacctgcgatttccacgcatcgccttcttcagttcccgagacatccggactggggaggagctagggtttgactatggcgaccgcttctgggacatcaaaagcaaatatttcacctgccaatgtggctctgagaagtgcaagcactcagccgaagccattgccctggagcagagccgtctggcccgcctggacccacaccctgagctgctgcccgagctcggctccctgccccctgtcaacacatgagaacggaccacaccctctctccccagcatggatggccacagctcagccgcctcctctgccaccagctgctcgcagcccatgcctgggggtgctgccatcttctctccccaccaccctttcacacattcctgaccagagatcccagccaggccctggaggtctgacagcccctccctcccagagctggttcctccctgggagggcaacttcagggctggccaccccccgtgttccccatcctcagttgaagtttgatgaattgaagtcgggcctctatgccaactggttccttttgttctcaataaatgttgggtttggtaataaa

SEQ ID NO: 130909 - DNA, 3856 bp, Homo sapiens; identical to SEQ ID NO: 130883
  Payload ID: 5576
  Gene Symbol: EHMT2
  Gene Name: euchromatic histone-lysine N-methyltransferase 2
  Uniprot ID: Q96KQ7
  ENST ID: ENST00000420874
  CDS Start-End: 1-3531

SEQ ID NO: 130910 - DNA, 894 bp, Homo sapiens; identical to SEQ ID NO: 130892
  Payload ID: 5576
  Gene Symbol: EHMT2
  Gene Name: euchromatic histone-lysine N-methyltransferase 2
  ENST ID: ENST00000436026
  CDS Start-End: 1-894

SEQ ID NO: 130911 - DNA, 2992 bp, Homo sapiens
  Payload ID: 5576
  Gene Symbol: EHMT2
  Gene Name: euchromatic histone-lysine N-methyltransferase 2
  ENST ID: ENST00000458593
  CDS Start-End: 1-2667
tctgaagttgaagctctaactgaacaactaagtgaagaggaggaggaggaagaggaggaagaagaagaagaggaagaggaggaggaagaggaagaagaagaggaagatgaggagtcagggaatcagtcagataggagtggttccagtggccggcgcaaggccaagaagaaatggcgaaaagacagcccatgggtgaagccgtctcggaaacggcgcaagcgggagcctccgcgggccaaggagccacgaggggtgtccaatgacacatcttcgctggagacagagcgagggtttgaggagttgcccctgtgcagctgccgcatggaggcacccaagattgaccgcatcagcgagagggcggggcacaagtgcatggccactgagagtgtggacggagagctgtcaggctgcaatgccgccatcctcaagcgggagaccatgaggccatccagccgtgtggccctgatggtgctctgtgagacccaccgcgcccgcatggtcaaacaccactgctgcccgggctgcggctacttctgcacggcgggcaccttcctggagtgccaccctgacttccgtgtggcccaccgcttccacaaggcctgtgtgtctcagctgaatgggatggtcttctgtccccactgtggggaggatgcttctgaagctcaagaggtgaccatcccccggggtgacggggtgaccccaccggccggcactgcagctcctgcacccccacccctgtcccaggatgtccccgggagagcagacacttctcagcccagtgcccggatgcgagggcatggggaaccccggcgcccgccctgcgatcccctggctgacaccattgacagctcagggccctccctgaccctgcccaatgggggctgcctttcagccgtggggctgccactggggccaggccgggaggccctggaaaaggccctggtcatccaggagtcagagaggcggaagaagctccgtttccaccctcggcagttgtacctgtccgtgaagcagggcgagctgcagaaggtgatcctgatgctgttggacaacctggaccccaacttccagagcgaccagcagagcaagcgcacgcccctgcatgcagccgcccagaagggctccgtggagatctgccatgtgctgctgcaggctggagccaacataaatgcagtggacaaacagcagcggacgccactgatggaggccgtggtgaacaaccacctggaggtagcccgttacatggtgcagcgtggtggctgtgtctatagcaaggaggaggacggttccacctgcctccaccacgcagccaaaatcgggaacttggagatggtcagcctgctgctgagcacaggacaggtggacgtcaacgcccaggacagtggggggtggacgcccatcatctgggctgcagagcacaagcacatcgaggtgatccgcatgctactgacgcggggcgccgacgtcaccctcactgacaacgaggagaacatctgcctgcactgggcctccttcacgggcagcgccgccatcgccgaagtccttctgaatgcgcgctgtgacctccatgctgtcaactaccatggggacacccccctgcacatcgcagctcgggagagctaccatgactgcgtgctgttattcctgtcacgtggggccaaccctgagctgcggaacaaagagggggacacagcatgggacctgactcccgagcgctccgacgtgtggtttgcgcttcaactcaaccgcaagctccgacttggggtgggaaatcgggccatccgcacagagaagatcatctgccgggacgtggctcggggctatgagaacgtgcccattccctgtgtcaacggtgtggatggggagccctgccctgaggattacaagtacatctcagagaactgcgagacgtccaccatgaacatcgatcgcaacatcacccacctgcagcactgcacgtgtgtggacgactgctctagctccaactgcctgtgcggccagctcagcatccggtgctggtatgacaaggatgggcgattgctccaggaatttaacaagattgagcctccgctgattttcgagtgtaaccaggcgtgctcatgctggagaaactgcaagaaccgggtcgtacagagtggcatcaaggtgcggctacagctctaccgaacagccaagatgggctggggggtccgcgccctgcagaccatcccacaggggaccttcatctgcgagtatgtcggggagctgatctctgatgctgaggctgatgtgagagaggatgattcttacctcttcgacttagacaacaaggatggagaggtgtactgcatagatgcccgttactatggcaacatcagccgcttcatcaaccacctgtgtgaccccaacatcattcccgtccgggtcttcatgctgcaccaagacctgcgatttccacgcatcgccttcttcagttcccgagacatccggactggggaggagctagggtttgactatggcgaccgcttctgggacatcaaaagcaaatatttcacctgccaatgtggctctgagaagtgcaagcactcagccgaagccattgccctggagcagagccgtctggcccgcctggacccacaccctgagctgctgcccgagctcggctccctgccccctgtcaacacatgagaacggaccacaccctctctccccagcatggatggccacagctcagccgcctcctctgccaccagctgctcgcagcccatgcctgggggtgctgccatcttctctccccaccaccctttcacacattcctgaccagagatcccagccaggccctggaggtctgacagcccctccctcccagagctggttcctccctgggagggcaacttcagggctggccaccccccgtgttccccatcctcagttgaagtttgatgaattgaagtcgggcctctatgccaactggttccttttgttctcaataaatgttgggtttggtaataaa

SEQ ID NO: 130912 - DNA, 4129 bp, Homo sapiens; identical to SEQ ID NO: 130908
  Payload ID: 5576
  Gene Symbol: EHMT2
  Gene Name: euchromatic histone-lysine N-methyltransferase 2
  ENST ID: ENST00000446303
  CDS Start-End: 1-3804

SEQ ID NO: 130913 - DNA, 894 bp, Homo sapiens; identical to SEQ ID NO: 130892
  Payload ID: 5576
  Gene Symbol: EHMT2
  Gene Name: euchromatic histone-lysine N-methyltransferase 2
  ENST ID: ENST00000420623
  CDS Start-End: 1-894

SEQ ID NO: 130914 - DNA, 3965 bp, Homo sapiens; identical to SEQ ID NO: 130894
  Payload ID: 5576
  Gene Symbol: EHMT2
  Gene Name: euchromatic histone-lysine N-methyltransferase 2
  Uniprot ID: Q96KQ7
  ENST ID: ENST00000421926
  CDS Start-End: 8-3640

SEQ ID NO: 130915 - DNA, 3094 bp, Homo sapiens; identical to SEQ ID NO: 130897
  Payload ID: 5576
  Gene Symbol: EHMT2
  Gene Name: euchromatic histone-lysine N-methyltransferase 2
  ENST ID: ENST00000627114
  CDS Start-End: 1-2769

SEQ ID NO: 130916 - DNA, 2992 bp, Homo sapiens; identical to SEQ ID NO: 130911
  Payload ID: 5576
  Gene Symbol: EHMT2
  Gene Name: euchromatic histone-lysine N-methyltransferase 2
  ENST ID: ENST00000629838
  CDS Start-End: 1-2667

SEQ ID NO: 130917 - DNA, 7388 bp, Homo sapiens
  Payload ID: 5577
  Gene Symbol: EEF2K
  Gene Name: eukaryotic elongation factor 2 kinase
  Uniprot ID: O00418
  ENST ID: ENST00000263026
  CDS Start-End: 475-2652
aacctagaccagccccagcttcagcctcagctcccctccttcctggatcgagcgcccgcactcccggccctgcagccacccgagtcccgctcgctgtcgcctgcacgcgagtcccccctggcacgcgctcccacatcccgggatcgtcccaacggcccctgcgcccttcctgggatcactccgactgccccgcgcgccctgggatcggtccatctaccccgcgtggccccagctgcttgcccggagcgccagctagcgctccccgctctccgctccccggcactctcggggggcccgcccgccctgcaccctggagctccgggccgcgagcctctgccaactcctctggaccctcgcggccgtgggcagcggctgccgcgcctgtctgcccgagggaggaccttcgcctctgcatttgtccagtaactctggctgtgccggatactgcttgggtaaaacgggcaccccaggaacatggcagacgaagatctcatcttccgcctggaaggcgttgatggcggccagtccccccgagctggccatgatggtgattctgatggggacagcgacgatgaggaaggttacttcatctgccccatcacggatgacccaagctcgaaccagaatgtcaattccaaggttaataagtactacagcaacctaacaaaaagtgagcggtatagctccagcgggtccccggcaaactccttccacttcaaggaagcctggaagcacgcaatccagaaggccaagcacatgcccgacccctgggctgagttccacctggaagatattgccaccgaacgtgctactcgacacaggtacaacgccgtcaccggggaatggctggatgatgaagttctgatcaagatggcatctcagcccttcggccgaggagcaatgagggagtgcttccggacgaagaagctctccaacttcttgcatgcccagcagtggaagggcgcctccaactacgtggcgaagcgctacatcgagcccgtagaccgggatgtgtactttgaggacgtgcgtctacagatggaggccaagctctggggggaggagtataatcggcacaagccccccaagcaggtggacatcatgcagatgtgcatcatcgagctgaaggacagaccgggcaagcccctcttccacctggagcactacatcgagggcaagtacatcaagtacaactccaactctggctttgtccgcgatgacaacatccgcctgacgccgcaggccttcagccacttcacttttgagcgttccggccatcagctgatagtggtggacatccagggagttggggatctctacactgacccacagatccacacggagacgggcactgactttggagacggcaacctaggtgtccgcgggatggcgctcttcttctactctcatgcctgcaaccggatttgcgagagcatgggccttgctccctttgacctctcgccccgggagagggatgcagtgaatcagaacaccaagctgctgcaatcagccaagaccatcttgagaggaacagaggaaaaatgtgggagcccccaagtaaggaccctctctgggagccggccacccctgctccgtcccctttcagagaactctggagacgagaacatgagcgacgtgaccttcgactctctcccttcttccccatcttcggccacaccacacagccagaagctagaccacctccattggccagtgttcagtgacctcgataacatggcatccagagaccatgatcatctagacaaccaccgggagtctgagaatagtggggacagcggataccccagtgagaagcggggtgagctggatgaccctgagccccgagaacatggccactcatacagtaatcggaagtacgagtctgacgaagacagcctgggcagctctggacgggtatgtgtagagaagtggaatctcctcaactcctcccgcctccacctgccgagggcttcggccgtggccctggaagtgcaaaggcttaatgctctggacctcgaaaagaaaatcgggaagtccattttggggaaggtccatctggccatggtgcgctaccacgagggtgggcgcttctgcgagaagggcgaggagtgggaccaggagtcggctgtcttccacctggagcacgcagccaacctgggcgagctggaggccatcgtgggcctgggactcatgtactcgcagttgcctcatcacatcctagccgatgtctctctgaaggagacagaagagaacaaaaccaaaggatttgattacttactaaaggccgctgaagctggcgacaggcagtccatgatcctagtggcgcgagcttttgactctggccagaacctcagcccggacaggtgccaagactggctagaggccctgcactggtacaacactgccctggagatgacggactgtgatgagggcggtgagtacgacggaatgcaggacgagccccggtacatgatgctggccagggaggccgagatgctgttcacaggaggctacgggctggagaaggacccgcagagatcaggggacttgtatacccaggcagcagaggcagcgatggaagccatgaagggccgactggccaaccagtactaccaaaaggctgaagaggcctgggcccagatggaggagtaaccaggaaaatcactgccggctagtcccaagcaaacgggctaggaggaaagattaaaaaaacaacaacaacaacttatttagtttggggaggggaagcatttttaagtgtgttgtaaaatcaaattttatatttcattttttgactcttgaaaaatgtctttgctccttggcagctaccagcagagactctatagctgtctcttagggcagtattttggggaagtggggcttgaagaagcagcctaatgaaccaacataccgttttgtgtgtggttttttttgtttgtttgtttgtttgttttgagacagagtcttgctctgtcacccaggctggagtgcagtgacatgatcttagctcactgcaacctccgcctcctgggttcaagtgattctcctgcctcagcctcccaagtagctgggattactggtgcacaccaccacactcagctaatttttgcatttttagtagagatggggtttcaccatgttggccaggctggtctcgaactcctaacctcaggtgatccacctgcctcagcctcccaaagtgctgggattacaggtgtgagccaccatgcctgcccattttgtggttctattttcatttttatttctttttttttttttgtcacgagatataagaaagtgctttttgccttgaatggacaattttagggctgtgctcactagtcttttcaggctggactgaaatgtcgggcccatggagccctgtgttttgtgcatcgggatgagaaatgaagcacttcacgctggctttcctaagtcacggggcgtgtattgccgtggcttagtgcaaagcattctttctcagagcatttagaggcatgcgtggcattttttcagtgggtgtgagattgcacaatacccaggctcccttctactgtggggaagggcctgcatgttggctgttttttaaacttctagttcaatttccttccataatgctactgattttctggcatacagccgaattccatcttttaagcatgctttctacggtgggcttttcaaaacaggtttgagttttgtatgcacacgtttactacctctaactcctacatcagctagtgtggaagagggtgcacctcaaagcttttacacgtaaggacagcggcttggaatgtgagagccttttctccaagcagacccacactctgcatctcagtggcagctcccacaacgtgactgcaatgtctcttatacagtattccttggtgttttcttagtgtctggatgttcttacgtgaaatctgctccccagccctggtccttggcattttctgcttgaagctgggctgattttcttgtaatttacagcaggacgctttcagcagcagtctcttgggattttatctaagatgtttgaggatgagagggcaagaactataaacactcattaattctagtagtctccccatggccagacaatggcgattgttatttaatgagcttttcctttcaatggaattcagctctcacattagtatgatttcatttgatgtttcaaatagcaaagatgctaggtgcggtggctcccgcctgtaatctcagcactttgaggagggccaaggtgggaggattgcttgagctcaggacttcaagaccagcctgggtaaacatggcgagaccctgtctctaccaaaacaacaaaaaaaagacagactgctttgatcaaccctaaatgcaaaagcagcctatttttctttgtttaaaagtcaaaacataaaaaagcagagtataacatacaaaccattcttaactattcattaaaatgggtccttcaacaccttagtggggtttgttgttgttgcttatgcagagagattattttctttttattattttataatttttgaaatagagatggggtctcactgtgttgcccaggctggtctcgaactcctggacttaagtgagcctcccgcctcagtctcccaaagcgctgggattacaggcaggagccactgagcccagccaagacttcagtgttgactgctttggaggcacaaacccatgcaagcgttagttccaaagttcagtgtgtacccttaaatgaacaatgaagcaggtaaaattacccttgaaaaaaatcccttggaccacccataaatgacagtgactttttcaatatggactcatcatagccagttttccttttgaagttggaactgatcacccttttgtcatctgtaccagatcagtagttggcttgtgttacattttgtgtgtgtgtgtgcgtgttttaaaccagtgcatataaattgtatgttaaatgtaagtaactttaagttgacttatctcttcacagtaatcaagcctcacgtaattcatgctttttaaattcagccagccccccctctctgaaattttattatgtaaataatttgtgttccctgatcactcgtttaagttcttagttgtatgtcatctcttctctagcaggaattggcaaacttttttgtaaaggggtagaaagtgaagattttaggctttgcaggccatatagcctctgctgcaaatgctcagccctgctgttgtaatgtaaaagctgccacagacactacatgaacacgaatgagtgtggctggtgttccaataaaactttatttacacaaacgggtggcccttttgggctgtagtttgtcaacccttgctctaacccttgactgagagctactttattaagccctgagggcaggagctatcccaattttgtgttccccagggcaccaaaacacagtgctttggcatagagtaggcactcaacaagtgtgtgaacagatggagagccagccctagtcagtgcactcaccctttgaggctctggttcctccaaacaatgattcgttgtctggattggctggaactgtcacccccgcaattctactccccacccacccatgtgaccttaatgtcagttgctggtctgttgctcttcggggagggagagatggcctggatacagagctaagcaaatgcttctttaagggcccttaaaagtgaaaagtaacttgcaagaggttgagatccttctgagctaggagaacttattccaccttcaaaacctagtttgggctgggtgcagtggctcacgccactttgggaggctgaggtgggcggatcacctgaagtcagctactcgggaggctgaggcaggagaatcgcttgaacccaggaggcagaggttgcagtgagccgagattgcgtcactgcactccagcctgggcgacagagtgagactccgtctcgaaaccaaaaacaagaaaaacccctagttttgtgccttctgaagatagttaggacatcttctttttccgcaaatgctggacatgccaaaaacctaacgcaaaacccaggacattccagcccaactgggacgatatcagagaccatcttcaagtgcaagaagcaggtgaaagcccaggaaattggcagagccaggattatcatccagtactttcatttcacaaatggagaaaccgaggttctgccagctagattttttttcacagtgtcactgctagcaagccactaagctggagctgggatttgagagctgctgctatttagaggatcttgggaataaaatttaaactggagtttaatggccctttcagttttgctataggcaagagaataaaatgaatgaatggataggtggctttatgggtgtaagaaagaagcgaaaaaaactcccaaaccccagtgttcctgaatatctgttctccccctgaccactctgggaatttatcaaatgcagctttgacctccaagccaagtaaactgctcttgttgctattttagtggtttttgtttttttaagacacaaggtctcactttgttactcaggctggagtgcagtggcatgatcataactcattgtaggctcaacctcctgggccccagtgatcctcctgcctcagcctctcaagtagctaaaactacagatgtgcaccatcacatctggctaatttttttttttttttttttgaggtggagtctcgctctgttgcccagattcaagtgcaatggcacgttttggctcactgcaacctctgcctcccaggttcaagcgattctccctgtctcggcctcccgagtagctgggactacaggcacctgccaccacgcgcagctaatgtttgtatttttagtagagacgggggtttcaccatgttggccaggctggtttcaaactcctgacattaggtgatccacctgcctcggcctcccaaagtgctgggattacaggcatgagccaccgtgccaagccacgcctggctaattttttaaaattattttttgcagagacagagtttcactatgttgcccaggctggtcttgaactccttggcctcaagtgatcctcccacctcagcctcccaaagcattggggttacaggcgtgagccactgcacctggccctgttttcatggcttttatttcctttcatcccacacatttgtctgcagtactagacatgttttacaaatcaacaagtttacacaagtatatgcagcttgttttggggggaaaggagacaaaatatgcatattttctgtgtggatttgtgcctcttaattgtgtttctagtctctaaggtgaccctttaacctactcaagatggggcccagagaagtggcctgcgttacagatttattttggcatatgtactaagttccattttctctttacaaataaagtgttttctttct

SEQ ID NO: 130918 - DNA, 2367 bp, Homo sapiens
  Payload ID: 5577
  Gene Symbol: EEF2K
  Gene Name: eukaryotic elongation factor 2 kinase
  ENST ID: ENST00000568269
  CDS Start-End: 431-1669
ggatcgagcgcccgcactcccggccctgcagccacccgagtcccgctcgctgtcgcctgcacgcgagtcccccctggcacgcgctcccacatcccgggatcgtcccaacggcccctgcgcccttcctgggatcactccgactgccccgcgcgccctgggatcggtccatctaccccgcgtggccccagctgcttgcccggagcgccagctagcgctccccgctctccgctccccggcactctcggggggcccgcccgccctgcaccctggagctccgggccgcgagcctctgccaactcctctggaccctcgcggccgtgggcagcggctgccgcgcctgtctgcccgagggaggaccttcgcctctgcatttgtccagtaactctggctgtgccggatactgcttgggtaaaacgggcaccccaggaacatggcagacgaagatctcatcttccgcctggaaggcgttgatggcggccagtccccccgagctggccatgatggtgattctgatggggacagcgacgatgaggaaggttacttcatctgccccatcacggatgacccaagctcgaaccagaatgtcaattccaaggttaataagtactacagcaacctaacaaaaagtgagcggtatagctccagcgggtccccggcaaactccttccacttcaaggaagcctggaagcacgcaatccagaaggccaagcacatgcccgacccctgggctgagttccacctggaagatattgccaccgaacgtgctactcgacacaggtacaacgccgtcaccggggaatggctggatgatgaagttctgatcaagatggcatctcagcccttcggccgaggagcaatgagggagtgcttccggacgaagaagctctccaacttcttgcatgcccagcagtggaagggcgcctccaactacgtggcgaagcgctacatcgagcccgtagaccgggatgtgtactttgaggacgtgcgtctacagatggaggccaagctctggggggaggagtataatcggcacaagccccccaagcaggtggacatcatgcagatgtgcatcatcgagctgaaggacagaccgggcaagcccctcttccacctggagcactacatcgagggcaagtacatcaagtacaactccaactctggctttgtccgcgatgacaacatccgcctgacgccgcaggccttcagccacttcacttttgagcgttccggccatcagctgatagtggtggacatccagggagttggggatctctacactgacccacagatccacacggagacgggcactgactttggagacggcaacctaggtgtccgcgggatggcgctcttcttctactctcatgcctgcaaccggatttgcgagagcatgggccttgctccctttgacctctcgccccgggagagggatgcagtgaatcagaacaccaagctgctgcaatcagccaagaccatcttgagaggaacagaggaaaaatgtgggagcccccaagtaaggaccctctctgggagccggccacccctgctccgtcccctttcagagaactctggagacgagaacatgagcgacgtgaccttcgactctctcccttcttccccatcttcggccacaccacacagccagaagctagaccacctccgtgagtgacggttcggtccctagtcactgtgattggaggggacaggtggagcagagctaaaccagctttcatttatgttagaaaaatcagacatgctaatcgaaaaggttcatggccccagtggttttatagattggccagtgttcagtgacctcgataacatggcatccagagaccatgatcatctagacaaccaccgggagtctgagaatagtggggacagcggataccccagtgagaagcggggtgagctggatgaccctgagccccgagaacatggccactcatacagtaatcggaagtacgagtctgacgaagacagcctgggcagctctggacgggtaatgcgccctgaggcacccttgtctctgcctcttccctgtctcctccaggctctgttgctgtttctcctgtctcatatctctgctgcctgcccatctgtcttgcacatgtgctaaaggaagattttgcaaagcagcaaatctgggcaaatgctctttgaacctctgcagggcaggatgctgggggatttgtggggaggattagagaagagcagctcagccccatcctggaggggaaatcaccacagggacagctcctgtcttaagtgcctgccatgaaggcacttcgcagtaatcagtttccttcttgcaaccacccagagagacaggctaatgtgactctcatccccattttatgtatgaga

SEQ ID NO: 130919 - DNA, 2268 bp, Homo sapiens
  Payload ID: 5578
  Gene Symbol: EEF2KMT
  Gene Name: eukaryotic elongation factor 2 lysine methyltransferase
  Uniprot ID: Q96G04
  ENST ID: ENST00000458008
  CDS Start-End: 50-940
gccgggcttccgcccggtctgccggcaacgctgcggccccgcccacgtcatggcgcccgaggagaacgcggggaccgaactcttgctgcagagtttcgagcgccgcttcctggcggcacgcacactgcgctccttcccctggcagagcttagaagcaaagttaagagactcatcagattctgagctgctgcgggatattttgcacaagactgtgaagcatcctgtgtgtgtgaagcacccgccgtccgtcaaatatgcccggtgctttctctcagaactcatcaaaaagccctcgggaggctcggtcacactctccgagagcacggccatcatctcctacggtaccacaggcctggtcacatgggacgccgccctctaccttgcagaatgggccatcgagaacccggcagtcttcactaacaggactgtcctagagcttggcagtggtgctggcctcacaggcctggccatctgcaagatgtgccgcccccgggcatacatcttcagcgactgtcacagccgggtccttgagcagctccgagggaatgtccttctcaatggcctctcattagaggcagacatcactgccaagttagacagccccagggtgacagtggcccagctggactgggacgtcgcgacggtccatcagctctctgccttccagccagatgttgtcattgcagcagatgtgctgtattgcccagaagccatcatgtcgctggtcggggtcctgcggaggctggctgcctgccgggagcaccagcgggctcctgaggtctacgtggcctttaccgtccgcaacccagagacgtgccagctgttcaccaccgagctaggccgggccgggatcagatgggaagtggaacctcgtcatgagcagaaactgtttccctacgaagagcacttggagatggcaatgctgaatctcaccctgtaggactcacacacgactccaacgggattgtgagaatcaagtcactctcatgggaagaatttttatatgggaaagcggataaaactttcattggactggaatgtttggagaatgttaatttccaaatcaggaaccacaaactgccctctaataagacatcggctatctaagcgtgtgggtgccccctttctgccagcagttctggttcttaagaaaatcaccataaatcagacatgaaaattctggctccaaaaatagcattttctttgtgcaaataaaaacgtgtgtatcaagtatgatgttcccccaacgtggacacactcagttcctcacaaagccaagcccactgcagctgccacatccctgggcttacggtgcagcaggtgcttttttcaagacaggaatcaaaatgttaggaacacggcagaaaggggacacctggagaccaaacgcaggatgaggagttctgcagaggtcacagggaagtcacagaacagtaatacgctagcaggggcatggggcgtgaagaacagaagaagagaggaagcgtttccaagcctccagagaagaaatcaaggccaaccaaagcttcccgggtcacagaaccaattcttttaccaggcagtaccactgctgtcatttcagcttctggccactgggaggtgctgctcgaaagggtttgccctgagactccaagaagaagctgcgggaaggacagcaggggtcctggggttttagcctctggcccaggagttatgtgtccataaccaaagggagcacagtctgcacccagctctcatcccatcggagctgctgcgactcccgcaggttcttccggaactggtttagcttgcccgcaggatcaggaaagtttgagaaaagcatctgcaaaaaaataaagagcagagcttacctcattgcctgtccccaccccatcccaggtcaccacctggctgaccccaggtccccgacccaacaacaacccctcccaagtccctaactccctcacttggactcgagacccttcacaccccagcagcactccgcctccaacttgacatcacagtttctggaaacttccccgcatgtcccactttcccacacttggtgccctggagcacctcccggcctctacgtgctgcccattcccctgtgagcaccctcctctcggcctctggccaacgcagtctcacccatctgtgggtaacaagggggtgtcggtgttctttgcagccttgctaaactgtctgaatcaaggatcacaaactacagcctgcaggccaaatccagcccacagcctgtgtttgtaaataaagttttattggaacaaa

SEQ ID NO: 130920 - DNA, 2390 bp, Homo sapiens
  Payload ID: 5578
  Gene Symbol: EEF2KMT
  Gene Name: eukaryotic elongation factor 2 lysine methyltransferase
  Uniprot ID: Q96G04
  ENST ID: ENST00000427587
  CDS Start-End: 70-1062
ccgccccctcttcagtccaggccgggcttccgcccggtctgccggcaacgctgcggccccgcccacgtcatggcgcccgaggagaacgcggggaccgaactcttgctgcagagtttcgagcgccgcttcctggcggcacgcacactgcgctccttcccctggcagagcttagaagcaaagttaagagactcatcagattctgagctgctgcgggatattttgcacaagactgtgaagcatcctgtgtgtgtgaagcacccgccgtccgtcaaatatgcccggtgctttctctcagaactcatcaaaaagcacgaggctgtccacacagagcctttggacgagctgtatgaagcgctggcggagaccctgatggccaaggagtccacccagggccaccggagctatttgctgccctcgggaggctcggtcacactctccgagagcacggccatcatctcctacggtaccacaggcctggtcacatgggacgccgccctctaccttgcagaatgggccatcgagaacccggcagtcttcactaacaggactgtcctagagcttggcagtggtgctggcctcacaggcctggccatctgcaagatgtgccgcccccgggcatacatcttcagcgactgtcacagccgggtccttgagcagctccgagggaatgtccttctcaatggcctctcattagaggcagacatcactgccaagttagacagccccagggtgacagtggcccagctggactgggacgtcgcgacggtccatcagctctctgccttccagccagatgttgtcattgcagcagatgtgctgtattgcccagaagccatcatgtcgctggtcggggtcctgcggaggctggctgcctgccgggagcaccagcgggctcctgaggtctacgtggcctttaccgtccgcaacccagagacgtgccagctgttcaccaccgagctaggccgggccgggatcagatgggaagtggaacctcgtcatgagcagaaactgtttccctacgaagagcacttggagatggcaatgctgaatctcaccctgtaggactcacacacgactccaacgggattgtgagaatcaagtcactctcatgggaagaatttttatatgggaaagcggataaaactttcattggactggaatgtttggagaatgttaatttccaaatcaggaaccacaaactgccctctaataagacatcggctatctaagcgtgtgggtgccccctttctgccagcagttctggttcttaagaaaatcaccataaatcagacatgaaaattctggctccaaaaatagcattttctttgtgcaaataaaaacgtgtgtatcaagtatgatgttcccccaacgtggacacactcagttcctcacaaagccaagcccactgcagctgccacatccctgggcttacggtgcagcaggtgcttttttcaagacaggaatcaaaatgttaggaacacggcagaaaggggacacctggagaccaaacgcaggatgaggagttctgcagaggtcacagggaagtcacagaacagtaatacgctagcaggggcatggggcgtgaagaacagaagaagagaggaagcgtttccaagcctccagagaagaaatcaaggccaaccaaagcttcccgggtcacagaaccaattcttttaccaggcagtaccactgctgtcatttcagcttctggccactgggaggtgctgctcgaaagggtttgccctgagactccaagaagaagctgcgggaaggacagcaggggtcctggggttttagcctctggcccaggagttatgtgtccataaccaaagggagcacagtctgcacccagctctcatcccatcggagctgctgcgactcccgcaggttcttccggaactggtttagcttgcccgcaggatcaggaaagtttgagaaaagcatctgcaaaaaaataaagagcagagcttacctcattgcctgtccccaccccatcccaggtcaccacctggctgaccccaggtccccgacccaacaacaacccctcccaagtccctaactccctcacttggactcgagacccttcacaccccagcagcactccgcctccaacttgacatcacagtttctggaaacttccccgcatgtcccactttcccacacttggtgccctggagcacctcccggcctctacgtgctgcccattcccctgtgagcaccctcctctcggcctctggccaacgcagtctcacccatctgtgggtaacaagggggtgtcggtgttctttgcagccttgctaaactgtctgaatcaaggatcacaaactacagcctgcaggccaaatccagcccacagcctgtgtttgtaaataaagttttattggaacaaa

SEQ ID NO: 130921 - DNA, 1282 bp, Homo sapiens
  Payload ID: 5578
  Gene Symbol: EEF2KMT
  Gene Name: eukaryotic elongation factor 2 lysine methyltransferase
  ENST ID: ENST00000587161
  CDS Start-End: 28-204
cggcaacgctgcggccccgcccacgtcatggcgcccgaggagaacgcggggaccgaactcttgctgcagagtttcgagcgccgcttcctggcggcacgcacactgcgctccttcccctggcaggcagtaatcgttctggtcactgggacacagctgccctcgcccattctaaaaagtcagcgccgtcaggaccgcagagcttagaagcaaagttaagagactcatcagattctgagctgctgcgggatattttgcacaagcacgaggctgtccacacagagcctttggacgagctgtatgaagcgctggcggagaccctgatggccaaggagtccacccagggccaccggagctatttgctgccctcgggaggctcggtcacactctccgagagcacggccatcatctcctacggtaccacaggcctggtcacatgggacgccgccctctaccttgcagaatgggccatcgagaacccggcagtcttcactaacaggactgtcctagagcttggcagtggtgctggcctcacaggcctggccatctgcaagatgtgccgcccccgggcatacatcttcagcgactgtcacagccgggtccttgagcagctccgagggaatgtccttctcaatggcctctcattagaggcagacatcactgccaagttagacagccccagggtgacagtggcccagctggactgggacgtcgcgacggtccatcagctctctgccttccagccagatgttgtcattgcagcagatgtgctgtattgcccagaagccatcatgtcgctggtcggggtcctgcggaggctggctgcctgccgggagcaccagcgggctcctgaggtctacgtggcctttaccgtccgcaacccagagacgtgccagctgttcaccaccgagctaggccgggccgggatcagatgggaagtggaacctcgtcatgagcagaaactgtttccctacgaagagcacttggagatggcaatgctgaatctcaccctgtaggactcacacacgactccaacgggattgtgagaatcaagtcactctcatgggaagaatttttatatgggaaagcggataaaactttcattggactggaatgtttggagaatgttaatttccaaatcaggaaccacaaactgccctctaataagacatcggctatctaagcgtgtgggtgccccctttctgccagcagttctggttcttaagaaaatcaccataaatcagacatgaaaattctggctccaaaaatagcattttctttgtgc

SEQ ID NO: 130922 - DNA, 1652 bp, Homo sapiens
  Payload ID: 5578
  Gene Symbol: EEF2KMT
  Gene Name: eukaryotic elongation factor 2 lysine methyltransferase
  ENST ID: ENST00000585436
  CDS Start-End: 16-237
ggccccgcccacgtcatggcgcccgaggagaacgcggggaccgaactcttgctgcagagtttcgagcgccgcttcctggcggcacgcacactgcgctccttcccctggcagagcttagaagcaaagttaagagactcatcagattctgagctgctgcgggatattttgcacaaggtaagaatcccagagtccctgggactcatgaccctgcctcctgaatctctccagaagacctgagagaagaactgcagcacgaggctgtccacacagagcctttggacgagctgtatgaagcgctggcggagaccctgatggccaaggagtccacccagggccaccggagctatttgctgccctcgggaggctcggtcacactctccgagagcacggccatcatctcctacggtaccacaggcctggtcacatgggacgccgccctctaccttgcagaatgggccatcgagaacccggcagtcttcactaacagatgtgctgtattgcccagaagccatcatgtcgctggtcggggtcctgcggaggctggctgcctgccgggagcaccagcgggctcctgaggtctacgtggcctttaccgtccgcaacccagagacgtgccagctgttcaccaccgagctaggccgggccgggatcagatgggaagtggaacctcgtcatgagcagaaactgtttccctacgaagagcacttggagatggcaatgctgaatctcaccctgtaggactcacacacgactccaacgggattgtgagaatcaagtcactctcatgggaagaatttttatatgggaaagcggataaaactttcattggactggaatgtttggagaatgttaatttccaaatcaggaaccacaaactgccctctaataagacatcggctatctaagcgtgtgggtgccccctttctgccagcagttctggttcttaagaaaatcaccataaatcagacatgaaaattctggctccaaaaatagcattttctttgtgcaaataaaaacgtgtgtatcaagtatgatgttcccccaacgtggacacactcagttcctcacaaagccaagcccactgcagctgccacatccctgggcttacggtgcagcaggtgcttttttcaagacaggaatcaaaatgttaggaacacggcagaaaggggacacctggagaccaaacgcaggatgaggagttctgcagaggtcacagggaagtcacagaacagtaatacgctagcaggggcatggggcgtgaagaacagaagaagagaggaagcgtttccaagcctccagagaagaaatcaaggccaaccaaagcttcccgggtcacagaaccaattcttttaccaggcagtaccactgctgtcatttcagcttctggccactgggaggtgctgctcgaaagggtttgccctgagactccaagaagaagctgcgggaaggacagcaggggtcctggggttttagcctctggcccaggagttatgtgtccataaccaaagggagcacagtctgcacccagctctcatcccatcggagctgctgcgactcccgcaggttcttccggaactggtttagcttgcccgcaggatcaggaaagtttgagaaaagcatctgcaaaaaaataaagagcagagcttacctca

SEQ ID NO: 130923 - DNA, 684 bp, Homo sapiens
  Payload ID: 5578
  Gene Symbol: EEF2KMT
  Gene Name: eukaryotic elongation factor 2 lysine methyltransferase
  ENST ID: ENST00000587200
  CDS Start-End: 36-257
cggtctgccggcaacgctgcggccccgcccacgtcatggcgcccgaggagaacgcggggaccgaactcttgctgcagagtttcgagcgccgcttcctggcggcacgcacactgcgctccttcccctggcagagcttagaagcaaagttaagagactcatcagattctgagctgctgcgggatattttgcacaaggtaagaatcccagagtccctgggactcatgaccctgcctcctgaatctctccagaagacctgagagaagaactgcagattagaacgaaagcaaacaagctctcactctgtctgcccccagcacgaggctgtccacacagagcctttggacgagctgtatgaagcgctggcggagaccctgatggccaaggagtccacccagggccaccggagctatttgctgatgtgctgtattgcccagaagccatcatgtcgctggtcggggtcctgcggaggctggctgcctgccgggagcaccagcgggctcctgaggtctacgtggcctttaccgtccgcaacccagagacgtgccagctgttcaccaccgagctaggccgggccgggatcagatgggaagtggaacctcgtcatgagcagaaactgtttccctacgaagagcacttggagatggcaatgctgaatctcaccctgtaggactcacacacgactcc

SEQ ID NO: 130924 - DNA, 873 bp, Homo sapiens
  Payload ID: 5578
  Gene Symbol: EEF2KMT
  Gene Name: eukaryotic elongation factor 2 lysine methyltransferase
  ENST ID: ENST00000587133
  CDS Start-End: 4-813
gtcatggcgcccgaggagaacgcggggaccgaactcttgctgcagagtttcgagcgccgcttcctggcggcacgcacactgcgctccttcccctggcagagcttagaagcaaagttaagagactcatcagattctgagctgctgcgggatattttgcacaagccctcgggaggctcggtcacactctccgagagcacggccatcatctcctacggtaccacaggcctggtcacatgggacgccgccctctaccttgcagaatgggccatcgagaacccggcagtcttcactaacaggactgtcctagagcttggcagtggtgctggcctcacaggcctggccatctgcaagatgtgccgcccccgggcatacatcttcagcgactgtcacagccgggtccttgagcagctccgagggaatgtccttctcaatggcctctcattagaggcagacatcactgccaagttagacagccccagggtgacagtggcccagctggactgggacgtcgcgacggtccatcagctctctgccttccagccagatgttgtcattgcagcagatgtgctgtattgcccagaagccatcatgtcgctggtcggggtcctgcggaggctggctgcctgccgggagcaccagcgggctcctgaggtctacgtggcctttaccgtccgcaacccagagacgtgccagctgttcaccaccgagctaggccgggccgggatcagatgggaagtggaacctcgtcatgagcagaaactgtttccctacgaagagcacttggagatggcaatgctgaatctcaccctgtaggactcacacacgactccaacgggattgtgagaatcaagtcactctcatgggaagaatttt

SEQ ID NO: 130925 - DNA, 2232 bp, Homo sapiens
  Payload ID: 5579
  Gene Symbol: EEFSEC
  Gene Name: eukaryotic elongation factor, selenocysteine-tRNA-specific
  Uniprot ID: P57772
  ENST ID: ENST00000254730
  CDS Start-End: 55-1845
taccgagggaggtgaggggcgggccgggcgggtgtccgaggcggcggcggcggcatggcagggcggcgggtgaacgtgaacgtgggcgtgctgggccacatcgacagcggcaagacggcgctggcgcgggcgctaagcaccacagcctccaccgccgcctttgacaagcagccgcagagccgcgagcgcggcatcacgctcgatctgggcttctcgtgcttctcggtgccgctgcccgcgcgcctgcggtcgtctttgcccgagttccaggcagcgcccgaggccgagcccgagcccggcgagccactgcttcaggtcacgctggtcgactgccccgggcacgcctccctcatccggaccatcatcggcggggcccagatcattgatctgatgatgctggtcatcgatgtgaccaaggggatgcagacccagtcagcggaatgccttgtgatcggccagattgcctgccagaagctggtcgtggtgctgaacaaaatagacctcttacctgaaggaaagagacaggcagcaattgataaaatgaccaagaaaatgcagaagaccctagagaacaccaagttccgaggtgcaccgattatacccgtggcggccaagccggggggaccagaggcccccgaaactgaagctccacagggcattccagagctcattgagctcctgacgtcccagatttccatcccaacgagagatccctcgggaccgttcctcatgtctgtggaccactgtttctccatcaaaggccaaggcactgtgatgacagggaccatcctttcaggctccatcagcctcggtgacagtgtggagatccctgccctcaaggtggtgaagaaggtgaagtccatgcagatgttccacatgcccatcacttcagccatgcaaggagaccggctgggcatctgcgtcacccagtttgaccctaagctgctggagcgcgggttggtgtgtgcccccgagtccctgcacactgtccatgcggccctcatctctgtggaaaagataccgtatttccgggggcccctgcaaaccaaggccaagttccacattacagtgggccatgaaacagtcatgggccggttgatgttcttcagtcctgctccagataactttgaccaggagcctatactggactctttcaacttctctcaagaataccttttccaggagcagtacctgtccaaggatttgacaccagcagtgacagacaatgatgaggccgacaagaaggccggccaggccacagagggccattgtcctcggcagcagtgggccctggtggagtttgagaagcccgtcacctgccctcggctgtgcctggtgattggctccaggctagatgcggacattcacaccaacacgtgccggctagccttccatggcatcctgctccacgggctagaggacaggaactacgccgacagcttcctgcccaggctgaaggtgtacaagctgaagcacaagcatggccttgtggagcgggcgatggatgactacagtgtgatcggccgctccctgttcaaaaaggaaaccaacatccagctcttcgtggggctcaaggtgcacttgtccactggggaactgggcatcatcgacagtgccttcggccagagcggcaagttcaagatccacatcccaggtggcctcagccccgagtccaagaagatcctgacacccgccctcaagaagcgggcccgggctggccgtggggaggccaccaggcaggaggagagcgccgagcggagcgagccctcacagcatgtggtgctcagcctgactttcaagcgttatgtcttcgacacccacaagcgcatggttcagtctccctgagtgtccggtgacctcccccagggcctccttgcccagcccagtccaggctgctgtgccaaatcccaaccagccacgcctcagcctctcccagtctctccctgcagtcctgcagcagcagcccccacccccaagcttggtgctgagccctggtgaggagctgagggggatgggttgctggggccaggagggtctctcctccagcccctgcacactcccacccaggacagcccccagcccaactaggaaagggccatgggcagagggctggtagccagtatcttccactgccccatctgttggccacctgcaggccagtctcaaccctcccccaggtgggcaggcacttgatggctacaaataaatgtcccgtggccccagcccactcta

SEQ ID NO: 130926 - DNA, 1859 bp, Homo sapiens
  Payload ID: 5579
  Gene Symbol: EEFSEC
  Gene Name: eukaryotic elongation factor, selenocysteine-tRNA-specific
  ENST ID: ENST00000483457
  CDS Start-End: 8-1318
cggcggcatggcagggcggcgggtgaacgtgaacgtgggcgtgctgggccacatcgacagcggcaagacggcgctggcgcgggcgctaagcaccacagcctccaccgccgcctttgacaagcagccgcagagccgcgagcgcggcatcacgctcgatctgggcttctcgtgcttctcggtgccgctgcccgcgcgcctgcggtcgtctttgcccgagttccaggcagcgcccgaggccgagcccgagcccggcgagccactgcttcaggtcacgctggtcgactgccccgggcacgcctccctcatccggaccatcatcggcggggcccagatcattgatctgatgatgctggtcatcgatgtgaccaaggggatgcagacccagtcagcggaatgccttgtgatcggccagattgcctgccagaagctggtcgtggtgctgaacaaaatagacctcttacctgaaggaaagagacaggcagcaattgataaaatgaccaagaaaatgcagaagaccctagagaacaccaagttccgaggtgcaccgattatacccgtggcggccaagccggggggaccagaggcccccgaaactgaagctccacagggcattccagagctcattgaggtggtgaagaaggtgaagtccatgcagatgttccacatgcccatcacttcagccatgcaaggagaccggctgggcatctgcgtcacccagtttgaccctaagctgctggagcgcgggttggtgtgtgcccccgagtccctgcacactgtccatgcggccctcatctctgtggaaaagataccgtatttccgggggcccctgcaaaccaaggccaagttccacattacagtgggccatgaaacagtcatgggccggttgatgttcttcagtcctgctccagataactttgaccaggagcctatactggactctttcaacttctctcaagaataccttttccaggagcagtacctgtccaaggatttgacaccagcagtgacagacaatgatgaggccgacaagaaggccggccaggccacagagggccattgtcctcggcagcagtgggccctggtggagtttgagaagcccgtcacctgccctcggctgtgcctggtgattggctccaggctagatgcggacattcacaccaacacgtgccggctagccttccatggcatcctgctccacgggctagaggacaggaactacgccgacagcttcctgcccaggctgaaggtgtacaagctgaagcacaagcatggccttgtggagcgggtggcctcagccccgagtccaagaagatcctgacacccgccctcaagaagcgggcccgggctggccgtggggaggccaccaggcaggaggagagcgccgagcggagcgagccctcacagcatgtggtgctcagcctgactttcaagcgttatgtcttcgacacccacaagcgcatggttcagtctccctgagtgtccggtgacctcccccagggcctccttgcccagcccagtccaggctgctgtgccaaatcccaaccagccacgcctcagcctctcccagtctctccctgcagtcctgcagcagcagcccccacccccaagcttggtgctgagccctggtgaggagctgagggggatgggttgctggggccaggagggtctctcctccagcccctgcacactcccacccaggacagcccccagcccaactaggaaagggccatgggcagagggctggtagccagtatcttccactgccccatctgttggccacctgcaggccagtctcaaccctcccccaggtgggcaggcacttgatggctacaaataaatgtcccgtggccccagcccac

SEQ ID NO: 130927 - DNA, 1923 bp, Homo sapiens
  Payload ID: 5580
  Gene Symbol: EEF1A1
  Gene Name: eukaryotic translation elongation factor 1 alpha 1
  Uniprot ID: P68104
  ENST ID: ENST00000331523
  CDS Start-End: 246-1634
cgttaaggaggcccccagtcccgacccttcgccccaagcccctcggggtccccgggcctggtactccttgccacacgggaggggcgcggaagccggggcggaggaggagccaaccccgggctgggctgagacccgcagaggaagacgctctagggatttgtcccggactagcgagatggcaaggctgaggacgggaggctgattgagaggcgaaggtgtcgtgaaaactacccctaaaagccaaaatgggaaaggaaaagactcatatcaacattgtcgtcattggacacgtagattcgggcaagtccaccactactggccatctgatctataaatgcggtggcatcgacaaaagaaccattgaaaaatttgagaaggaggctgctgagatgggaaagggctccttcaagtatgcctgggtcttggataaactgaaagctgagcgtgaacgtggtatcaccattgatatctccttgtggaaatttgagaccagcaagtactatgtgactatcattgatgccccaggacacagagactttatcaaaaacatgattacagggacatctcaggctgactgtgctgtcctgattgttgctgctggtgttggtgaatttgaagctggtatctccaagaatgggcagacccgagagcatgcccttctggcttacacactgggtgtgaaacaactaattgtcggtgttaacaaaatggattccactgagccaccctacagccagaagagatatgaggaaattgttaaggaagtcagcacttacattaagaaaattggctacaaccccgacacagtagcatttgtgccaatttctggttggaatggtgacaacatgctggagccaagtgctaacatgccttggttcaagggatggaaagtcacccgtaaggatggcaatgccagtggaaccacgctgcttgaggctctggactgcatcctaccaccaactcgtccaactgacaagcccttgcgcctgcctctccaggatgtctacaaaattggtggtattggtactgttcctgttggccgagtggagactggtgttctcaaacccggtatggtggtcacctttgctccagtcaacgttacaacggaagtaaaatctgtcgaaatgcaccatgaagctttgagtgaagctcttcctggggacaatgtgggcttcaatgtcaagaatgtgtctgtcaaggatgttcgtcgtggcaacgttgctggtgacagcaaaaatgacccaccaatggaagcagctggcttcactgctcaggtgattatcctgaaccatccaggccaaataagcgccggctatgcccctgtattggattgccacacggctcacattgcatgcaagtttgctgagctgaaggaaaagattgatcgccgttctggtaaaaagctggaagatggccctaaattcttgaagtctggtgatgctgccattgttgatatggttcctggcaagcccatgtgtgttgagagcttctcagactatccacctttgggtcgctttgctgttcgtgatatgagacagacagttgcggtgggtgtcatcaaagcagtggacaagaaggctgctggagctggcaaggtcaccaagtctgcccagaaagctcagaaggctaaatgaatattatccctaatacctgccaccccactcttaatcagtggtggaagaacggtctcagaactgtttgtttcaattggccatttaagtttagtagtaaaagactggttaatgataacaatgcatcgtaaaaccttcagaaggaaaggagaatgttttgtggaccactttggttttcttttttgcgtgtggcagttttaagttattagtttttaaaatcagtactttttaatggaaacaacttgaccaaaaatttgtcacagaattttgagacccattaaaaaagttaaat

SEQ ID NO: 130928 - DNA, 2303 bp, Homo sapiens
  Payload ID: 5580
  Gene Symbol: EEF1A1
  Gene Name: eukaryotic translation elongation factor 1 alpha 1
  Uniprot ID: P68104
  ENST ID: ENST00000309268
  CDS Start-End: 620-2008
cgcagaggaagacgctctagggatttgtcccggactagcgagatggcaaggctgaggacgggaggctgattgagaggcgaaggtacaccctaatctcaatacaacctttggagctaagccagcaatggtagagggaagattctgcacgtcccttccaggcggcctccccgtcaccaccccccccaacccgccccgaccggagctgagagtaattcatacaaaaggactcgcccctgccttggggaatcccagggaccgtcgttaaactcccactaacgtagaacccagagatcgctgcgttcccgccccctcacccgcccgctctcgtcatcactgaggtggagaagagcatgcgtgaggctccggtgcccgtcagtgggcagagcgcacatcgcccacagtccccgagaagttggggggaggggtcggcaattgaaccggtgcctagagaaggtggcgcggggtaaactgggaaagtgatgtcgtgtactggctccgcctttttcccgagggtgggggagaaccgtatataagtgcagtagtcgccgtgaacgttctttttcgcaacgggtttgccgccagaacacaggtgtcgtgaaaactacccctaaaagccaaaatgggaaaggaaaagactcatatcaacattgtcgtcattggacacgtagattcgggcaagtccaccactactggccatctgatctataaatgcggtggcatcgacaaaagaaccattgaaaaatttgagaaggaggctgctgagatgggaaagggctccttcaagtatgcctgggtcttggataaactgaaagctgagcgtgaacgtggtatcaccattgatatctccttgtggaaatttgagaccagcaagtactatgtgactatcattgatgccccaggacacagagactttatcaaaaacatgattacagggacatctcaggctgactgtgctgtcctgattgttgctgctggtgttggtgaatttgaagctggtatctccaagaatgggcagacccgagagcatgcccttctggcttacacactgggtgtgaaacaactaattgtcggtgttaacaaaatggattccactgagccaccctacagccagaagagatatgaggaaattgttaaggaagtcagcacttacattaagaaaattggctacaaccccgacacagtagcatttgtgccaatttctggttggaatggtgacaacatgctggagccaagtgctaacatgccttggttcaagggatggaaagtcacccgtaaggatggcaatgccagtggaaccacgctgcttgaggctctggactgcatcctaccaccaactcgtccaactgacaagcccttgcgcctgcctctccaggatgtctacaaaattggtggtattggtactgttcctgttggccgagtggagactggtgttctcaaacccggtatggtggtcacctttgctccagtcaacgttacaacggaagtaaaatctgtcgaaatgcaccatgaagctttgagtgaagctcttcctggggacaatgtgggcttcaatgtcaagaatgtgtctgtcaaggatgttcgtcgtggcaacgttgctggtgacagcaaaaatgacccaccaatggaagcagctggcttcactgctcaggtgattatcctgaaccatccaggccaaataagcgccggctatgcccctgtattggattgccacacggctcacattgcatgcaagtttgctgagctgaaggaaaagattgatcgccgttctggtaaaaagctggaagatggccctaaattcttgaagtctggtgatgctgccattgttgatatggttcctggcaagcccatgtgtgttgagagcttctcagactatccacctttgggtcgctttgctgttcgtgatatgagacagacagttgcggtgggtgtcatcaaagcagtggacaagaaggctgctggagctggcaaggtcaccaagtctgcccagaaagctcagaaggctaaatgaatattatccctaatacctgccaccccactcttaatcagtggtggaagaacggtctcagaactgtttgtttcaattggccatttaagtttagtagtaaaagactggttaatgataacaatgcatcgtaaaaccttcagaaggaaaggagaatgttttgtggaccactttggttttcttttttgcgtgtggcagttttaagttattagtttttaaaatcagtactttttaatggaaacaacttgaccaaaaatttgtcacagaattttgagacccattaaaaaagttaaatgagaaa

SEQ ID NO: 130929 - DNA, 4441 bp, Homo sapiens
  Payload ID: 5580
  Gene Symbol: EEF1A1
  Gene Name: eukaryotic translation elongation factor 1 alpha 1
  Uniprot ID: P68104
  ENST ID: ENST00000316292
  CDS Start-End: 993-2381
gtttgccgccagaacacaggtaagtgccgtgtgtggttcccgcgggcctggcctctttacgggttatggcccttgcgtgccttgaattacttccacgcccctggctgcagtacgtgattcttgatcccgagcttcgggttggaagtgggtgggagagttcgaggccttgcgcttaaggagccccttcgcctcgtgcttgagttgaggcctggcttgggcgctggggccgccgcgtgcgaatctggtggcaccttcgcgcctgtctcgctgctttcgataagtctctagccatttaaaatttttgatgacctgctgcgacgctttttttctggcaagatagtcttgtaaatgcgggccaagatctgcacactggtatttcggtttttggggccgcgggcggcgacggggcccgtgcgtcccagcgcacatgttcggcgaggcggggcctgcgagcgcggccaccgagaatcggacgggggtagtctcaagctggccggcctgctctggtgcctggcctcgcgccgccgtgtatcgccccgccctgggcggcaaggctggcccggtcggcaccagttgcgtgagcggaaagatggccgcttcccggccctgctgcagggagctcaaaatggaggacgcggcgctcgggagagcgggcgggtgagtcacccacacaaaggaaaagggcctttccgtcctcagccgtcgcttcatgtgactccacggagtaccgggcgccgtccaggcacctcgattagttctcgagcttttggagtacgtcgtctttaggttggggggaggggttttatgcgatggagtttccccacactgagtgggtggagactgaagttaggccagcttggcacttgatgtaattctccttggaatttgccctttttgagtttggatcttggttcattctcaagcctcagacagtggttcaaagtttttttcttccatttcaggtgtcgtgaaaactacccctaaaagccaaaatgggaaaggaaaagactcatatcaacattgtcgtcattggacacgtagattcgggcaagtccaccactactggccatctgatctataaatgcggtggcatcgacaaaagaaccattgaaaaatttgagaaggaggctgctgagatgggaaagggctccttcaagtatgcctgggtcttggataaactgaaagctgagcgtgaacgtggtatcaccattgatatctccttgtggaaatttgagaccagcaagtactatgtgactatcattgatgccccaggacacagagactttatcaaaaacatgattacagggacatctcaggctgactgtgctgtcctgattgttgctgctggtgttggtgaatttgaagctggtatctccaagaatgggcagacccgagagcatgcccttctggcttacacactgggtgtgaaacaactaattgtcggtgttaacaaaatggattccactgagccaccctacagccagaagagatatgaggaaattgttaaggaagtcagcacttacattaagaaaattggctacaaccccgacacagtagcatttgtgccaatttctggttggaatggtgacaacatgctggagccaagtgctaacatgccttggttcaagggatggaaagtcacccgtaaggatggcaatgccagtggaaccacgctgcttgaggctctggactgcatcctaccaccaactcgtccaactgacaagcccttgcgcctgcctctccaggatgtctacaaaattggtggtattggtactgttcctgttggccgagtggagactggtgttctcaaacccggtatggtggtcacctttgctccagtcaacgttacaacggaagtaaaatctgtcgaaatgcaccatgaagctttgagtgaagctcttcctggggacaatgtgggcttcaatgtcaagaatgtgtctgtcaaggatgttcgtcgtggcaacgttgctggtgacagcaaaaatgacccaccaatggaagcagctggcttcactgctcaggtgattatcctgaaccatccaggccaaataagcgccggctatgcccctgtattggattgccacacggctcacattgcatgcaagtttgctgagctgaaggaaaagattgatcgccgttctggtaaaaagctggaagatggccctaaattcttgaagtctggtgatgctgccattgttgatatggttcctggcaagcccatgtgtgttgagagcttctcagactatccacctttgggtcgctttgctgttcgtgatatgagacagacagttgcggtgggtgtcatcaaagcagtggacaagaaggctgctggagctggcaaggtcaccaagtctgcccagaaagctcagaaggctaaatgaatattatccctaatacctgccaccccactcttaatcagtggtggaagaacggtctcagaactgtttgtttcaattggccatttaagtttagtagtaaaagactggttaatgataacaatgcatcgtaaaaccttcagaaggaaaggagaatgttttgtggaccactttggttttcttttttgcgtgtggcagttttaagttattagtttttaaaatcagtactttttaatggaaacaacttgaccaaaaatttgtcacagaattttgagacccattaaaaaagttaaatgagaaacctgtgtgttcctttggtcaacaccgagacatttaggtgaaagacatctaattctggttttacgaatctggaaacttcttgaaaatgtaattcttgagttaacacttctgggtggagaatagggttgttttccccccacataattggaaggggaaggaatatcatttaaagctatgggagggttgctttgattacaacactggagagaaatgcagcatgttgctgattgcctgtcactaaaacaggccaaaaactgagtccttgtgttgcatagaaagcttcatgttgctaaaccaatgttaagtgaatctttggaaacaaaatgtttccaaattactgggatgtgcatgttgaaacgtgggttaaaatgactgggcagtgaaagttgactatttgccatgacataagaaataagtgtagtggctagtgtacaccctatgagtggaagggtccattttgaagtcagtggagtaagctttatgccagtttgatggtttcacaagttctattgagtgctattcagaataggaacaaggttctaatagaaaaagatggcaatttgaagtagctataaaattagactaatctacattgcttttctcctgcagagtctaataccttttatgctttgataattagcagtttgtctacttggtcactaggaatgaaactacatggtaataggcttaacaggtgtaatagcccacttactcctgaatctttaagcatttgtgcatttgaaaaatgcttttcgcgatcttcctgctgggattacaggcatgagccactgtgcctgacctcccatatgtaaaagtgtctaaaggtttttttttggttataaaaggaaaatttttgcttaagtttgaaggataggtaaaattaaaggacatgctttctgtttgtgtgatggtttttaaaaattttttttaagatggagttcttgttgcccaggctagaatgcaatggcaaaatctcactgcaatctcctcctcctgggttcaagcaattctcctacttcagcctcccaagtagctgggattacaggcatgtgctaatttggtgtttttaatagagatgaggtttttccatgttggtcaggctggtctcaaactcctgaccttaggtgatcgcctcggcctcctaaagtgctggaattacaggcatgagccaccatgcctggccaggacatgtgttcttaaggacatgctaagcaggagttaaagcagcccaagagataaggcctcttaaagtgactggcaatgtgtattgctcaagattcaaaggtacttgaattggccatagacaagtctgtaatgaagtgttatcgttttccctcatctgagtctgaattagataaaatgccttcccatcagccagtgctctgaggtatcaagtctaaattgaactagagatttttgtccttagtttctttgctatctaatgtttacacaagtaaatagtctaagatttgctggatgacagaaaaaacaggtaaggcctttaatagatggccaatagatgccctgataatgaaagttgacacctgtaagatttaccagtagagaattcttgacatgcaaggaagcaagatttaactgaaaaattgttcccactggaagcaggaatgagtcagtttacttgcatatactgagattgagattaacttcctgtgaaacccagtgtcttagacaactgtggcttgagcaccacctgctggtattcattacaaacttgctcactacaataaatgaattttaagctttaa

SEQ ID NO: 130930 - DNA, 635 bp, Homo sapiens
  Payload ID: 5580
  Gene Symbol: EEF1A1
  Gene Name: eukaryotic translation elongation factor 1 alpha 1
  ENST ID: ENST00000356303
  CDS Start-End: 200-635
gtaggactgagtctattctaaactgaaagcctggacatctggagtaccagggggagatgacgtgttacgggcttccataaaagcagctggctttgaatggaaggagccaagaggccagcacaggagcggattcgtcgctttcacggccatcgagccgaacctctcgcaagtgtcgtgaaaactacccctaaaagccaaaatgggaaaggaaaagactcatatcaacattgtcgtcattggacacgtagattcgggcaagtccaccactactggccatctgatctataaatgcggtggcatcgacaaaagaaccattgaaaaatttgagaaggaggctgctgagatgggaaagggctccttcaagtatgcctgggtcttggataaactgaaagctgagcgtgaacgtggtatcaccattgatatctccttgtggaaatttgagaccagcaagtactatgtgactatcattgatgccccaggacacagagactttatcaaaaacatgattacagggacatctcaggctgactgtgctgtcctgattgttgctgctggtgttggtgaatttgaagctggtatctccaagaatgggcagacccgagagcatgcccttctggcttacacactgggtgtga

SEQ ID NO: 130931 - DNA, 701 bp, Homo sapiens
  Payload ID: 5580
  Gene Symbol: EEF1A1
  Gene Name: eukaryotic translation elongation factor 1 alpha 1
  ENST ID: ENST00000455918
  CDS Start-End: 382-701
ctgacgctgcggaggctcgagcggcgtatccataccacccagctgttcgccgcgggaacccgccggcccgcaggtgacccagcgctggaaaaacgccagcgacgtggcctggcgagctggcgcggggcaaggaccacccgcgcccgccttgccgccccagcctccctccctaggaagcagggtgcgccccggtgcgcgcggggcttccccggaccggcgttccagtccctctccggcttccggcccaccccggccccactgagagcagaaatgtgatctctgccctgagaaaatgctcgtggccagtgactacccctaacgcacaataatatggctccgatgggctcaaaggtgtcgtgaaaactacccctaaaagccaaaatgggaaaggaaaagactcatatcaacattgtcgtcattggacacgtagattcgggcaagtccaccactactggccatctgatctataaatgcggtggcatcgacaaaagaaccattgaaaaatttgagaaggaggctgctgagatgggaaagggctccttcaagtatgcctgggtcttggataaactgaaagctgagcgtgaacgtggtatcaccattgatatctccttgtggaaatttgagaccagcaagtactatgtgactatcattgatgccccaggacacagagactttatcaaaaacatgattacagggacatc

SEQ ID NO: 130932 - DNA, 3508 bp, Homo sapiens
  Payload ID: 5580
  Gene Symbol: EEF1A1
  Gene Name: eukaryotic translation elongation factor 1 alpha 1
  ENST ID: ENST00000615060
  CDS Start-End: 64-1344
ctttttcgcaacgggtttgccgccagaacacaggtgtcgtgaaaactacccctaaaagccaaaatgggaaaggaaaagactcatatcaacattgtcgtcattggacacgtagattcgggcaagtccaccactactggccatctgatctataaatgcggtggcatcgacaaaagaaccattgaaaaatttgagaaggaggctgctgagatgggaaagggctccttcaagtatgcctgggtcttggataaactgaaagctgagcgtgaacgtggtatcaccattgatatctccttgtggaaatttgagaccagcaagtactatgtgactatcattgatgccccaggacacagagactttatcaaaaacatgattacagggacatctcaggctgactgtgctgtcctgattgttgctgctggtgttggtgaatttgaagctggtatctccaagaatgggcagacccgagagcatgcccttctggcttacacactgggtgtgaaacaactaattgtcggtgttaacaaaatggattccactgagccaccctacagccagaagagatatgaggaaattgttaaggaagtcagcacttacattaagaaaattggctacaaccccgacacagtagcatttgtgccaatttctggttggaatggtgacaacatgctggagccaagtgctaacatgccttggttcaagggatggaaagtcacccgtaaggatggcaatgccagtggaaccacgctgcttgaggctctggactgcatcctaccaccaactcgtccaactgacaagcccttgcgcctgcctctccaggatgtctacaaaattggtggtattggtactgttcctgttccgagtggagactggtgttctcccggtatggtggtcacctttgctccagtcaacgttacaacggaagtaaaatctgtcgaaatgcaccatgaagctttgagtgaagctcttcctggggacaatgtgggcttcaatgtcaagaatgtgtctgtcaaggatgttcgtcgtggcaacgttgctggtgacagcaaaaatgacccaccaatggaagcagctggcttcactgctcaggtgattatcctgaaccatccaggccaaataagcgccggctatgcccctgtattggattgccacacggctcacattgcatgcaagtttgctgagctgaaggaaaagattgatcgccgttctggtaaaaagctggaagatggccctaaattcttgaagtctggtgatgctgccattgttgatatggttcctggcaagcccatgtgtgttgagagcttctcagactatccacctttgggtaagtcgctttgctgttcgtgatatgagacagacagttgcggtgggtgtcatcaaagcagtggacaagaaggctgctggagctggcaaggtcaccaagtctgcccagaaagctcagaaggctaaatgaatattatccctaatacctgccaccccactcttaatcagtggtggaagaacggtctcagaactgtttgtttcaattggccatttaagtttagtagtaaaagactggttaatgataacaatgcatcgtaaaaccttcagaaggaaaggagaatgttttgtggaccactttggttttcttttttgcgtgtggcagttttaagttattagtttttaaaatcagtactttttaatggaaacaacttgaccaaaaatttgtcacagaattttgagacccattaaaaaagttaaatgagaaacctgtgtgttcctttggtcaacaccgagacatttaggtgaaagacatctaattctggttttacgaatctggaaacttcttgaaaatgtaattcttgagttaacacttctgggtggagaatagggttgttttccccccacataattggaaggggaaggaatatcatttaaagctatgggagggttgctttgattacaacactggagagaaatgcagcatgttgctgattgcctgtcactaaaacaggccaaaaactgagtccttgtgttgcatagaaagcttcatgttgctaaaccaatgttaagtgaatctttggaaacaaaatgtttccaaattactgggatgtgcatgttgaaacgtgggttaaaatgactgggcagtgaaagttgactatttgccatgacataagaaataagtgtagtggctagtgtacaccctatgagtggaagggtccattttgaagtcagtggagtaagctttatgccagtttgatggtttcacaagttctattgagtgctattcagaataggaacaaggttctaatagaaaaagatggcaatttgaagtagctataaaattagactaatctacattgcttttctcctgcagagtctaataccttttatgctttgataattagcagtttgtctacttggtcactaggaatgaaactacatggtaataggcttaacaggtgtaatagcccacttactcctgaatctttaagcatttgtgcatttgaaaaatgcttttcgcgatcttcctgctgggattacaggcatgagccactgtgcctgacctcccatatgtaaaagtgtctaaaggtttttttttggttataaaaggaaaatttttgcttaagtttgaaggataggtaaaattaaaggacatgctttctgtttgtgtgatggtttttaaaaattttttttaagatggagttcttgttgcccaggctagaatgcaatggcaaaatctcactgcaatctcctcctcctgggttcaagcaattctcctacttcagcctcccaagtagctgggattacaggcatgtgctaatttggtgtttttaatagagatgaggtttttccatgttggtcaggctggtctcaaactcctgaccttaggtgatcgcctcggcctcctaaagtgctggaattacaggcatgagccaccatgcctggccaggacatgtgttcttaaggacatgctaagcaggagttaaagcagcccaagagataaggcctcttaaagtgactggcaatgtgtattgctcaagattcaaaggtacttgaattggccatagacaagtctgtaatgaagtgttatcgttttccctcatctgagtctgaattagataaaatgccttcccatcagccagtgctctgaggtatcaagtctaaattgaactagagatttttgtccttagtttctttgctatctaatgtttacacaagtaaatagtctaagatttgctggatgacagaaaaaacaggtaaggcctttaatagatggccaatagatgccctgataatgaaagttgacacctgtaagatttaccagtagagaattcttgacatgcaaggaagcaagatttaactgaaaaattgttcccactggaagcaggaatgagtcagtttacttgcatatactgagattgagattaacttcctgtgaaacccagtgtcttagacaactgtggcttgagcaccacctgctggtattcattacaaacttgctcactacaataaatgaattttaagcttt

SEQ ID NO: 130933 - DNA, 3447 bp, Homo sapiens
  Payload ID: 5580
  Gene Symbol: EEF1A1
  Gene Name: eukaryotic translation elongation factor 1 alpha 1
  ENST ID: ENST00000610520
  CDS Start-End: 64-1389
ctttttcgcaacgggtttgccgccagaacacaggtgtcgtgaaaactacccctaaaagccaaaatgggaaaggaaaagactcatatcaacattgtcgtcattggacacgtagattcgggcaagtccaccactactggccatctgatctataaatgcggtggcatcgacaaaagaaccattgaaaaatttgagaaggaggctgctgagatgggaaagggctccttcaagtatgcctgggtcttggataaactgaaagctgagcgtgaacgtggtatcaccattgatatctccttgtggaaatttgagaccagcaagtactatgtgactatcattgatgccccaggacacagagactttatcaaaaacatgattacagggacatctcaggctgactgtgctgtcctgattgttgctgctggtgttggtgaatttgaagctggtatctccaagaatgggcagacccgagagcatgcccttctggcttacacccagaagagatatgaggaaattgttaaggaagtcagcacttacattaagaaaattggctacaaccccgacacagtagcatttgtgccaatttctggttggaatggtgacaacatgctggagccaagtgctaacatgccttggttcaagggatggaaagtcacccgtaaggatggcaatgccagtggaaccacgctgcttgaggctctggactgcatcctaccaccaactcgtccaactgacaagcccttgcgcctgcctctccaggatgtctacaaaattggtggtattggtactgttcctgttggccgagtggagactggtgttctcaaacccggtatggtggtcacctttgctccagtcaacgttacaacggaagtaaaatctgtcgaaatgcaccatgaagctttgagtgaagctcttcctggggacaatgtgggcttcaatgtcaagaatgtgtctgtcaaggatgttcgtcgtggcaacgttgctggtgacagcaaaaatgacccaccaatggaagcagctggcttcactgctcaggtgattatcctgaaccatccaggccaaataagcgccggctatgcccctgtattggattgccacacggctcacattgcatgcaagtttgctgagctgaaggaaaagattgatcgccgttctggtaaaaagctggaagatggccctaaattcttgaagtctggtgatgctgccattgttgatatggttcctggcaagcccatgtgtgttgagagcttctcagactatccacctttgggtcgctttgctgttcgtgatatgagacagacagttgcggtgggtgtcatcaaagcagtggacaagaaggctgctggagctggcaaggtcaccaagtctgcccagaaagctcagaaggctaaatgaatattatccctaatacctgccaccccactcttaatcagtggtggaagaacggtctcagaactgtttgtttcaattggccatttaagtttagtagtaaaagactggttaatgataacaatgcatcgtaaaaccttcagaaggaaaggagaatgttttgtggaccactttggttttcttttttgcgtgtggcagttttaagttattagtttttaaaatcagtactttttaatggaaacaacttgaccaaaaatttgtcacagaattttgagacccattaaaaaagttaaatgagaaacctgtgtgttcctttggtcaacaccgagacatttaggtgaaagacatctaattctggttttacgaatctggaaacttcttgaaaatgtaattcttgagttaacacttctgggtggagaatagggttgttttccccccacataattggaaggggaaggaatatcatttaaagctatgggagggttgctttgattacaacactggagagaaatgcagcatgttgctgattgcctgtcactaaaacaggccaaaaactgagtccttgtgttgcatagaaagcttcatgttgctaaaccaatgttaagtgaatctttggaaacaaaatgtttccaaattactgggatgtgcatgttgaaacgtgggttaaaatgactgggcagtgaaagttgactatttgccatgacataagaaataagtgtagtggctagtgtacaccctatgagtggaagggtccattttgaagtcagtggagtaagctttatgccagtttgatggtttcacaagttctattgagtgctattcagaataggaacaaggttctaatagaaaaagatggcaatttgaagtagctataaaattagactaatctacattgcttttctcctgcagagtctaataccttttatgctttgataattagcagtttgtctacttggtcactaggaatgaaactacatggtaataggcttaacaggtgtaatagcccacttactcctgaatctttaagcatttgtgcatttgaaaaatgcttttcgcgatcttcctgctgggattacaggcatgagccactgtgcctgacctcccatatgtaaaagtgtctaaaggtttttttttggttataaaaggaaaatttttgcttaagtttgaaggataggtaaaattaaaggacatgctttctgtttgtgtgatggtttttaaaaattttttttaagatggagttcttgttgcccaggctagaatgcaatggcaaaatctcactgcaatctcctcctcctgggttcaagcaattctcctacttcagcctcccaagtagctgggattacaggcatgtgctaatttggtgtttttaatagagatgaggtttttccatgttggtcaggctggtctcaaactcctgaccttaggtgatcgcctcggcctcctaaagtgctggaattacaggcatgagccaccatgcctggccaggacatgtgttcttaaggacatgctaagcaggagttaaagcagcccaagagataaggcctcttaaagtgactggcaatgtgtattgctcaagattcaaaggtacttgaattggccatagacaagtctgtaatgaagtgttatcgttttccctcatctgagtctgaattagataaaatgccttcccatcagccagtgctctgaggtatcaagtctaaattgaactagagatttttgtccttagtttctttgctatctaatgtttacacaagtaaatagtctaagatttgctggatgacagaaaaaacaggtaaggcctttaatagatggccaatagatgccctgataatgaaagttgacacctgtaagatttaccagtagagaattcttgacatgcaaggaagcaagatttaactgaaaaattgttcccactggaagcaggaatgagtcagtttacttgcatatactgagattgagattaacttcctgtgaaacccagtgtcttagacaactgtggcttgagcaccacctgctggtattcattacaaacttgctcactacaataaatgaattttaagcttt

SEQ ID NO: 130934 - DNA, 2006 bp, Homo sapiens
  Payload ID: 5581
  Gene Symbol: EEF1A2
  Gene Name: eukaryotic translation elongation factor 1 alpha 2
  Uniprot ID: Q05639
  ENST ID: ENST00000217182
  CDS Start-End: 330-1721
gccccgcccccgcccgcggcgcgtttctcccccgcctcccgcgtccgtctttgcagcccgcgcctcccgcatcgcctcgcgtccccgtggcgcccgcccgcgcgcgtccgcgccccgccccctcccgcgcggttccgcattggcgtgctgcagggcgcggtgcactgcgccgccaccgtcaataggtggaccccctcccggagataaaaccgccggcgccggcgccgccagtccctctggctgagacctcggctccggaatcactgcagcccccctcgccctgagccagagcaccccgggtcccgccagcccctcacactcccagcaaaatgggcaaggagaagacccacatcaacatcgtggtcatcggccacgtggactccggaaagtccaccaccacgggccacctcatctacaaatgcggaggtattgacaaaaggaccattgagaagttcgagaaggaggcggctgagatggggaagggatccttcaagtatgcctgggtgctggacaagctgaaggcggagcgtgagcgcggcatcaccatcgacatctccctctggaagttcgagaccaccaagtactacatcaccatcatcgatgcccccggccaccgcgacttcatcaagaacatgatcacgggtacatcccaggcggactgcgcagtgctgatcgtggcggcgggcgtgggcgagttcgaggcgggcatctccaagaatgggcagacgcgggagcatgccctgctggcctacacgctgggtgtgaagcagctcatcgtgggcgtgaacaaaatggactccacagagccggcctacagcgagaagcgctacgacgagatcgtcaaggaagtcagcgcctacatcaagaagatcggctacaacccggccaccgtgccctttgtgcccatctccggctggcacggtgacaacatgctggagccctcccccaacatgccgtggttcaagggctggaaggtggagcgtaaggagggcaacgcaagcggcgtgtccctgctggaggccctggacaccatcctgccccccacgcgccccacggacaagcccctgcgcctgccgctgcaggacgtgtacaagattggcggcattggcacggtgcccgtgggccgggtggagaccggcatcctgcggccgggcatggtggtgacctttgcgccagtgaacatcaccactgaggtgaagtcagtggagatgcaccacgaggctctgagcgaagctctgcccggcgacaacgtcggcttcaatgtgaagaacgtgtcggtgaaggacatccggcggggcaacgtgtgtggggacagcaagtctgacccgccgcaggaggctgctcagttcacctcccaggtcatcatcctgaaccacccggggcagattagcgccggctactccccggtcatcgactgccacacagcccacatcgcctgcaagtttgcggagctgaaggagaagattgaccggcgctctggcaagaagctggaggacaaccccaagtccctgaagtctggagacgcggccatcgtggagatggtgccgggaaagcccatgtgtgtggagagcttctcccagtacccgcctctcggccgcttcgccgtgcgcgacatgaggcagacggtggccgtaggcgtcatcaagaacgtggagaagaagagcggcggcgccggcaaggtcaccaagtcggcgcagaaggcgcagaaggcgggcaagtgaagcgcgggcgcccgcggcgcgaccctccccggcggtgccgcgctccgaaccccgggcccgggcccccgccccgcccccgccccgcgcgccggtccggcgccccgcacccccgccaggcgcatgtctgcacctccgcttgccagaggccctcggtcagcgactggatgctcgccatcaaggtccagtggaagttcttcaagaggaaaggcgcccccgccccaggcttccgcgcccagcgctcgccacgctcagtgcccgttttaccaataaactgagcgaccccag

SEQ ID NO: 130935 - DNA, 1748 bp, Homo sapiens
  Payload ID: 5581
  Gene Symbol: EEF1A2
  Gene Name: eukaryotic translation elongation factor 1 alpha 2
  Uniprot ID: Q05639
  ENST ID: ENST00000298049
  CDS Start-End: 72-1463
aatcactgcagcccccctcgccctgagccagagcaccccgggtcccgccagcccctcacactcccagcaaaatgggcaaggagaagacccacatcaacatcgtggtcatcggccacgtggactccggaaagtccaccaccacgggccacctcatctacaaatgcggaggtattgacaaaaggaccattgagaagttcgagaaggaggcggctgagatggggaagggatccttcaagtatgcctgggtgctggacaagctgaaggcggagcgtgagcgcggcatcaccatcgacatctccctctggaagttcgagaccaccaagtactacatcaccatcatcgatgcccccggccaccgcgacttcatcaagaacatgatcacgggtacatcccaggcggactgcgcagtgctgatcgtggcggcgggcgtgggcgagttcgaggcgggcatctccaagaatgggcagacgcgggagcatgccctgctggcctacacgctgggtgtgaagcagctcatcgtgggcgtgaacaaaatggactccacagagccggcctacagcgagaagcgctacgacgagatcgtcaaggaagtcagcgcctacatcaagaagatcggctacaacccggccaccgtgccctttgtgcccatctccggctggcacggtgacaacatgctggagccctcccccaacatgccgtggttcaagggctggaaggtggagcgtaaggagggcaacgcaagcggcgtgtccctgctggaggccctggacaccatcctgccccccacgcgccccacggacaagcccctgcgcctgccgctgcaggacgtgtacaagattggcggcattggcacggtgcccgtgggccgggtggagaccggcatcctgcggccgggcatggtggtgacctttgcgccagtgaacatcaccactgaggtgaagtcagtggagatgcaccacgaggctctgagcgaagctctgcccggcgacaacgtcggcttcaatgtgaagaacgtgtcggtgaaggacatccggcggggcaacgtgtgtggggacagcaagtctgacccgccgcaggaggctgctcagttcacctcccaggtcatcatcctgaaccacccggggcagattagcgccggctactccccggtcatcgactgccacacagcccacatcgcctgcaagtttgcggagctgaaggagaagattgaccggcgctctggcaagaagctggaggacaaccccaagtccctgaagtctggagacgcggccatcgtggagatggtgccgggaaagcccatgtgtgtggagagcttctcccagtacccgcctctcggccgcttcgccgtgcgcgacatgaggcagacggtggccgtaggcgtcatcaagaacgtggagaagaagagcggcggcgccggcaaggtcaccaagtcggcgcagaaggcgcagaaggcgggcaagtgaagcgcgggcgcccgcggcgcgaccctccccggcggtgccgcgctccgaaccccgggcccgggcccccgccccgcccccgccccgcgcgccggtccggcgccccgcacccccgccaggcgcatgtctgcacctccgcttgccagaggccctcggtcagcgactggatgctcgccatcaaggtccagtggaagttcttcaagaggaaaggcgcccccgccccaggcttccgcgcccagcgctcgccacgctcagtgcccgttttaccaataaactgagcgaccccag

SEQ ID NO: 130936 - DNA, 844 bp, Homo sapiens
  Payload ID: 5582
  Gene Symbol: EEF1B2
  Gene Name: eukaryotic translation elongation factor 1 beta 2
  Uniprot ID: P24534
  ENST ID: ENST00000236957
  CDS Start-End: 122-799
cgcagttccgccggaagtggccccagcctcgaggccgggcgtcttcggtcatctccggcgcttctagggctggttcccgtcatcttcgggagccgtggagctctcggatacagccgacaccatgggtttcggagacctgaaaagccctgccggcctccaggtgctcaacgattacctggcggacaagagctacatcgaggggtatgtgccatcacaagcagatgtggcagtatttgaagccgtgtccagcccaccgcctgccgacttgtgtcatgccctacgttggtataatcacatcaagtcttacgaaaaggaaaaggccagcctgccaggagtgaagaaagctttgggcaaatatggtcctgccgatgtggaagacactacaggaagtggagctacagatagtaaagatgatgatgacattgacctctttggatctgatgatgaggaggaaagtgaagaagcaaagaggctaagggaagaacgtcttgcacaatatgaatcaaagaaagccaaaaaacctgcacttgttgccaagtcttccatcttactagatgtgaaaccttgggatgatgagacagatatggcgaaattagaggagtgcgtcagaagcattcaagcagacggcttagtctggggctcatctaaactagttccagtgggatacggaattaagaaacttcaaatacagtgtgtagttgaagatgataaagttggaacagatatgctggaggagcagatcactgcttttgaggactatgtgcagtccatggatgtggctgctttcaacaagatctaaaatccatcctggatcatggcatttaaataaaagattgaaagatta

SEQ ID NO: 130937 - DNA, 880 bp, Homo sapiens
  Payload ID: 5582
  Gene Symbol: EEF1B2
  Gene Name: eukaryotic translation elongation factor 1 beta 2
  Uniprot ID: P24534
  ENST ID: ENST00000392221
  CDS Start-End: 159-836
gccggaagtggccccagcctcgaggccgggcgtcttcggtcatctccggcgcttctagggctggttcccgtcatcttcgggagccgtggagcgtggggcgcccacaatttgcgcgctctctttctgctgctccccagctctcggatacagccgacaccatgggtttcggagacctgaaaagccctgccggcctccaggtgctcaacgattacctggcggacaagagctacatcgaggggtatgtgccatcacaagcagatgtggcagtatttgaagccgtgtccagcccaccgcctgccgacttgtgtcatgccctacgttggtataatcacatcaagtcttacgaaaaggaaaaggccagcctgccaggagtgaagaaagctttgggcaaatatggtcctgccgatgtggaagacactacaggaagtggagctacagatagtaaagatgatgatgacattgacctctttggatctgatgatgaggaggaaagtgaagaagcaaagaggctaagggaagaacgtcttgcacaatatgaatcaaagaaagccaaaaaacctgcacttgttgccaagtcttccatcttactagatgtgaaaccttgggatgatgagacagatatggcgaaattagaggagtgcgtcagaagcattcaagcagacggcttagtctggggctcatctaaactagttccagtgggatacggaattaagaaacttcaaatacagtgtgtagttgaagatgataaagttggaacagatatgctggaggagcagatcactgcttttgaggactatgtgcagtccatggatgtggctgctttcaacaagatctaaaatccatcctggatcatggcatttaaataaaagattgaaagatt

SEQ ID NO: 130938 - DNA, 1098 bp, Homo sapiens
  Payload ID: 5582
  Gene Symbol: EEF1B2
  Gene Name: eukaryotic translation elongation factor 1 beta 2
  Uniprot ID: P24534
  ENST ID: ENST00000392222
  CDS Start-End: 376-1053
ccccagcctcgaggccgggcgtcttcggtcatctccggcgcttctagggctggttcccgtcatcttcgggagccgtggaggtacgaacttaagacatgcctattttattaatttacttccaaacgcaacgaaaggtccatggacaatttgtgggccatttaattcagggcccccaattcgtacgtggagaagtgggaatgcaaaagtactttgacctttaaccttcggtccggcgcggtggagggaaacgcctccgtctctatataaggaattttccggtctcttcgggtcctttttcctctcttcagcgtggggcgcccacaatttgcgcgctctctttctgctgctccccagctctcggatacagccgacaccatgggtttcggagacctgaaaagccctgccggcctccaggtgctcaacgattacctggcggacaagagctacatcgaggggtatgtgccatcacaagcagatgtggcagtatttgaagccgtgtccagcccaccgcctgccgacttgtgtcatgccctacgttggtataatcacatcaagtcttacgaaaaggaaaaggccagcctgccaggagtgaagaaagctttgggcaaatatggtcctgccgatgtggaagacactacaggaagtggagctacagatagtaaagatgatgatgacattgacctctttggatctgatgatgaggaggaaagtgaagaagcaaagaggctaagggaagaacgtcttgcacaatatgaatcaaagaaagccaaaaaacctgcacttgttgccaagtcttccatcttactagatgtgaaaccttgggatgatgagacagatatggcgaaattagaggagtgcgtcagaagcattcaagcagacggcttagtctggggctcatctaaactagttccagtgggatacggaattaagaaacttcaaatacagtgtgtagttgaagatgataaagttggaacagatatgctggaggagcagatcactgcttttgaggactatgtgcagtccatggatgtggctgctttcaacaagatctaaaatccatcctggatcatggcatttaaataaaagattgaaagatta

SEQ ID NO: 130939 - DNA, 670 bp, Homo sapiens
  Payload ID: 5582
  Gene Symbol: EEF1B2
  Gene Name: eukaryotic translation elongation factor 1 beta 2
  ENST ID: ENST00000455150
  CDS Start-End: 47-253
gcgctctctttctgctgctccccagctctcggatacagccgacaccatgggtttcggagacctgaaaagccctgccggcctccaggtgtgtgtgaatgtttctgtgtccttggcaggtatgtgccatcacaagcagatgtggcagtatttgaagccgtgtccagcccaccgcctgccgacttgtgtcatgccctacgttggtataatcacatcaagtcttacgaaaaggaaaaggccagcctgccaggagtgaagaaagctttgggcaaatatggtcctgccgatgtggaagacactacaggaagtggagctacagatagtaaagatgatgatgacattgacctctttggatctgatgatgaggaggaaagtgaagaagcaaagaggctaagggaagaacgtcttgcacaatatgaatcaaagaaagccaaaaaacctgcacttgttgccaagtcttccatcttactagatgtgaaaccttgggatgatgagacagatatggcgaaattagaggagtgcgtcagaagcattcaagcagacggcttagtctggggctcatctaaactagttccagtgggatacggaattaagaaacttcaaatacagtgtgtagttgaagatgataaagttggaacagatatgctggaggagcagatcactgcttttgagg

SEQ ID NO: 130940 - DNA, 649 bp, Homo sapiens
  Payload ID: 5582
  Gene Symbol: EEF1B2
  Gene Name: eukaryotic translation elongation factor 1 beta 2
  ENST ID: ENST00000415904
  CDS Start-End: 54-260
aatttgcgcgctctctttctgctgctccccagctctcggatacagccgacaccatgggtttcggagacctgaaaagccctgccggcctccaggtgctcaacgattacctggcggacaagagctacatcgaggggtatgtgccatcacaagcagatgtggcagtatttgaagccgtgtccagcccaccgcctgccgacttgtgtcatgccctacgttggtataatcacatcaagtcttacgaaaaggaaaaggccaggtagaacatggacagcagcaattcaacttttccccacactgccctgccaatgtgcctcgaccttgacctggggggcccacctctggggtgagagggtggctcattcattcagtccttggccattcttctgaaactgccaacaagggtggaagtttggggaagtggactccagttcactaagaatggaactgagcatacttaatgaaatctcaaacagaaatgttcatactgaaagagtaaatcatatggttgaatttaaatgtttttcaagcctgccaggagtgaagaaagctttgggcaaatatggtcctgccgatgtggaagacactacaggaagtggagctacagatagtaaagatgatgatgacattgacctctttggatctgatgatg

SEQ ID NO: 130941 - DNA, 912 bp, Homo sapiens
  Payload ID: 5582
  Gene Symbol: EEF1B2
  Gene Name: eukaryotic translation elongation factor 1 beta 2
  ENST ID: ENST00000429769
  CDS Start-End: 71-277
tctccggcgcttctagggctggttcccgtcatcttcgggagccgtggagctctcggatacagccgacaccatgggtttcggagacctgaaaagccctgccggcctccaggtgctcaacgattacctggcggacaagagctacatcgaggggtatgtgccatcacaagcagatgtggcagtatttgaagccgtgtccagcccaccgcctgccgacttgtgtcatgccctacgttggtataatcacatcaagtcttacgaaaaggaaaaggccaggtagaacatggacagcagcaattcaacttttccccacactgccctgccaatgtgcctcgaccttgacctggggggcccacctctggggtgagagggtggctcattcattcagtccttggccattcttctgaaactgccaacaagggtggaagtttggggaagtggactccagttcactaagaatggaactgagcatacttaatgaaatctcaaacagaaatgttcatactgaaagagtaaatcatacctgccaggagtgaagaaagctttgggcaaatatggtcctgccgatgtggaagacactacaggaagtggagctacagatagtaaagatgatgatgacattgacctctttggatctgatgatgaggaggaaagtgaagaagcaaagaggctaagggaagaacgtcttgcacaatatgaatcaaagaaagccaaaaaacctgcacttgttgccaagtcttccatcttactagatgtgaaaccttgggatgatgagacagatatggcgaaattagaggagtgcgtcagaagcattcaagcagacggcttagtctggggctcatctaaactagttccagtgggatacggaattaagaaacttcaaatacagtgtgtagttgaagatgataaagttgg

SEQ ID NO: 130942 - DNA, 389 bp, Homo sapiens
  Payload ID: 5582
  Gene Symbol: EEF1B2
  Gene Name: eukaryotic translation elongation factor 1 beta 2
  ENST ID: ENST00000435123
  CDS Start-End: 47-136
gcgctctctttctgctgctccccagctctcggatacagccgacaccatgggtttcggagacctgaaaagccctgccggcctccaggtgctcaacgattacctggcggacaagagctacatcgaggggtgtgtgtgaatgtttctgtgtccttggcaggtatgtgccatcacaagcagatgtggcagtatttgaagccgtgtccagcccaccgcctgccgacttgtgtcatgccctacgttggtataatcacatcaagtcttacgaaaaggaaaaggccagcctgccaggagtgaagaaagctttgggcaaatatggtcctgccgatgtggaagacactacaggaagtggagctacagatagtaaagatgatgatgacattgacctcttt

SEQ ID NO: 130943 - DNA, 515 bp, Homo sapiens
  Payload ID: 5582
  Gene Symbol: EEF1B2
  Gene Name: eukaryotic translation elongation factor 1 beta 2
  ENST ID: ENST00000445505
  CDS Start-End: 146-515
ccagcctcgaggccgggcgtcttcggtcatctccggcgcttctagggctggttcccgtcatcttcgggagccgtggagcgtggggcgcccacaatttgcgcgctctctttctgctgctccccagctctcggatacagccgacaccatgggtttcggagacctgaaaagccctgccggcctccaggtgctcaacgattacctggcggacaagagctacatcgaggggtatgtgccatcacaagcagatgtggcagtatttgaagccgtgtccagcccaccgcctgccgacttgtgtcatgccctacgttggtataatcacatcaagtcttacgaaaaggaaaaggccagcctgccaggagtgaagaaagctttgggcaaatatggtcctgccgatgtggaagacactacaggaagtggagctacagatagtaaagatgatgatgacattgacctctttggatctgatgatgaggaggaaagtgaagaagcaaagaggctaagggaagaacgtcttg

SEQ ID NO: 130944 - DNA, 1458 bp, Homo sapiens
  Payload ID: 5583
  Gene Symbol: EEF1D
  Gene Name: eukaryotic translation elongation factor 1 delta (guanine nucleotide exchange protein)
  Uniprot ID: P29692
  ENST ID: ENST00000317198
  CDS Start-End: 518-1363
gccgattcctcctccttggtcgccgcgtccttggctggcgtgtgagtaccgcggcccccgccggaaggagtcgggcgcgacagagacgcccgaggggccgggagggcgggcggcccgggctgcgccagaagctcgcgccgttagggactgaggcacaagtgcgccagcgcgggcttaggggccgtgggccaagtgcggcacttggggcgagcgcagagaggcggggcgacggaggccacgtggccggcttggagggcgtccgcgggacgggggcgccgggagcactgtctcacggcgcatcccggtcgtggaagcccctcggccaggctgctggggcctaaggcctgtgtttgctgccgtctccgtgggagaccagacatctgccccagctgtttctctggcctgcagaccttcgtacaccacgtctttgtcaagcaccagttactgcacgcatcagctgagcacggaggggataggcacggacgcaacacttttggaacttagacgctacagaaaaatggctacaaacttcctagcacatgagaagatctggttcgacaagttcaaatatgacgacgcagaaaggagattctacgagcagatgaacgggcctgtggcaggtgcctcccgccaggagaacggcgccagcgtgatcctccgtgacattgcgagagccagagagaacatccagaaatccctggctggaagctcaggccccggggcctccagcggcaccagcggagaccacggtgagctcgtcgtccggattgccagtctggaagtggagaaccagagtctgcgtggcgtggtacaggagctgcagcaggccatctccaagctggaggcccggctgaacgtgctggagaagagctcgcctggccaccgggccacggccccacagacccagcacgtatctcccatgcgccaagtggagcccccagccaagaagccagccacaccagcagaggatgacgaggatgatgacattgacctgtttggcagtgacaatgaggaggaggacaaggaggcggcacagctgcgggaggagcggctacggcagtacgcggagaagaaggccaagaagcctgcactggtggccaagtcctccatcctgctggatgtcaagccttgggatgatgagacggacatggcccagctggaggcctgtgtgcgctctatccagctggacgggctggtctggggggcttccaagctggtgcccgtgggctacggtatccggaagctacagattcagtgtgtggtggaggacgacaaggtggggacagacttgctggaggaggagatcaccaagtttgaggagcacgtgcagagtgtcgatatcgcagctttcaacaagatctgaagcctgagtgtgtgtacgtgcgcgcgtgcgtgaggccctgccacgattaaagactgagaccggccctctggctccgtcctggtcatttcctgctc

SEQ ID NO: 130945 - DNA, 1249 bp, Homo sapiens
  Payload ID: 5583
  Gene Symbol: EEF1D
  Gene Name: eukaryotic translation elongation factor 1 delta (guanine nucleotide exchange protein)
  Uniprot ID: P29692
  ENST ID: ENST00000395119
  CDS Start-End: 340-1185
cggcgacaccactggccgcgaagcgcagggggggcgcgcgcgctgccgcccgttcccagcacttgtgcagactcctccggggaagagcggcctccgcggtcatctccaacggaattctgcctttgaagtgtcggggcacggcgcgtcgagggtcctggcggccaggcggggcgtgtgcaagggtcgcgtcccccccccgggcccccggcccgtggctcttggtagagcccagtgcttcatttcccgtgcgcggcccgggcggccctccctttcatcagtcttcccgcgtccgccgattcctcctccttggtcgccgcgtccttggctggcgtcagaaaaatggctacaaacttcctagcacatgagaagatctggttcgacaagttcaaatatgacgacgcagaaaggagattctacgagcagatgaacgggcctgtggcaggtgcctcccgccaggagaacggcgccagcgtgatcctccgtgacattgcgagagccagagagaacatccagaaatccctggctggaagctcaggccccggggcctccagcggcaccagcggagaccacggtgagctcgtcgtccggattgccagtctggaagtggagaaccagagtctgcgtggcgtggtacaggagctgcagcaggccatctccaagctggaggcccggctgaacgtgctggagaagagctcgcctggccaccgggccacggccccacagacccagcacgtatctcccatgcgccaagtggagcccccagccaagaagccagccacaccagcagaggatgacgaggatgatgacattgacctgtttggcagtgacaatgaggaggaggacaaggaggcggcacagctgcgggaggagcggctacggcagtacgcggagaagaaggccaagaagcctgcactggtggccaagtcctccatcctgctggatgtcaagccttgggatgatgagacggacatggcccagctggaggcctgtgtgcgctctatccagctggacgggctggtctggggggcttccaagctggtgcccgtgggctacggtatccggaagctacagattcagtgtgtggtggaggacgacaaggtggggacagacttgctggaggaggagatcaccaagtttgaggagcacgtgcagagtgtcgatatcgcagctttcaacaagatctgaagcctgagtgtgtgtacgtgcgcgcgtgcgtgaggccctgccacgattaaagactgagaccggc

SEQ ID NO: 130946 - DNA, 1452 bp, Homo sapiens
  Payload ID: 5583
  Gene Symbol: EEF1D
  Gene Name: eukaryotic translation elongation factor 1 delta (guanine nucleotide exchange protein)
  Uniprot ID: P29692
  ENST ID: ENST00000419152
  CDS Start-End: 512-1357
gacaccactggccgcgaagcgcagggggggcgcgcgcgctgccgcccgttcccagcacttgtgcagactcctccggggaagagcggcctccgcggtcatctccaacggaattctgcctttgaagtgtcggggcacggcgcgtcgagggtcctggcggccaggcggggcgtgtgcaagggtcgcgtcccccccccgggcccccggcccgtggctcttggtagagcccagtgcttcatttcccgtgcgcggcccgggcggccctccctttcatcagtcttcccgcgtccgccgattcctcctccttggtcgccgcgtccttggctggcgtaaagctcctcctgagcttggataaactgcaggagcgaaggggctgaccgtttgtcgggacgcagttgaaagagtcgctgtgtcctgctccgggctctcctgctggagaggagaggcttgcacgtgcctgtcgtctgcgcaagctttgaagctcagacttggtctctgttaggagagatgaaaaatggctacaaacttcctagcacatgagaagatctggttcgacaagttcaaatatgacgacgcagaaaggagattctacgagcagatgaacgggcctgtggcaggtgcctcccgccaggagaacggcgccagcgtgatcctccgtgacattgcgagagccagagagaacatccagaaatccctggctggaagctcaggccccggggcctccagcggcaccagcggagaccacggtgagctcgtcgtccggattgccagtctggaagtggagaaccagagtctgcgtggcgtggtacaggagctgcagcaggccatctccaagctggaggcccggctgaacgtgctggagaagagctcgcctggccaccgggccacggccccacagacccagcacgtatctcccatgcgccaagtggagcccccagccaagaagccagccacaccagcagaggatgacgaggatgatgacattgacctgtttggcagtgacaatgaggaggaggacaaggaggcggcacagctgcgggaggagcggctacggcagtacgcggagaagaaggccaagaagcctgcactggtggccaagtcctccatcctgctggatgtcaagccttgggatgatgagacggacatggcccagctggaggcctgtgtgcgctctatccagctggacgggctggtctggggggcttccaagctggtgcccgtgggctacggtatccggaagctacagattcagtgtgtggtggaggacgacaaggtggggacagacttgctggaggaggagatcaccaagtttgaggagcacgtgcagagtgtcgatatcgcagctttcaacaagatctgaagcctgagtgtgtgtacgtgcgcgcgtgcgtgaggccctgccacgattaaagactgagaccggccctctggctccgtcctggtcatttcctgctc

SEQ ID NO: 130947 - DNA, 2207 bp, Homo sapiens
  Payload ID: 5583
  Gene Symbol: EEF1D
  Gene Name: eukaryotic translation elongation factor 1 delta (guanine nucleotide exchange protein)
  Uniprot ID: P29692
  ENST ID: ENST00000442189
  CDS Start-End: 200-2143
ctccctttcatcagtcttcccgcgtccgccgattcctcctccttggtcgccgcgtccttggctggcgttagagacagggtttcaacgtgttagccaggatggtctcagtctccagaccctgtgatccgcccgcctcggcctcccaaagtgttgggattacaggtgtgagccaccgtgcctggccgaggctccttcttttatgaggagcgggaaggcctcctgcaccctggagaccgtgtgggaagacaagcacaagtatgaggaggccgagcggcgcttctacgaacacgaggccacacaggcggccgcctccgcccagcagctgccagccgaggggccagccatgaatgggcccggccaggacgaccctgaggacgctgatgaggcggaagcccctgacggcggcagcaggcgtgatcccaggaagagccaggacagcaggaagcccctgcagaaaaagaggaagcgctcccccaagagcgggctcggccccgcggacctggccctcctgggcctctcggccgaacgcgtgtggctggacaagtcacttttcgaccaggcagagagctcctaccgccagaagctggcagatgtggctgcccaggcagcctggcctcctgccttggccccttggggtctctgcacccatggaaaccaggtggcctgccaccacgtgacctgggggatctgggtcaacaagtcctccttcgaccaggctgagcgggccttcgtggagtggtctcaggccctgttgctggcccccgacggcagccgcaggcaggggactcccaacacaggccagcaggtggccgtccccgacctggcccaccagcccagcccaccggtcaatggccagcccccgctgggcagcctgcaggcactggttcgggaggtgtggctggagaagccccggtatgatgcagccgagaggggcttctacgaggccctgtttgacggccatcccccagggaaggtgcgcctgcaagagcgagccggcctggccgagggtgcccggcggggccgcagagaccggcggggccgcaacatcttagggaacaagcgggccgggctgcgacgggccgatggggaggccccctctgccttgccctactgttacttcctgcagaaggatgcagaggccccctggctcagcaagcctgcctacgacagcgccgagtgccgccaccacgctgccgaggccctgcgggtggcctggtgcctcgaagctgcctccctgtctcaccgacccggtcctcggtctggcctgtccgtgtccagcctgagacccaacagaaaaatggctacaaacttcctagcacatgagaagatctggttcgacaagttcaaatatgacgacgcagaaaggagattctacgagcagatgaacgggcctgtggcaggtgcctcccgccaggagaacggcgccagcgtgatcctccgtgacattgcgagagccagagagaacatccagaaatccctggctggaagctcaggccccggggcctccagcggcaccagcggagaccacggtgagctcgtcgtccggattgccagtctggaagtggagaaccagagtctgcgtggcgtggtacaggagctgcagcaggccatctccaagctggaggcccggctgaacgtgctggagaagagctcgcctggccaccgggccacggccccacagacccagcacgtatctcccatgcgccaagtggagcccccagccaagaagccagccacaccagcagaggatgacgaggatgatgacattgacctgtttggcagtgacaatgaggaggaggacaaggaggcggcacagctgcgggaggagcggctacggcagtacgcggagaagaaggccaagaagcctgcactggtggccaagtcctccatcctgctggatgtcaagccttgggatgatgagacggacatggcccagctggaggcctgtgtgcgctctatccagctggacgggctggtctggggggcttccaagctggtgcccgtgggctacggtatccggaagctacagattcagtgtgtggtggaggacgacaaggtggggacagacttgctggaggaggagatcaccaagtttgaggagcacgtgcagagtgtcgatatcgcagctttcaacaagatctgaagcctgagtgtgtgtacgtgcgcgcgtgcgtgaggccctgccacgattaaagactgagaccggc

SEQ ID NO: 130948 - DNA, 2378 bp, Homo sapiens
  Payload ID: 5583
  Gene Symbol: EEF1D
  Gene Name: eukaryotic translation elongation factor 1 delta (guanine nucleotide exchange protein)
  Uniprot ID: P29692
  ENST ID: ENST00000423316
  CDS Start-End: 340-2283
gacaccactggccgcgaagcgcagggggggcgcgcgcgctgccgcccgttcccagcacttgtgcagactcctccggggaagagcggcctccgcggtcatctccaacggaattctgcctttgaagtgtcggggcacggcgcgtcgagggtcctggcggccaggcggggcgtgtgcaagggtcgcgtcccccccccgggcccccggcccgtggctcttggtagagcccagtgcttcatttcccgtgcgcggcccgggcggccctccctttcatcagtcttcccgcgtccgccgattcctcctccttggtcgccgcgtccttggctggcgtgtgtccggaagatgaggagcgggaaggcctcctgcaccctggagaccgtgtgggaagacaagcacaagtatgaggaggccgagcggcgcttctacgaacacgaggccacacaggcggccgcctccgcccagcagctgccagccgaggggccagccatgaatgggcccggccaggacgaccctgaggacgctgatgaggcggaagcccctgacggcggcagcaggcgtgatcccaggaagagccaggacagcaggaagcccctgcagaaaaagaggaagcgctcccccaagagcgggctcggccccgcggacctggccctcctgggcctctcggccgaacgcgtgtggctggacaagtcacttttcgaccaggcagagagctcctaccgccagaagctggcagatgtggctgcccaggcagcctggcctcctgccttggccccttggggtctctgcacccatggaaaccaggtggcctgccaccacgtgacctgggggatctgggtcaacaagtcctccttcgaccaggctgagcgggccttcgtggagtggtctcaggccctgttgctggcccccgacggcagccgcaggcaggggactcccaacacaggccagcaggtggccgtccccgacctggcccaccagcccagcccaccggtcaatggccagcccccgctgggcagcctgcaggcactggttcgggaggtgtggctggagaagccccggtatgatgcagccgagaggggcttctacgaggccctgtttgacggccatcccccagggaaggtgcgcctgcaagagcgagccggcctggccgagggtgcccggcggggccgcagagaccggcggggccgcaacatcttagggaacaagcgggccgggctgcgacgggccgatggggaggccccctctgccttgccctactgttacttcctgcagaaggatgcagaggccccctggctcagcaagcctgcctacgacagcgccgagtgccgccaccacgctgccgaggccctgcgggtggcctggtgcctcgaagctgcctccctgtctcaccgacccggtcctcggtctggcctgtccgtgtccagcctgagacccaacagaaaaatggctacaaacttcctagcacatgagaagatctggttcgacaagttcaaatatgacgacgcagaaaggagattctacgagcagatgaacgggcctgtggcaggtgcctcccgccaggagaacggcgccagcgtgatcctccgtgacattgcgagagccagagagaacatccagaaatccctggctggaagctcaggccccggggcctccagcggcaccagcggagaccacggtgagctcgtcgtccggattgccagtctggaagtggagaaccagagtctgcgtggcgtggtacaggagctgcagcaggccatctccaagctggaggcccggctgaacgtgctggagaagagctcgcctggccaccgggccacggccccacagacccagcacgtatctcccatgcgccaagtggagcccccagccaagaagccagccacaccagcagaggatgacgaggatgatgacattgacctgtttggcagtgacaatgaggaggaggacaaggaggcggcacagctgcgggaggagcggctacggcagtacgcggagaagaaggccaagaagcctgcactggtggccaagtcctccatcctgctggatgtcaagccttgggatgatgagacggacatggcccagctggaggcctgtgtgcgctctatccagctggacgggctggtctggggggcttccaagctggtgcccgtgggctacggtatccggaagctacagattcagtgtgtggtggaggacgacaaggtggggacagacttgctggaggaggagatcaccaagtttgaggagcacgtgcagagtgtcgatatcgcagctttcaacaagatctgaagcctgagtgtgtgtacgtgcgcgcgtgcgtgaggccctgccacgattaaagactgagaccggccctctggctccgtcctggtcatttcctgctc

SEQ ID NO: 130949 - DNA, 559 bp, Homo sapiens
  Payload ID: 5583
  Gene Symbol: EEF1D
  Gene Name: eukaryotic translation elongation factor 1 delta (guanine nucleotide exchange protein)
  ENST ID: ENST00000525261
  CDS Start-End: 316-559
ctccctttcatcagtcttcccgcgtccgccgattcctcctccttggtcgccgcgtccttggctggcgtgggatgacggagtgacgtcacctgtgtggactcagctgccacctgggattgtggtggcggcgggtctgtctggcgctcagcttccatctccaccagtgtcacctccacaccacctcgccaagcagcttctggaaaggcccccggccgccccgggctgacctgctgctgtgtctgacccggttagtctttctggctgcctctaaccttgctgcttttccttcatgctgtcctaggaggccaaagcaaaatgaggagcgggaaggcctcctgcaccctggagaccgtgtgggaagacaagcacaagtatgaggaggccgagcggcgcttctacgaacacgaggccacacaggcggccgcctccgcccagcagctgccagccgaggggccagccatgaatgggcccggccaggacgaccctgaggacgctgatgaggcggaagcccctgacggcggcagcaggcgtgatcccaggaagagccaggacagcagga

SEQ ID NO: 130950 - DNA, 343 bp, Homo sapiens
  Payload ID: 5583
  Gene Symbol: EEF1D
  Gene Name: eukaryotic translation elongation factor 1 delta (guanine nucleotide exchange protein)
  ENST ID: ENST00000524900
  CDS Start-End: 156-343
ctttcatcagtcttcccgcgtccgccgattcctcctccttggtcgccgcgtccttggctggcgtagacagggtttcaacgtgttagccaggatggtctcagtctccagaccctgtgatccgcccgcctcggcctcccaaagtgttgggattacagatgaggagcgggaaggcctcctgcaccctggagaccgtgtgggaagacaagcacaagtatgaggaggccgagcggcgcttctacgaacacgaggccacacaggcggccgcctccgcccagcagctgccagccgaggggccagccatgaatgggcccggccaggacgaccctgaggacgctgatgaggc

SEQ ID NO: 130951 - DNA, 616 bp, Homo sapiens
  Payload ID: 5583
  Gene Symbol: EEF1D
  Gene Name: eukaryotic translation elongation factor 1 delta (guanine nucleotide exchange protein)
  ENST ID: ENST00000530545
  CDS Start-End: 365-616
ctccctttcatcagtcttcccgcgtccgccgattcctcctccttggtcgccgcgtccttggctggcgtggcctgcctaggctccaactgacagtaatcccaagagctcccctttcaggggatgacggagtgacgtcacctgtgtggactcagctgccacctgggattgtggtggcggcgggtctgtctggcgctcagcttccatctccaccagtgtcacctccacaccacctcgccaagcagcttctggaaaggcccccggccgccccgggctgacctgctgctgtgtctgacccggttagtctttctggctgcctctaaccttgctgcttttccttcatgctgtcctaggaggccaaagcaaaatgaggagcgggaaggcctcctgcaccctggagaccgtgtgggaagacaagcacaagtatgaggaggccgagcggcgcttctacgaacacgaggccacacaggcggccgcctccgcccagcagctgccagccgaggggccagccatgaatgggcccggccaggacgaccctgaggacgctgatgaggcggaagcccctgacggcggcagcaggcgtgatcccaggaagagccaggacagcaggaagcccctg

SEQ ID NO: 130952 - DNA, 617 bp, Homo sapiens
  Payload ID: 5583
  Gene Symbol: EEF1D
  Gene Name: eukaryotic translation elongation factor 1 delta (guanine nucleotide exchange protein)
  ENST ID: ENST00000534377
  CDS Start-End: 57-617
ttcccgcgtccgccgattcctcctccttggtcgccgcgtccttggctggcgtaaaaatggctacaaacttcctagcacatgagaagatctggttcgacaagttcaaatatgacgacgcagaaaggagattctacgagcagatgaacgggcctgtggcaggtgcctcccgccagagctcaggccccggggcctccagcggcaccagcggagaccacggtgagctcgtcgtccggattgccagtctggaagtggagaaccagagtctgcgtggcgtggtacaggagctgcagcaggccatctccaagctggaggcccggctgaacgtgctggagaagagctcgcctggccaccgggccacggccccacagacccagcacgtatctcccatgcgccaagtggagcccccagccaagaagccagccacaccagcagaggatgacgaggatgatgacattgacctgtttggcagtgacaatgaggaggaggacaaggaggcggcacagctgcgggaggagcggctacggcagtacgcggagaagaaggccaagaagcctgcactggtggccaagtcctccatcctgctggatgtcaagccttgggatgatgagacggacatg

SEQ ID NO: 130953 - DNA, 610 bp, Homo sapiens
  Payload ID: 5583
  Gene Symbol: EEF1D
  Gene Name: eukaryotic translation elongation factor 1 delta (guanine nucleotide exchange protein)
  ENST ID: ENST00000525223
  CDS Start-End: 494-610
ccagggaaggtgcgcctgcaagagcgagccggcctggccgagggtgcccggcggggccgcagagaccggcggggccgcaacatcttagggaacaagcgggccgggctgcgacgggccgatggggaggccccctctgccttgccctactgttacttcctgcagaaggatgcagaggccccctggctcagcaagcctgcctacgacagcgccgagtgccgccaccacgctgccgaggccctgcgggtggcctggtgcctcgaagctgcctccctgtctcaccgacccggtcctcggtctggcctgtccgtgtccagcctgagacccaagtaggagaaacgtgctgggtgggcacccagcctgggctgtgggcacagggacagccatcccaggctggggctcctccagcttcctcccctgcccacctggggtgggggctccccgagacccgtgggcccagcagagttgaatgcaggagcaggctgagtaaagaaaaatggctacaaacttcctagcacatgagaagatctggttcgacaagttcaaatatgacgacgcagaaaggagattctacgagcagatgaacgggcctgtggcaggtgcctcccgccag

SEQ ID NO: 130954 - DNA, 473 bp, Homo sapiens
  Payload ID: 5583
  Gene Symbol: EEF1D
  Gene Name: eukaryotic translation elongation factor 1 delta (guanine nucleotide exchange protein)
  ENST ID: ENST00000529516
  CDS Start-End: 55-473
cccgcgtccgccgattcctcctccttggtcgccgcgtccttggctggcgtaaaaatggctacaaacttcctagcacatgagaagatctggttcgacaagttcaaatatgacgacgcagaaaggagattctacgagcagatgaacgggcctgtggcaggtgcctcccgccaggagaacggcgccagcgtgatcctccgtgacattgcgagagccagagagaacatccagaaatccctggctggaagctcaggccccggggcctccagcggcaccagcggagaccacgtggtacaggagctgcagcaggccatctccaagctggaggcccggctgaacgtgctggagaagagctcgcctggccaccgggccacggccccacagacccagcacgtatctcccatgcgccaagtggagcccccagccaagaagccagccacaccagcagaggatgacgaggatgatgacattgacct

SEQ ID NO: 130955 - DNA, 923 bp, Homo sapiens
  Payload ID: 5583
  Gene Symbol: EEF1D
  Gene Name: eukaryotic translation elongation factor 1 delta (guanine nucleotide exchange protein)
  Uniprot ID: P29692
  ENST ID: ENST00000528610
  CDS Start-End: 86-859
ccgggcggccctccctttcatcagtcttcccgcgtccgccgattcctcctccttggtcgccgcgtccttggctggcgtcagaaaaatggctacaaacttcctagcacatgagaagatctggttcgacaagttcaaatatgacgacgcagaaaggagattctacgagcagatgaacgggcctgtggcaggtgcctcccgccagagctcaggccccggggcctccagcggcaccagcggagaccacggtgagctcgtcgtccggattgccagtctggaagtggagaaccagagtctgcgtggcgtggtacaggagctgcagcaggccatctccaagctggaggcccggctgaacgtgctggagaagagctcgcctggccaccgggccacggccccacagacccagcacgtatctcccatgcgccaagtggagcccccagccaagaagccagccacaccagcagaggatgacgaggatgatgacattgacctgtttggcagtgacaatgaggaggaggacaaggaggcggcacagctgcgggaggagcggctacggcagtacgcggagaagaaggccaagaagcctgcactggtggccaagtcctccatcctgctggatgtcaagccttgggatgatgagacggacatggcccagctggaggcctgtgtgcgctctatccagctggacgggctggtctggggggcttccaagctggtgcccgtgggctacggtatccggaagctacagattcagtgtgtggtggaggacgacaaggtggggacagacttgctggaggaggagatcaccaagtttgaggagcacgtgcagagtgtcgatatcgcagctttcaacaagatctgaagcctgagtgtgtgtacgtgcgcgcgtgcgtgaggccctgccacgattaaagactgagaccggc

SEQ ID NO: 130956 - DNA, 749 bp, Homo sapiens
  Payload ID: 5583
  Gene Symbol: EEF1D
  Gene Name: eukaryotic translation elongation factor 1 delta (guanine nucleotide exchange protein)
  ENST ID: ENST00000530616
  CDS Start-End: 1-632
agcgggccgggctgcgacgggccgatggggaggccccctctgccttgccctactgttacttcctgcagaaggatgcagaggccccctggctcagcaagcctgcctacgacagcgccgagtgccgccaccacgctgccgaggccctgcgggtggcctggtgcctcgaagctgcctccctgtctcaccgacccggtcctcggtctggcctgtccgtgtccagcctgagacccaacagaaaaatggctacaaacttcctagcacatgagaagatctggttcgacaagttcaaatatgacgacgcagaaaggagattctacgagcagatgaacgggcctgtggcaggtgcctcccgccaggagaacggcgccagcgtgatcctccgtgacattgcgagagccagagagaacatccagaaatccctggctggaagctcaggccccggggcctccagcggcaccagcggagaccacggtgagctcgtcgtccggattgccagtctggaagtggagaaccagagtctgcgtggcgtggtacaggagctgcagcaggccatctccaagctggaggcccggctgaacgtgctggagaagagctcgcctggccaccgggccacggccccacagacccagtgacaatgaggaggaggacaaggaggcggcacagctgcgggaggagcggctacggcagtacgcggagaagaaggccaagaagcctgcactggtggccaagtcctccatcctgctggatgt

SEQ ID NO: 130957 - DNA, 633 bp, Homo sapiens
  Payload ID: 5583
  Gene Symbol: EEF1D
  Gene Name: eukaryotic translation elongation factor 1 delta (guanine nucleotide exchange protein)
  ENST ID: ENST00000533749
  CDS Start-End: 221-633
cctgcagccctcgggcggacccccatcatcgtccaggtgcagccactccgcaacctcctccggagccaggcacttgtaggccagagccgccaggtgggtgaggtcgctgagcaccctgctgtgctcggcggcttcctcggcctgggccggctgcccagcactgtcctcgccgggccggggctcgaaggcagcccgcaggcccagcagccagcagcgctcaatgctgcccgcctgcaccaggtcccaggagaggccagccagcagaaaaatggctacaaacttcctagcacatgagaagatctggttcgacaagttcaaatatgacgacgcagaaaggagattctacgagcagatgaacgggcctgtggcaggtgcctcccgccaggagaacggcgccagcgtgatcctccgtgacattgcgagagccagagagaacatccagaaatccctggctggaagctcaggccccggggcctccagcggcaccagcggagaccacggtgagctcgtcgtccggattgccagtctggaagtggagaaccagagtctgcgtggcgtggtacaggagctgcagcaggccatctccaagctggaggcccggctgaacgtgctggagaagagctcgcctggcca

SEQ ID NO: 130958 - DNA, 813 bp, Homo sapiens
  Payload ID: 5583
  Gene Symbol: EEF1D
  Gene Name: eukaryotic translation elongation factor 1 delta (guanine nucleotide exchange protein)
  ENST ID: ENST00000531281
  CDS Start-End: 43-813
ttgctcccgggttgctgggtgaggctgcaaggtttagcacagatgaggagcgggaaggcctcctgcaccctggagaccgtgtgggaagacaagcacaagtatgaggaggccgagcggcgcttctacgaacacgaggccacacaggcggccgcctccgcccagcagctgccagccgaggggccagccatgaatgggcccggccaggacgaccctgaggacgctgatgaggcggaagcccctgacggcggcagcaggcgtgatcccaggaagagccaggacagcaggaagcccctgcagaaaaagaggaagcgctcccccaagagcgggctcggccccgcggacctggccctcctgggcctctcggccgaacgcgtgtggctggacaagtcacttttcgaccaggcagagagctcctaccgccagaagctggcagatgtggctgcccaggcagcctggcctcctgccttggccccttggggtctctgcacccatggaaaccaggtggcctgccaccacgtgacctgggggatctgggtcaacaagtcctccttcgaccaggctgagcgggccttcgtggagtggtctcaggccctgttgctggcccccgacggcagccgcaggcaggggactcccaacacaggccagcaggtggccgtccccgacctggcccaccagcccagcccaccggtcaatggccagcccccgctgggcagcctgcaggcactggttcgggaggtgtggctggagaagccccggtatgatgcagccgagaggggcttctacgaggccctgtttgacggccatcccccaggg

SEQ ID NO: 130959 - DNA, 840 bp, Homo sapiens
  Payload ID: 5583
  Gene Symbol: EEF1D
  Gene Name: eukaryotic translation elongation factor 1 delta (guanine nucleotide exchange protein)
  ENST ID: ENST00000531621
  CDS Start-End: 61-777
cttcccgcgtccgccgattcctcctccttggtcgccgcgtccttggctggcgtcagaaaaatggctacaaacttcctagcacatgagaagatctggttcgacaagttcaaatatgacgacgcagaaaggagattctacgagcagatgaacgggcctgtggcaggtgcctcccgccagagctcaggccccggggcctccagcggcaccagcggagaccacgtggtacaggagctgcagcaggccatctccaagctggaggcccggctgaacgtgctggagaagagctcgcctggccaccgggccacggccccacagacccagcacgtatctcccatgcgccaagtggagcccccagccaagaagccagccacaccagcagaggatgacgaggatgatgacattgacctgtttggcagtgacaatgaggaggaggacaaggaggcggcacagctgcgggaggagcggctacggcagtacgcggagaagaaggccaagaagcctgcactggtggccaagtcctccatcctgctggatgtcaagccttgggatgatgagacggacatggcccagctggaggcctgtgtgcgctctatccagctggacgggctggtctggggggcttccaagctggtgcccgtgggctacggtatccggaagctacagattcagtgtgtggtggaggacgacaaggtggggacagacttgctggaggaggagatcaccaagtttgaggagcacgtgcagagtgtcgatatcgcagctttcaacaagatctgaagcctgagtgtgtgtacgtgcgcgcgtgcgtgaggccctgccacgattaaagactgagaccgg

SEQ ID NO: 130960 - DNA, 831 bp, Homo sapiens
  Payload ID: 5583
  Gene Symbol: EEF1D
  Gene Name: eukaryotic translation elongation factor 1 delta (guanine nucleotide exchange protein)
  ENST ID: ENST00000533833
  CDS Start-End: 89-409
ggcccgggcggccctccctttcatcagtcttcccgcgtccgccgattcctcctccttggtcgccgcgtccttggctggcgtcagaaaaatggctacaaacttcctagcacatgagaagatctggttcgacaagttcaaatatgacgacgcagaaaggagattctacgagcagatgaacgggcctgtggcaggtgcctcccgccagagctcaggccccggggcctccagcggcaccagcggagaccacggtgagctcgtcgtccggattgccagtctggaagtggagaaccagagtctgcgtggcgtggtacaggagctgcagcaggccatctccaagctggaggcccggctgaacgtgctggagaagagctcgcctggccaccgggccacggccccacagacccagtgacaatgaggaggaggacaaggaggcggcacagctgcgggaggagcggctacggcagtacgcggagaagaaggccaagaagcctgcactggtggccaagtcctccatcctgctggatgtcaagccttgggatgatgagacggacatggcccagctggaggcctgtgtgcgctctatccagctggacgggctggtctggggggcttccaagctggtgcccgtgggctacggtatccggaagctacagattcagtgtgtggtggaggacgacaaggtggggacagacttgctggaggaggagatcaccaagtttgaggagcacgtgcagagtgtcgatatcgcagctttcaacaagatctgaagcctgagtgtgtgtacgtgcgcgcgtgcgtgaggccctgccacgattaaagactgagaccggc

SEQ ID NO: 130961 - DNA, 761 bp, Homo sapiens
  Payload ID: 5583
  Gene Symbol: EEF1D
  Gene Name: eukaryotic translation elongation factor 1 delta (guanine nucleotide exchange protein)
  ENST ID: ENST00000532596
  CDS Start-End: 191-761
ctccctttcatcagtcttcccgcgtccgccgattcctcctccttggtcgccgcgtccttggctggcgtggtttcaacgtgttagccaggatggtctcagtctccagaccctgtgatccgcccgcctcggcctcccaaagtgttgggattacaggtgtgagccaccgtgcctggccgaggctccttcttttatgaggagcgggaaggcctcctgcaccctggagaccgtgtgggaagacaagcacaagtatgaggaggccgagcggcgcttctacgaacacgaggccacacaggcggccgcctccgcccagcagctgccagccgaggggccagccatgaatgggcccggccaggacgaccctgaggacgctgatgaggcggaagcccctgacggcggcagcaggcgtgatcccaggaagagccaggacagcaggaagcccctgcagaaaaagaggaagcgctcccccaagagcgggctcggccccgcggacctggccctcctgggcctctcggccgaacgcgtgtggctggacaagtcacttttcgaccaggcagagagctcctaccgccagaagctggcagatgtggctgcccaggcagcctggcctcctgccttggccccttggggtctctgcacccatggaaaccaggtggcctgccaccacgtgacctgggggatctgggtcaacaagtcctccttcgaccaggctgagcgggccttcgtggagtggtctcaggccctgttgctggcccccgacggca

SEQ ID NO: 130962 - DNA, 828 bp, Homo sapiens
  Payload ID: 5583
  Gene Symbol: EEF1D
  Gene Name: eukaryotic translation elongation factor 1 delta (guanine nucleotide exchange protein)
  ENST ID: ENST00000524883
  CDS Start-End: 287-828
gctctgttgtccaggctggagtgcagtggcgccatctcggttcactgcaagctccgcctcccggcttcacgccattctcctgcctcagcctccctaggagctgggactacaggcgcctgccaccacgcccggctaatttttatttttatttttagtagagacagggtttcaacgtgttagccaggatggtctcagtctccagaccctgtgatccgcccgcctcggcctcccaaagtgttgggattacaggtgtgagccaccgtgcctggccgaggctccttcttttatgaggagcgggaaggcctcctgcaccctggagaccgtgtgggaagacaagcacaagtatgaggaggccgagcggcgcttctacgaacacgaggccacacaggcggccgcctccgcccagcagctgccagccgaggggccagccatgaatgggcccggccaggacgaccctgaggacgctgatgaggcggaagcccctgacggcggcagcaggcgtgatcccaggaagagccaggacagcaggaagcccctgcagaaaaagaggaagcgctcccccaagagcgggctcggccccgcggacctggccctcctgggcctctcggccgaacgcgtgtggctggacaagtcacttttcgaccaggcagagagctcctaccgccagaagctggcagatgtggctgcccaggcagcctggcctcctgccttggccccttggggtctctgcacccatggaaaccaggtggcctgccaccacgtgacctgggggatctgggtcaacaagtcctccttcgaccaggctgagcgggccttcgtggagtggtc

SEQ ID NO: 130963 - DNA, 555 bp, Homo sapiens
  Payload ID: 5583
  Gene Symbol: EEF1D
  Gene Name: eukaryotic translation elongation factor 1 delta (guanine nucleotide exchange protein)
  ENST ID: ENST00000534804
  CDS Start-End: 351-555
ctccctttcatcagtcttcccgcgtccgccgattcctcctccttggtcgccgcgtccttggctggcgttgtcacctccacaccacctcgccaagcagcttctggaaaggcccccggccgccccgggctgacctgctgctgtgtctgacccggttagtctttctggctgcctctaaccttgctgcttttccttcatgctgtcctaggaggccaaagcaaatagagacagggtttcaacgtgttagccaggatggtctcagtctccagaccctgtgatccgcccgcctcggcctcccaaagtgttgggattacaggtgtgagccaccgtgcctggccgaggctccttcttttatgaggagcgggaaggcctcctgcaccctggagaccgtgtgggaagacaagcacaagtatgaggaggccgagcggcgcttctacgaacacgaggccacacaggcggccgcctccgcccagcagctgccagccgaggggccagccatgaatgggcccggccaggacgaccctgaggacgctgatgaggcggaagcccctgacggcg

SEQ ID NO: 130964 - DNA, 558 bp, Homo sapiens
  Payload ID: 5583
  Gene Symbol: EEF1D
  Gene Name: eukaryotic translation elongation factor 1 delta (guanine nucleotide exchange protein)
  ENST ID: ENST00000528303
  CDS Start-End: 495-558
ctccctttcatcagtcttcccgcgtccgccgattcctcctccttggtcgccgcgtccttggctggcgtaaagctcctcctgagcttggataaactgcaggagcgaaggggctgaccgtttgtcgggacgcagttgaaagagtcgctgtgtcctgctccgggctctcctgctggagaggagaggcttgcacgtgcctgtcgtctgcgcaagctttgaagctcagacttggtctctgttaggagagatggggatgacggagtgacgtcacctgtgtggactcagctgccacctgggattgtggtggcggcgggtctgtctggcgctcagcttccatctccaccagtgtcacctccacaccacctcgccaagcagcttctggaaaggcccccggccgccccgggctgacctgctgctgtgtctgacccggttagtctttctggctgcctctaaccttgctgcttttccttcatgctgtcctaggaggccaaagcaaaatgaggagcgggaaggcctcctgcaccctggagaccgtgtgggaagacaagcacaagtatgagg

SEQ ID NO: 130965 - DNA, 538 bp, Homo sapiens
  Payload ID: 5583
  Gene Symbol: EEF1D
  Gene Name: eukaryotic translation elongation factor 1 delta (guanine nucleotide exchange protein)
  ENST ID: ENST00000534475
  CDS Start-End: 445-538
ccctttcatcagtcttcccgcgtccgccgattcctcctccttggtcgccgcgtccttggctggcgtgggatgacggagtgacgtcacctgtgtggactcagctgccacctgggattgtggtggcggcgggtctgtctggcgctcagcttccatctccaccagtgtcacctccacaccacctcgccaagcagcttctggaaaggcccccggccgccccgggctgacctgctgctgtgtctgacccggttagtctttctggctgcctctaaccttgctgcttttccttcatgctgtcctaggaggccaaagcaaatagagacagggtttcaacgtgttagccaggatggtctcagtctccagaccctgtgatccgcccgcctcggcctcccaaagtgttgggattacaggtgtgagccaccgtgcctggccgaggctccttcttttatgaggagcgggaaggcctcctgcaccctggagaccgtgtgggaagacaagcacaagtatgaggaggccgagcggcgcttctacgaacacgagg

SEQ ID NO: 130966 - DNA, 758 bp, Homo sapiens
  Payload ID: 5583
  Gene Symbol: EEF1D
  Gene Name: eukaryotic translation elongation factor 1 delta (guanine nucleotide exchange protein)
  ENST ID: ENST00000533494
  CDS Start-End: 254-758
cgcgtccttggctggcgtggcctgcctaggctccaactgacagtaatcccaagagctcccctttcaggggatgacggagtgacgtcacctgtgtggactcagctgccacctgggattgtggtggcggcgggtctgtctggcgctcagcttccatctccaccagtgtcacctccacaccacctcgccaagcagcttctggaaaggcccccggccgccccgggctgacctgctgctgtgtctgacccgcagaaaaatggctacaaacttcctagcacatgagaagatctggttcgacaagttcaaatatgacgacgcagaaaggagattctacgagcagatgaacgggcctgtggcaggtgcctcccgccaggagaacggcgccagcgtgatcctccgtgacattgcgagagccagagagaacatccagaaatccctggctggaagctcaggccccggggcctccagcggcaccagcggagaccacggtgagctcgtcgtccggattgccagtctggaagtggagaaccagagtctgcgtggcgtggtacaggagctgcagcaggccatctccaagctggaggcccggctgaacgtgctggagaagagctcgcctggccaccgggccacggccccacagacccagcacgtatctcccatgcgccaagtggagcccccagccaagaagccagccacaccagcagaggatgacgaggatgatgacattgacctgtttggcagtgacaatgaggaggaggaca

SEQ ID NO: 130967 - DNA, 583 bp, Homo sapiens
  Payload ID: 5583
  Gene Symbol: EEF1D
  Gene Name: eukaryotic translation elongation factor 1 delta (guanine nucleotide exchange protein)
  ENST ID: ENST00000530306
  CDS Start-End: 197-583
ctccctttcatcagtcttcccgcgtccgccgattcctcctccttggtcgccgcgtccttggctggcgtagacagggtttcaacgtgttagccaggatggtctcagtctccagaccctgtgatccgcccgcctcggcctcccaaagtgttgggattacaggtgtgagccaccgtgcctggccgaggctccttcttttatgaggagcgggaaggcctcctgcaccctggagaccgtgtgggaagacaagcacaagtatgaggaggccgagcggcgcttctacgaacacgaggccacacaggcggccgcctccgcccagcagctgccagccgaggggccagccatgaatgggcccggccaggacgaccctgaggacgctgatgaggcggaagcccctgacggcggcagcaggcgtgatcccaggaagagccaggacagcaggaagcccctgcagaaaaagaggaagcgctcccccaagagcgggctcggccccgcggacctggccctcctgggcctctcggccgaacgcgtgtggctggacaagtcacttttcgaccaggcagagagctcctaccgccagaagctg

SEQ ID NO: 130968 - DNA, 1001 bp, Homo sapiens
  Payload ID: 5583
  Gene Symbol: EEF1D
  Gene Name: eukaryotic translation elongation factor 1 delta (guanine nucleotide exchange protein)
  ENST ID: ENST00000534380
  CDS Start-End: 217-1001
gtccttggctggcgtaaagctcctcctgagcttggataaactgcaggagcgaaggggctgaccgtttgtcgggacgcagttgaaagagtcgctgtgtcctgctccgggctctcctgctggagaggagaggcttgcacgtgcctgtcgtctgcgcaagctttgaagctcagacttggtctctgttaggagagatggtgcgctgcgtccggcagaaaaatggctacaaacttcctagcacatgagaagatctggttcgacaagttcaaatatgacgacgcagaaaggagattctacgagcagatgaacgggcctgtggcaggtgcctcccgccaggagaacggcgccagcgtgatcctccgtgacattgcgagagccagagagaacatccagaaatccctggctggaagctcaggccccggggcctccagcggcaccagcggagaccacggtgagctcgtcgtccggattgccagtctggaagtggagaaccagagtctgcgtggcgtggtacaggagctgcagcaggccatctccaagctggaggcccggctgaacgtgctggagaagagctcgcctggccaccgggccacggccccacagacccagcacgtatctcccatgcgccaagtggagcccccagccaagaagccagccacaccagcagaggatgacgaggatgatgacattgacctgtttggcagtgacaatgaggaggaggacaaggaggcggcacagctgcgggaggagcggctacggcagtacgcggagaagaaggccaagaagcctgcactggtggccaagtcctccatcctgctggatgtcaagccttgggatgatgagacggacatggcccagctggaggcctgtgtgcgctctatccagctggacgggctggtctggggggcttccaagctggtgcccgtgggctacggtatccggaagctacagattcagtgtgtggtggaggacgacaaggtggggacagacttgctggaggagga

SEQ ID NO: 130969 - DNA, 926 bp, Homo sapiens
  Payload ID: 5583
  Gene Symbol: EEF1D
  Gene Name: eukaryotic translation elongation factor 1 delta (guanine nucleotide exchange protein)
  ENST ID: ENST00000531670
  CDS Start-End: 390-926
caccttcgccttctcaccacatgcctcaggcccagccaggctcctagacctgcctctgtagaggctttctgggcgcagtgccaatcctgtgagacagcagcatctcccctgggctgctgcagggttcacacgcagtcagtgctggcagagtgagcgcccagccgacagagcccccgctgcctcccgcctcctctggaggactaggccctctgggctttgctcccgggttgctgggtgaggctgcaaggtttagcacagtagagacagggtttcaacgtgttagccaggatggtctcagtctccagaccctgtgatccgcccgcctcggcctcccaaagtgttgggattacaggtgtgagccaccgtgcctggccgaggctccttcttttatgaggagcgggaaggcctcctgcaccctggagaccgtgtgggaagacaagcacaagtatgaggaggccgagcggcgcttctacgaacacgaggccacacaggcggccgcctccgcccagcagctgccagccgaggggccagccatgaatgggcccggccaggacgaccctgaggacgctgatgaggcggaagcccctgacggcggcagcaggcgtgatcccaggaagagccaggacagcaggaagcccctgcagaaaaagaggaagcgctcccccaagagcgggctcggccccgcggacctggccctcctgggcctctcggccgaacgcgtgtggctggacaagtcacttttcgaccaggcagagagctcctaccgccagaagctggcagatgtggctgcccaggcagcctggcctcctgccttggccccttggggtctctgcacccatggaaaccaggtggcctgccaccacgtgacctgggggatctgggtcaacaagtcctccttcgaccaggctgagcgggccttcgtggag

SEQ ID NO: 130970 - DNA, 419 bp, Homo sapiens
  Payload ID: 5583
  Gene Symbol: EEF1D
  Gene Name: eukaryotic translation elongation factor 1 delta (guanine nucleotide exchange protein)
  ENST ID: ENST00000532400
  CDS Start-End: 57-356
ccgcgtccgccgattcctcctccttggtcgccgcgtccttggctggcgtcagaaaaatggctacaaacttcctagcacatgagaagatctggttcgacaagttcaaatatgacgacgcagaaaggagattctacgagcagatgaacgggcctgtgtgcgctctatccagctggacgggctggtctggggggcttccaagctggtgcccgtgggctacggtatccggaagctacagattcagtgtgtggtggaggacgacaaggtggggacagacttgctggaggaggagatcaccaagtttgaggagcacgtgcagagtgtcgatatcgcagctttcaacaagatctgaagcctgagtgtgtgtacgtgcgcgcgtgcgtgaggccctgccacgattaaagactgagaccggccctctg

SEQ ID NO: 130971 - DNA, 2387 bp, Homo sapiens
  Payload ID: 5583
  Gene Symbol: EEF1D
  Gene Name: eukaryotic translation elongation factor 1 delta (guanine nucleotide exchange protein)
  ENST ID: ENST00000532741
  CDS Start-End: 230-2323
taaagcttatttcagataaatgacgaaaaatttttagtgtaagtatgtctcagatacttcatgggccatacattcactaacaaaattatatattgttcatgtattgggaggcacttggcctcccagagtactgagattacaggcatgagccactgcgcccggcctgttttctcttcacaacaaaacgtccccacatgggcttgacttcgaagtcctcgaatgtcatctcatggaagccccactggggagcatcctcagcccctgcccagggagggcagccacggggagggcgggcacggggagggtgggcacggggctgcggccacccgctgtgttgcaactctgccctctgcttgctttttatcgctgtgtccggaagatgaggagcgggaaggcctcctgcaccctggagaccgtgtgggaagacaagcacaagtatgaggaggccgagcggcgcttctacgaacacgaggccacacaggcggccgcctccgcccagcagctgccagccgaggggccagccatgaatgggcccggccaggacgaccctgaggacgctgatgaggcggaagcccctgacggcggcagcaggcgtgatcccaggaagagccaggacagcaggaagcccctgcagaaaaagaggaagcgctcccccaagagcgggctcggccccgcggacctggccctcctgggcctctcggccgaacgcgtgtggctggacaagtcacttttcgaccaggcagagagctcctaccgccagaagctggcagatgtggctgcccaggcagcctggcctcctgccttggccccttggggtctctgcacccatggaaaccaggtggcctgccaccacgtgacctgggggatctgggtcaacaagtcctccttcgaccaggctgagcgggccttcgtggagtggtctcaggccctgttgctggcccccgacggcagccgcaggcaggggactcccaacacaggccagcaggtggccgtccccgacctggcccaccagcccagcccaccggtcaatggccagcccccgctgggcagcctgcaggcactggttcgggaggtgtggctggagaagccccggtatgatgcagccgagaggggcttctacgaggccctgtttgacggccatcccccagggaaggtgcgcctgcaagagcgagccggcctggccgagggtgcccggcggggccgcagagaccggcggggccgcaacatcttagggaacaagcgggccgggctgcgacgggccgatggggaggccccctctgccttgccctactgttacttcctgcagaaggatgcagaggccccctggctcagcaagcctgcctacgacagcgccgagtgccgccaccacgctgccgaggccctgcgggtggcctggtgcctcgaagctgcctccctgtctcaccgacccggtcctcggtctggcctgtccgtgtccagcctgagacccaacagaaaaatggctacaaacttcctagcacatgagaagatctggttcgacaagttcaaatatgacgacgcagaaaggagattctacgagcagatgaacgggcctgtggcaggtgcctcccgccaggagaacggcgccagcgtgatcctccgtgacattgcgagagccagagagaacatccagaaatccctggctggaagctcaggccccggggcctccagcggcaccagcggagaccacggtgagctcgtcgtccggattgccagtctggaagtggagaaccagagtctgcgtggcgtggtacaggagctgcagcaggccatctccaagctggaggcccggctgaacgtgctggagaagagctcgcctggccaccgggccacggccccacagacccagcacgtatctcccatgcgccaagtggagcccccagccaagaagccagccacaccagcagaggatgacgaggatgatgacattgacctgtttggcagtgacaatgaggaggaggacaaggaggcggcacagctgcgggaggagcggctacggcagtacgcggagaagaaggccaagaagcctgcactggtggccaagtcctccatcctgctggatgtcaagccttgggatgatgagacggacatggcccagctggaggcctgtgtgcgctctatccagctggacgggctggtctggggggcttccaagctggtgcccgtgggctacggtatccggaagctacagattcagtgtgtggtggaggacgacaaggtggggacagacttgctggaggaggagatcaccaagtttgaggagcacgtgcagagtgtcgatatcgcagctttcaacaagatctgaagcctgagtgtgtgtacgtgcgcgcgtgcgtgaggccctgccacgattaaagactgagaccggc

SEQ ID NO: 130972 - DNA, 791 bp, Homo sapiens
  Payload ID: 5583
  Gene Symbol: EEF1D
  Gene Name: eukaryotic translation elongation factor 1 delta (guanine nucleotide exchange protein)
  ENST ID: ENST00000532543
  CDS Start-End: 675-791
cagaggctttaagtggaaggaagaaggcaaagggggcggagtgggttggggacctgatgagacgtcaggattggtttccagaatgaaggaccgcctggcagcagaagaactgtgtagctaaacttggggttgtccctgcccgacagggcggggtgcttcttaagttgacactgcctgcggctcacctcccagggaggcaggccaggccatctcacctgagcagcctccttctacagctccgcccaccccgtcatctggaccccatgagccttaagcagctggctcgcaggcagttggttacttccggagcccgtgtgtgcccagccccgttctgggggtgggggatgcagctgaggggctgggcaggtgtggaaggagcccccgagcgtcctctgaggaagtagacgctcaccttcgccttctcaccacatgcctcaggcccagccaggctcctagacctgcctctgtagaggctttctgggcgcagtgccaatcctgtgagacagcagcatctcccctgggctgctgcagggttcacacgcagtcagtgctggcagagtgagcgcccagccgacagagcccccgctgcctcccgcctcctctggaggactaggccctctgggctttgctcccgggttgctgggtgaggctgcaaggtttagcacagcagaaaaatggctacaaacttcctagcacatgagaagatctggttcgacaagttcaaatatgacgacgcagaaaggagattctacgagcagatgaacgggcctgtggcaggtgcctcccgccag

SEQ ID NO: 130973 - DNA, 996 bp, Homo sapiens
  Payload ID: 5583
  Gene Symbol: EEF1D
  Gene Name: eukaryotic translation elongation factor 1 delta (guanine nucleotide exchange protein)
  ENST ID: ENST00000526710
  CDS Start-End: 96-996
catttcccgtgcgcggcccgggcggccctccctttcatcagtcttcccgcgtccgccgattcctcctccttggtcgccgcgtccttggctggcgtatgaggagcgggaaggcctcctgcaccctggagaccgtgtgggaagacaagcacaagtatgaggaggccgagcggcgcttctacgaacacgaggccacacaggcggccgcctccgcccagcagctgccagccgaggggccagccatgaatgggcccggccaggacgaccctgaggacgctgatgaggcggaagcccctgacggcggcagcaggcgtgatcccaggaagagccaggacagcaggaagcccctgcagaaaaagaggaagcgctcccccaagagcgggctcggccccgcggacctggccctcctgggcctctcggccgaacgcgtgtggctggacaagtcacttttcgaccaggcagagagctcctaccgccagaagctggcagatgtggctgcccaggcagcctggcctcctgccttggccccttggggtctctgcacccatggaaaccaggtggcctgccaccacgtgacctgggggatctgggtcaacaagtcctccttcgaccaggctgagcgggccttcgtggagtggtctcaggccctgttgctggcccccgacggcagccgcaggcaggggactcccaacacaggccagcaggtggccgtccccgacctggcccaccagcccagcccaccggtcaatggccagcccccgctgggcagcctgcaggcactggttcgggaggtgtggctggagaagccccggtatgatgcagccgagaggggcttctacgaggccctgtttgacggccatcccccagggaaggtgcgcctgcaagagcgagccggcctggccgagggtgcccggcggggccgcagagaccggcggggccgcaacatcttagggaacaagcgggccgggctgcgacgggccgatggggaggccccctctg

SEQ ID NO: 130974 - DNA, 787 bp, Homo sapiens
  Payload ID: 5583
  Gene Symbol: EEF1D
  Gene Name: eukaryotic translation elongation factor 1 delta (guanine nucleotide exchange protein)
  ENST ID: ENST00000531218
  CDS Start-End: 192-787
ctcctccttggtcgccgcgtccttggctggcgttgtcacctccacaccacctcgccaagcagcttctggaaaggcccccggccgccccgggctgacctgctgctgtgtctgacccggttagtctttctggctgcctctaaccttgctgcttttccttcatgctgtcctaggaggccaaagcaaacagaaaaatggctacaaacttcctagcacatgagaagatctggttcgacaagttcaaatatgacgacgcagaaaggagattctacgagcagatgaacgggcctgtggcaggtgcctcccgccaggagaacggcgccagcgtgatcctccgtgacattgcgagagccagagagaacatccagaaatccctggctggaagctcaggccccggggcctccagcggcaccagcggagaccacggtgagctcgtcgtccggattgccagtctggaagtggagaaccagagtctgcgtggcgtggtacaggagctgcagcaggccatctccaagctggaggcccggctgaacgtgctggagaagagctcgcctggccaccgggccacggccccacagacccagcacgtatctcccatgcgccaagtggagcccccagccaagaagccagccacaccagcagaggatgacgaggatgatgacattgacctgtttggcagtgacaatgaggaggaggacaaggaggcggcacagctgcgggaggagcggctacggcagtacgcggagaagaaggccaagaagcctgcactggtggccaagtcctccatcct

SEQ ID NO: 130975 - DNA, 842 bp, Homo sapiens
  Payload ID: 5583
  Gene Symbol: EEF1D
  Gene Name: eukaryotic translation elongation factor 1 delta (guanine nucleotide exchange protein)
  ENST ID: ENST00000533204
  CDS Start-End: 231-842
gcgtccgccgattcctcctccttggtcgccgcgtccttggctggcgtaaagctcctcctgagcttggataaactgcaggagcgaaggggctgaccgtttgtcgggacgcagttgaaagagtcgctgtgtcctgctccgggctctcctgctggagaggagaggcttgcacgtgcctgtcgtctgcgcaagctttgaagctcagacttggtctctgttaggagagatgaaaaatggctacaaacttcctagcacatgagaagatctggttcgacaagttcaaatatgacgacgcagaaaggagattctacgagcagatgaacgggcctgtggcaggtgcctcccgccaggagaacggcgccagcgtgatcctccgtgacattgcgagagccagagagaacatccagaaatccctggctggaagctcaggccccggggcctccagcggcaccagcggagaccacggtgagctcgtcgtccggattgccagtctggaagtggagaaccagagtctgcgtggcgtggtacaggagctgcagcaggccatctccaagctggaggcccggctgaacgtgctggagaagagctcgcctggccaccgggccacggccccacagacccagcacgtatctcccatgcgccaagtggagcccccagccaagaagccagccacaccagcagaggatgacgaggatgatgacattgacctgtttggcagtgacaatgaggaggaggacaaggaggcggcacagctgcgggaggagcggctacggcagtacgcggagaagaaggccaagaagcctgcactggtggccaagtcctccatcctgctggatgtcaagcct

SEQ ID NO: 130976 - DNA, 1311 bp, Homo sapiens
  Payload ID: 5583
  Gene Symbol: EEF1D
  Gene Name: eukaryotic translation elongation factor 1 delta (guanine nucleotide exchange protein)
  Uniprot ID: P29692
  ENST ID: ENST00000529272
  CDS Start-End: 402-1247
cgcgcctgcgcgctggccgcctcgtgcgtcactcggcgcttgccggctgccggacccgcccccaccggcgacaccactggccgcgaagcgcagggggggcgcgcgcgctgccgcccgttcccagcacttgtgcagactcctccggggaagagcggcctccgcggtcatctccaacggaattctgcctttgaagtgtcggggcacggcgcgtcgagggtcctggcggccaggcggggcgtgtgcaagggtcgcgtcccccccccgggcccccggcccgtggctcttggtagagcccagtgcttcatttcccgtgcgcggcccgggcggccctccctttcatcagtcttcccgcgtccgccgattcctcctccttggtcgccgcgtccttggctggcgtaaaaatggctacaaacttcctagcacatgagaagatctggttcgacaagttcaaatatgacgacgcagaaaggagattctacgagcagatgaacgggcctgtggcaggtgcctcccgccaggagaacggcgccagcgtgatcctccgtgacattgcgagagccagagagaacatccagaaatccctggctggaagctcaggccccggggcctccagcggcaccagcggagaccacggtgagctcgtcgtccggattgccagtctggaagtggagaaccagagtctgcgtggcgtggtacaggagctgcagcaggccatctccaagctggaggcccggctgaacgtgctggagaagagctcgcctggccaccgggccacggccccacagacccagcacgtatctcccatgcgccaagtggagcccccagccaagaagccagccacaccagcagaggatgacgaggatgatgacattgacctgtttggcagtgacaatgaggaggaggacaaggaggcggcacagctgcgggaggagcggctacggcagtacgcggagaagaaggccaagaagcctgcactggtggccaagtcctccatcctgctggatgtcaagccttgggatgatgagacggacatggcccagctggaggcctgtgtgcgctctatccagctggacgggctggtctggggggcttccaagctggtgcccgtgggctacggtatccggaagctacagattcagtgtgtggtggaggacgacaaggtggggacagacttgctggaggaggagatcaccaagtttgaggagcacgtgcagagtgtcgatatcgcagctttcaacaagatctgaagcctgagtgtgtgtacgtgcgcgcgtgcgtgaggccctgccacgattaaagactgagaccggc

SEQ ID NO: 130977 - DNA, 424 bp, Homo sapiens
  Payload ID: 5583
  Gene Symbol: EEF1D
  Gene Name: eukaryotic translation elongation factor 1 delta (guanine nucleotide exchange protein)
  ENST ID: ENST00000529576
  CDS Start-End: 1-360
ggcagtgacaatgaggaggaggacaaggaggcggcacagctgcgggaggagcggctacggcagtacgcggagaagaaggccaagaagcctgcactggtggccaagtcctccatcctgctggatgtcaagccttgggatgatgagacggacatggcccagctggaggcctgtgtgcgctctatccagctggacgggctggtctggggggcttccaagctggtgcccgtgggctacggtatccggaagctacagattcagtgtgtggtggaggacgacaaggtggggacagacttgctggaggaggagatcaccaagtttgaggagcacagtgtcgatatcgcagctttcaacaagatctgaagcctgagtgtgtgtacgtgcgcgcgtgcgtgaggccctgccacgattaaagactgagaccggc

SEQ ID NO: 130978 - DNA, 533 bp, Homo sapiens
  Payload ID: 5583
  Gene Symbol: EEF1D
  Gene Name: eukaryotic translation elongation factor 1 delta (guanine nucleotide exchange protein)
  ENST ID: ENST00000530109
  CDS Start-End: 1-469
tcccctgtggcagcacgtatctcccatgcgccaagtggagcccccagccaagaagccagccacaccagcagaggatgacgaggatgatgacattgacctgtttggcagtgacaatgaggaggaggacaaggaggcggcacagctgcgggaggagcggctacggcagtacgcggagaagaaggccaagaagcctgcactggtggccaagtcctccatcctgctggatgtcaagccttgggatgatgagacggacatggcccagctggaggcctgtgtgcgctctatccagctggacgggctggtctggggggcttccaagctggtgcccgtgggctacggtatccggaagctacagattcagtgtgtggtggaggacgacaaggtggggacagacttgctggaggaggagatcaccaagtttgaggagcacgtgcagagtgtcgatatcgcagctttcaacaagatctgaagcctgagtgtgtgtacgtgcgcgcgtgcgtgaggccctgccacgattaaagactgagaccggc

SEQ ID NO: 130979 - DNA, 770 bp, Homo sapiens
  Payload ID: 5583
  Gene Symbol: EEF1D
  Gene Name: eukaryotic translation elongation factor 1 delta (guanine nucleotide exchange protein)
  ENST ID: ENST00000526340
  CDS Start-End: 582-770
cgtccgccgattcctcctccttggtcgccgcgtccttggctggcgtatgtgtggagacctccaggccgtgcagcaccttggtggccacagctctccaggatgtcctcaccttcctcagggccctgccctcctgacctggagtgttctggaaagctcctcctgagcttggataaactgcaggagcgaaggggctgaccgtttgtcgggacgcagttgaaagagtcgctgtgtcctgctccgggctctcctgctggagaggagaggcttgcacgtgcctgtcgtctgcgcaagctttgaagctcagacttggtctctgttaggagagatggtgcgctgcgtccggcagggcctgcctaggctccaactgacagtaatcccaagagctcccctttcaggggatgacggagtgacgtcacctgtgtggactcagctgccacctgggattgtggtggcggcgggtctgtctggcgctcagcttccatctccaccagtgtcacctccacaccacctcgccaagcagcttctggaaaggcccccggccgccccgggctgacctgctgctgtgtctgacccgcagaaaaatggctacaaacttcctagcacatgagaagatctggttcgacaagttcaaatatgacgacgcagaaaggagattctacgagcagatgaacgggcctgtggcaggtgcctcccgccaggagaacggcgccagcgtgatcctccgtgacattgcgagagccagagagaacatccagaaatccctggctgga

SEQ ID NO: 130980 - DNA, 367 bp, Homo sapiens
  Payload ID: 5583
  Gene Symbol: EEF1D
  Gene Name: eukaryotic translation elongation factor 1 delta (guanine nucleotide exchange protein)
  ENST ID: ENST00000526133
  CDS Start-End: 258-367
gggagcactgtctcacggcgcatcccggtcgtggaagcccctcggccaggctgctggggcctaaggcctgtgtttgctgccgtctccgtgggagaccagacatctgccccagctgtttctctggcctgcagaccttcgtacaccacgtctttgtcaagcaccagttactgcacgcatcagctgagcacggaggggataggcacggacgcaacacttttggaacttagacgctagtgagcacggaaaggaataagcctatgaggagcgggaaggcctcctgcaccctggagaccgtgtgggaagacaagcacaagtatgaggaggccgagcggcgcttctacgaacacgaggccacacaggcggccgc

SEQ ID NO: 130981 - DNA, 1084 bp, Homo sapiens
  Payload ID: 5583
  Gene Symbol: EEF1D
  Gene Name: eukaryotic translation elongation factor 1 delta (guanine nucleotide exchange protein)
  Uniprot ID: P29692
  ENST ID: ENST00000524624
  CDS Start-End: 255-1028
ctccctttcatcagtcttcccgcgtccgccgattcctcctccttggtcgccgcgtccttggctggcgtgggatgacggagtgacgtcacctgtgtggactcagctgccacctgggattgtggtggcggcgggtctgtctggcgctcagcttccatctccaccagtgtcacctccacaccacctcgccaagcagcttctggaaaggcccccggccgccccgggctgacctgctgctgtgtctgacccgcagaaaaatggctacaaacttcctagcacatgagaagatctggttcgacaagttcaaatatgacgacgcagaaaggagattctacgagcagatgaacgggcctgtggcaggtgcctcccgccagagctcaggccccggggcctccagcggcaccagcggagaccacggtgagctcgtcgtccggattgccagtctggaagtggagaaccagagtctgcgtggcgtggtacaggagctgcagcaggccatctccaagctggaggcccggctgaacgtgctggagaagagctcgcctggccaccgggccacggccccacagacccagcacgtatctcccatgcgccaagtggagcccccagccaagaagccagccacaccagcagaggatgacgaggatgatgacattgacctgtttggcagtgacaatgaggaggaggacaaggaggcggcacagctgcgggaggagcggctacggcagtacgcggagaagaaggccaagaagcctgcactggtggccaagtcctccatcctgctggatgtcaagccttgggatgatgagacggacatggcccagctggaggcctgtgtgcgctctatccagctggacgggctggtctggggggcttccaagctggtgcccgtgggctacggtatccggaagctacagattcagtgtgtggtggaggacgacaaggtggggacagacttgctggaggaggagatcaccaagtttgaggagcacgtgcagagtgtcgatatcgcagctttcaacaagatctgaagcctgagtgtgtgtacgtgcgcgcgtgcgtgaggccctgccacgattaaagactg

SEQ ID NO: 130982 - DNA, 506 bp, Homo sapiens
  Payload ID: 5583
  Gene Symbol: EEF1D
  Gene Name: eukaryotic translation elongation factor 1 delta (guanine nucleotide exchange protein)
  ENST ID: ENST00000531953
  CDS Start-End: 359-506
actgtctcacggcgcatcccggtcgtggaagcccctcggccaggctgctggggcctaaggcctgtgtttgctgccgtctccgtgggagaccagacatctgccccagctgtttctctggcctgcagaccttcgtacaccacgtctttgtcaagcaccagttactgcacgcatcagctgagcacggaggggataggcacggacgcaacacttttggaacttagacgctatagagacagggtttcaacgtgttagccaggatggtctcagtctccagaccctgtgatccgcccgcctcggcctcccaaagtgttgggattacaggtgtgagccaccgtgcctggccgaggctccttcttttatgaggagcgggaaggcctcctgcaccctggagaccgtgtgggaagacaagcacaagtatgaggaggccgagcggcgcttctacgaacacgaggccacacaggcggccgcctccgcccagcagctgccagccgaggggccagccatga

SEQ ID NO: 130983 - DNA, 861 bp, Homo sapiens
  Payload ID: 5583
  Gene Symbol: EEF1D
  Gene Name: eukaryotic translation elongation factor 1 delta (guanine nucleotide exchange protein)
  ENST ID: ENST00000529007
  CDS Start-End: 48-440
ccgattcctcctccttggtcgccgcgtccttggctggcgtcagaaaaatggctacaaacttcctagcacatgagaagatctggttcgacaagttcaaatatgacgacgcagaaaggagattctacgagcagatgaacgggcctgtggcaggtgcctcccgccaggagaacggcgccagcgtgatcctccgtgacattgcgagagccagagagaacatccagaaatccctggctggaagctcaggccccggggcctccagcggcaccagcggagaccacggtgagctcgtcgtccggattgccagtctggaagtggagaaccagagtctgcgtggcgtggtacaggagctgcagcaggccatctccaagctggaggcccggctgaacgtgctggagaagagctcgcctggccaccgggccacggccccacagacccagtgacaatgaggaggaggacaaggaggcggcacagctgcgggaggagcggctacggcagtacgcggagaagaaggccaagaagcctgcactggtggccaagtcctccatcctgctggatgtcaagccttgggatgatgagacggacatggcccagctggaggcctgtgtgcgctctatccagctggacgggctggtctggggggcttccaagctggtgcccgtgggctacggtatccggaagctacagattcagtgtgtggtggaggacgacaaggtggggacagacttgctggaggaggagatcaccaagtttgaggagcacgtgcagagtgtcgatatcgcagctttcaacaagatctgaagcctgagtgtgtgtacgtgcgcgcgtgcgtgaggccctgccacgattaaagactgagaccgg

SEQ ID NO: 130984 - DNA, 553 bp, Homo sapiens
  Payload ID: 5583
  Gene Symbol: EEF1D
  Gene Name: eukaryotic translation elongation factor 1 delta (guanine nucleotide exchange protein)
  ENST ID: ENST00000528519
  CDS Start-End: 82-553
acaatgccctgtctcctgggctcttgctcccaccccacccccaacccacaacccctgcctctgcccatcagcctggccttgatgaggagcgggaaggcctcctgcaccctggagaccgtgtgggaagacaagcacaagtatgaggaggccgagcggcgcttctacgaacacgaggccacacaggcggccgcctccgcccagcagctgccagccgaggggccagccatgaatgggcccggccaggacgaccctgaggacgctgatgaggcggaagcccctgacggcggcagcaggcgtgatcccaggaagagccaggacagcaggaagcccctgcagaaaaagaggaagcgctcccccaagagcgggctcggccccgcggacctggccctcctgggcctctcggccgaacgcgtgtggctggacaagtcacttttcgaccaggcagagagctcctaccgccagaagctggcagatgtggctgcccaggcagcctggcctcctgccttggccccttggggtctctgcacccatggaaaccaggtggcctgccacc

SEQ ID NO: 130985 - DNA, 926 bp, Homo sapiens
  Payload ID: 5583
  Gene Symbol: EEF1D
  Gene Name: eukaryotic translation elongation factor 1 delta (guanine nucleotide exchange protein)
  Uniprot ID: P29692
  ENST ID: ENST00000526838
  CDS Start-End: 74-862
ccctttcatcagtcttcccgcgtccgccgattcctcctccttggtcgccgcgtccttggctggcgtcagaaaaatggctacaaacttcctagcacatgagaagatctggttcgacaagttcaaatatgacgacgcagaaaggagattctacgagcagatgaacgggcctgtggcaggtgcctcccgccaggagaacggcgccagcgtgatcctccgtgacattgcgagagccagagagaacatccagaaatccctggctggaagctcaggccccggggcctccagcggcaccagcggagaccacgtggtacaggagctgcagcaggccatctccaagctggaggcccggctgaacgtgctggagaagagctcgcctggccaccgggccacggccccacagacccagcacgtatctcccatgcgccaagtggagcccccagccaagaagccagccacaccagcagaggatgacgaggatgatgacattgacctgtttggcagtgacaatgaggaggaggacaaggaggcggcacagctgcgggaggagcggctacggcagtacgcggagaagaaggccaagaagcctgcactggtggccaagtcctccatcctgctggatgtcaagccttgggatgatgagacggacatggcccagctggaggcctgtgtgcgctctatccagctggacgggctggtctggggggcttccaagctggtgcccgtgggctacggtatccggaagctacagattcagtgtgtggtggaggacgacaaggtggggacagacttgctggaggaggagatcaccaagtttgaggagcacgtgcagagtgtcgatatcgcagctttcaacaagatctgaagcctgagtgtgtgtacgtgcgcgcgtgcgtgaggccctgccacgattaaagactgagaccggc

SEQ ID NO: 130986 - DNA, 853 bp, Homo sapiens
  Payload ID: 5583
  Gene Symbol: EEF1D
  Gene Name: eukaryotic translation elongation factor 1 delta (guanine nucleotide exchange protein)
  ENST ID: ENST00000530191
  CDS Start-End: 242-853
gtcttcccgcgtccgccgattcctcctccttggtcgccgcgtccttggctggcgtaaagctcctcctgagcttggataaactgcaggagcgaaggggctgaccgtttgtcgggacgcagttgaaagagtcgctgtgtcctgctccgggctctcctgctggagaggagaggcttgcacgtgcctgtcgtctgcgcaagctttgaagctcagacttggtctctgttaggagagatgcagaaaaatggctacaaacttcctagcacatgagaagatctggttcgacaagttcaaatatgacgacgcagaaaggagattctacgagcagatgaacgggcctgtggcaggtgcctcccgccaggagaacggcgccagcgtgatcctccgtgacattgcgagagccagagagaacatccagaaatccctggctggaagctcaggccccggggcctccagcggcaccagcggagaccacggtgagctcgtcgtccggattgccagtctggaagtggagaaccagagtctgcgtggcgtggtacaggagctgcagcaggccatctccaagctggaggcccggctgaacgtgctggagaagagctcgcctggccaccgggccacggccccacagacccagcacgtatctcccatgcgccaagtggagcccccagccaagaagccagccacaccagcagaggatgacgaggatgatgacattgacctgtttggcagtgacaatgaggaggaggacaaggaggcggcacagctgcgggaggagcggctacggcagtacgcggagaagaaggccaagaagcctgcactggtggccaagtcctccatcctgctggatgtcaagcct

SEQ ID NO: 130987 - DNA, 535 bp, Homo sapiens
  Payload ID: 5583
  Gene Symbol: EEF1D
  Gene Name: eukaryotic translation elongation factor 1 delta (guanine nucleotide exchange protein)
  ENST ID: ENST00000526135
  CDS Start-End: 376-535
gggatgacggagtgacgtcacctgtgtggactcagctgccacctgggattgtggtggcggcgggtctgtctggcgctcagcttccatctccaccagtgtcacctccacaccacctcgccaagcagcttctggaaaggcccccggccgccccgggctgacctgctgctgtgtctgacccggttagtctttctggctgcctctaaccttgctgcttttccttcatgctgtcctaggaggccaaagcaaaagacagggtttcaacgtgttagccaggatggtctcagtctccagaccctgtgatccgcccgcctcggcctcccaaagtgttgggattacaggtgtgagccaccgtgcctggccgaggctccttcttttatgaggagcgggaaggcctcctgcaccctggagaccgtgtgggaagacaagcacaagtatgaggaggccgagcggcgcttctacgaacacgaggccacacaggcggccgcctccgcccagcagctgccagccgaggggccagccatgaatgggcccggcc

SEQ ID NO: 130988 - DNA, 308 bp, Homo sapiens
  Payload ID: 5583
  Gene Symbol: EEF1D
  Gene Name: eukaryotic translation elongation factor 1 delta (guanine nucleotide exchange protein)
  ENST ID: ENST00000528382
  CDS Start-End: 199-308
agatctggttcgacaagttcaaatatgacgacgcagaaaggagattctacgagcagatgaacgggcctgtggcaggaggcggcacagctgcgggaggagcggctacggcagtacgcggagaagaaggccaagaagcctgcactggtggccaagtcctccatcctgctggatgtcaagccttgggatgatgagacggacatggcccagctggaggcctgtgtgcgctctatccagctggacgggctggtctggggggcttccaagctggtgcccgtgggctacggtatccggaagctacagattcagtg

SEQ ID NO: 130989 - DNA, 1217 bp, Homo sapiens
  Payload ID: 5583
  Gene Symbol: EEF1D
  Gene Name: eukaryotic translation elongation factor 1 delta (guanine nucleotide exchange protein)
  ENST ID: ENST00000530445
  CDS Start-End: 720-1217
ctgagatcaggagttcaagaccagcctggccaacatggtgaaaccttgtctactaaaaatacaaaaaattagccaggcacagtggtgtgcactggtagtcccagttactcgggaggctgaggcaggaaaatcgcttgaacccaggaggcggacgttgcggtgagccgagatcgcgccgctgattccagcctgggcgacaagagtgagactccatctcacacaaaaaaaaaataacaaaaaaactcagaaatgctaagtgtacttatttgttgaagaaacttgttacatattactaacatcttttttttttatgagaaatacttttcccataaccaaaaaattcagtgagcagaatggccttgcttgaggtttttgcaaatctctcgggtgtctggcttagtgggaggcagctgggccctcatacctgcctccgcacttcagctgtttgacataaacccagcttcgtgtgagtgaaagggaagggcctggggaccctcagaggttctcggaccacactttgagaactcctcgtctggaagacaggcctggggatgccatgtggggtgagggcttacgggcttggtgtcgctttgtggagaaccgctggtgtctgaagcgggtgtcagccccactgcaccttggtgcttctgggctgtcctgatgccgaggcccacttcccagccatgctgactttgcctctttcccctcccagcagaaaaatggctacaaacttcctagcacatgagaagatctggttcgacaagttcaaatatgacgacgcagaaaggagattctacgagcagatgaacgggcctgtggcaggtgcctcccgccaggagaacggcgccagcgtgatcctccgtgacattgcgagagccagagagaacatccagaaatccctggctggaagctcaggccccggggcctccagcggcaccagcggagaccacggtgagctcgtcgtccggattgccagtctggaagtggagaaccagagtctgcgtggcgtggtacaggagctgcagcaggccatctccaagctggaggcccggctgaacgtgctggagaagagctcgcctggccaccgggccacggccccacagacccagcacgtatctcccatgcgccaagtggagcccccagccaagaagccagccacaccagcagaggatgacgaggatgatgacattgacctgtttggcagtgacaatgaggag

SEQ ID NO: 130990 - DNA, 614 bp, Homo sapiens
  Payload ID: 5583
  Gene Symbol: EEF1D
  Gene Name: eukaryotic translation elongation factor 1 delta (guanine nucleotide exchange protein)
  ENST ID: ENST00000531931
  CDS Start-End: 509-614
ccctttcatcagtcttcccgcgtccgccgattcctcctccttggtcgccgcgtccttggctggcgtgtgagtaccgcggcccccgccggaaggagtcgggcgcgacagagacgcccgaggggccgggagggcgggcggcccgggctgcgccagaagctcgcgccgttagggactgaggcacaagtgcgccagcgcgggcttaggggccgtgggccaagtgcggcacttggggcgagcgcagagaggcggggcgacggaggccacgtggccggcttggagggcgtccgcgggacgggggcgccgggagcactgtctcacggcgcatcccggtcgtggaagcccctcggccaggctgctggggcctaaggcctgtgtttgctgccgtctccgtgggagaccagacatctgccccagctgtttctctggcctgcagaccttcgtacaccacgtctttgtcaagcaccagttactgcacgcatcagctgagcacggaggggatagcagaaaaatggctacaaacttcctagcacatgagaagatctggttcgacaagttcaaatatgacgacgcagaaaggagattctacgagcagatgaacgggcctgtggcaggtg

SEQ ID NO: 130991 - DNA, 600 bp, Homo sapiens
  Payload ID: 5583
  Gene Symbol: EEF1D
  Gene Name: eukaryotic translation elongation factor 1 delta (guanine nucleotide exchange protein)
  ENST ID: ENST00000529832
  CDS Start-End: 163-600
ctccctttcatcagtcttcccgcgtccgccgattcctcctccttggtcgccgcgtccttggctggcgttagagacagggtttcaacgtgttagccaggatggtctcagtctccagaccctgtgatccgcccgcctcggcctcccaaagtgttgggattacagatgaggagcgggaaggcctcctgcaccctggagaccgtgtgggaagacaagcacaagtatgaggaggccgagcggcgcttctacgaacacgaggccacacaggcggccgcctccgcccagcagctgccagccgaggggccagccatgaatgggcccggccaggacgaccctgaggacgctgatgaggcggaagcccctgacggcggcagcaggcgtgatcccaggaagagccaggacagcaggaagcccctgcagaaaaagaggaagcgctcccccaagagcgggctcggccccgcggacctggccctcctgggcctctcggccgaacgcgtgtggctggacaagtcacttttcgaccaggcagagagctcctaccgccagaagctggcagatgtggctgcccaggcagcctggcctcctgccttggccccttggggt

SEQ ID NO: 130992 - DNA, 957 bp, Homo sapiens
  Payload ID: 5583
  Gene Symbol: EEF1D
  Gene Name: eukaryotic translation elongation factor 1 delta (guanine nucleotide exchange protein)
  ENST ID: ENST00000524397
  CDS Start-End: 244-636
cagtcttcccgcgtccgccgattcctcctccttggtcgccgcgtccttggctggcgtaaagctcctcctgagcttggataaactgcaggagcgaaggggctgaccgtttgtcgggacgcagttgaaagagtcgctgtgtcctgctccgggctctcctgctggagaggagaggcttgcacgtgcctgtcgtctgcgcaagctttgaagctcagacttggtctctgttaggagagatgcagaaaaatggctacaaacttcctagcacatgagaagatctggttcgacaagttcaaatatgacgacgcagaaaggagattctacgagcagatgaacgggcctgtggcaggtgcctcccgccaggagaacggcgccagcgtgatcctccgtgacattgcgagagccagagagaacatccagaaatccctggctggaagctcaggccccggggcctccagcggcaccagcggagaccacggtgagctcgtcgtccggattgccagtctggaagtggagaaccagagtctgcgtggcgtggtacaggagctgcagcaggccatctccaagctggaggcccggctgaacgtgctggagaagagctcgcctggccaccgggccacggccccacagacccagtgacaatgaggaggaggacaaggaggcggcacagctgcgggaggagcggctacggcagtacgcggagaagaaggccaagaagcctgcactggtggccaagtcctccatcctgctggatgtcaagccttgggatgatgagacggacatggcccagctggaggcctgtgtgcgctctatccagctggacgggctggtctggggggcttccaagctggtgcccgtgggctacggtatccggaagctacagattcagtgtgtggtggaggacgacaaggtggggacagacttgctggaggaggagatcaccaagtttgaggagcacgt

SEQ ID NO: 130993 - DNA, 2207 bp, Homo sapiens; identical to SEQ ID NO: 130947
  Payload ID: 5583
  Gene Symbol: EEF1D
  Gene Name: eukaryotic translation elongation factor 1 delta (guanine nucleotide exchange protein)
  Uniprot ID: P29692
  ENST ID: ENST00000619144
  CDS Start-End: 200-2143

SEQ ID NO: 130994 - DNA, 2238 bp, Homo sapiens
  Payload ID: 5583
  Gene Symbol: EEF1D
  Gene Name: eukaryotic translation elongation factor 1 delta (guanine nucleotide exchange protein)
  ENST ID: ENST00000619198
  CDS Start-End: 343-2238
gacaccactggccgcgaagcgcagggggggcgcgcgcgctgccgcccgttcccagcacttgtgcagactcctccggggaagagcggcctccgcggtcatctccaacggaattctgcctttgaagtgtcggggcacggcgcgtcgagggtcctggcggccaggcggggcgtgtgcaagggtcgcgtcccccccccgggcccccggcccgtggctcttggtagagcccagtgcttcatttcccgtgcgcggcccgggcggccctccctttcatcagtcttcccgcgtccgccgattcctcctccttggtcgccgcgtccttggctggcgtgaggccaaagcaaaatgaggagcgggaaggcctcctgcaccctggagaccgtgtgggaagacaagcacaagtatgaggaggccgagcggcgcttctacgaacacgaggccacacaggcggccgcctccgcccagcagctgccagccgaggggccagccatgaatgggcccggccaggacgaccctgaggacgctgatgaggcggaagcccctgacggcggcagcaggcgtgatcccaggaagagccaggacagcaggaagcccctgcagaaaaagaggaagcgctcccccaagagcgggctcggccccgcggacctggccctcctgggcctctcggccgaacgcgtgtggctggacaagtcacttttcgaccaggcagagagctcctaccgccagaagctggcagatgtggctgcccaggcagcctggcctcctgccttggccccttggggtctctgcacccatggaaaccaggtggcctgccaccacgtgacctgggggatctgggtcaacaagtcctccttcgaccaggctgagcgggccttcgtggagtggtctcaggccctgttgctggcccccgacggcagccgcaggcaggggactcccaacacaggccagcaggtggccgtccccgacctggcccaccagcccagcccaccggtcaatggccagcccccgctgggcagcctgcaggcactggttcgggaggtgtggctggagaagccccggtatgatgcagccgagaggggcttctacgaggccctgtttgacggccatcccccagggaaggtgcgcctgcaagagcgagccggcctggccgagggtgcccggcggggccgcagagaccggcggggccgcaacatcttagggaacaagcgggccgggctgcgacgggccgatggggaggccccctctgccttgccctactgttacttcctgcagaaggatgcagaggccccctggctcagcaagcctgcctacgacagcgccgagtgccgccaccacgctgccgaggccctgcgggtggcctggtgcctcgaagctgcctccctgtctcaccgacccggtcctcggtctggcctgtccgtgtccagcctgagacccaacagaaaaatggctacaaacttcctagcacatgagaagatctggttcgacaagttcaaatatgacgacgcagaaaggagattctacgagcagatgaacgggcctgtggcaggtgcctcccgccaggagaacggcgccagcgtgatcctccgtgacattgcgagagccagagagaacatccagaaatccctggctggaagctcaggccccggggcctccagcggcaccagcggagaccacggtgagctcgtcgtccggattgccagtctggaagtggagaaccagagtctgcgtggcgtggtacaggagctgcagcaggccatctccaagctggaggcccggctgaacgtgctggagaagagctcgcctggccaccgggccacggccccacagacccagcacgtatctcccatgcgccaagtggagcccccagccaagaagccagccacaccagcagaggatgacgaggatgatgacattgacctgtttggcagtgacaatgaggaggaggacaaggaggcggcacagctgcgggaggagcggctacggcagtacgcggagaagaaggccaagaagcctgcactggtggccaagtcctccatcctgctggatgtcaagccttgggatgatgagacggacatggcccagctggaggcctgtgtgcgctctatccagctggacgggctggtctggggggcttccaagctggtgcccgtgggctacggtatccggaagctacagattcagtgtgtgggaggacgacaaggtggggacagacttgctggaggaggagatcaccaagtttga

SEQ ID NO: 130995 - DNA, 1249 bp, Homo sapiens; identical to SEQ ID NO: 130945
  Payload ID: 5583
  Gene Symbol: EEF1D
  Gene Name: eukaryotic translation elongation factor 1 delta (guanine nucleotide exchange protein)
  Uniprot ID: P29692
  ENST ID: ENST00000614575
  CDS Start-End: 340-1185

SEQ ID NO: 130996 - DNA, 1452 bp, Homo sapiens; identical to SEQ ID NO: 130946
  Payload ID: 5583
  Gene Symbol: EEF1D
  Gene Name: eukaryotic translation elongation factor 1 delta (guanine nucleotide exchange protein)
  Uniprot ID: P29692
  ENST ID: ENST00000615067
  CDS Start-End: 512-1357

SEQ ID NO: 130997 - DNA, 2378 bp, Homo sapiens; identical to SEQ ID NO: 130948
  Payload ID: 5583
  Gene Symbol: EEF1D
  Gene Name: eukaryotic translation elongation factor 1 delta (guanine nucleotide exchange protein)
  Uniprot ID: P29692
  ENST ID: ENST00000620155
  CDS Start-End: 340-2283

SEQ ID NO: 130998 - DNA, 1458 bp, Homo sapiens; identical to SEQ ID NO: 130944
  Payload ID: 5583
  Gene Symbol: EEF1D
  Gene Name: eukaryotic translation elongation factor 1 delta (guanine nucleotide exchange protein)
  Uniprot ID: P29692
  ENST ID: ENST00000615698
  CDS Start-End: 518-1363

SEQ ID NO: 130999 - DNA, 2238 bp, Homo sapiens; identical to SEQ ID NO: 130994
  Payload ID: 5583
  Gene Symbol: EEF1D
  Gene Name: eukaryotic translation elongation factor 1 delta (guanine nucleotide exchange protein)
  ENST ID: ENST00000618139
  CDS Start-End: 343-2238

SEQ ID NO: 131000 - DNA, 926 bp, Homo sapiens; identical to SEQ ID NO: 130969
  Payload ID: 5583
  Gene Symbol: EEF1D
  Gene Name: eukaryotic translation elongation factor 1 delta (guanine nucleotide exchange protein)
  ENST ID: ENST00000633090
  CDS Start-End: 390-926

SEQ ID NO: 131001 - DNA, 558 bp, Homo sapiens; identical to SEQ ID NO: 130964
  Payload ID: 5583
  Gene Symbol: EEF1D
  Gene Name: eukaryotic translation elongation factor 1 delta (guanine nucleotide exchange protein)
  ENST ID: ENST00000633857
  CDS Start-End: 495-558

SEQ ID NO: 131002 - DNA, 616 bp, Homo sapiens; identical to SEQ ID NO: 130951
  Payload ID: 5583
  Gene Symbol: EEF1D
  Gene Name: eukaryotic translation elongation factor 1 delta (guanine nucleotide exchange protein)
  ENST ID: ENST00000633887
  CDS Start-End: 365-616

SEQ ID NO: 131003 - DNA, 1311 bp, Homo sapiens; identical to SEQ ID NO: 130976
  Payload ID: 5583
  Gene Symbol: EEF1D
  Gene Name: eukaryotic translation elongation factor 1 delta (guanine nucleotide exchange protein)
  Uniprot ID: P29692
  ENST ID: ENST00000632587
  CDS Start-End: 402-1247

SEQ ID NO: 131004 - DNA, 787 bp, Homo sapiens; identical to SEQ ID NO: 130974
  Payload ID: 5583
  Gene Symbol: EEF1D
  Gene Name: eukaryotic translation elongation factor 1 delta (guanine nucleotide exchange protein)
  ENST ID: ENST00000632115
  CDS Start-End: 192-787

SEQ ID NO: 131005 - DNA, 1217 bp, Homo sapiens; identical to SEQ ID NO: 130989
  Payload ID: 5583
  Gene Symbol: EEF1D
  Gene Name: eukaryotic translation elongation factor 1 delta (guanine nucleotide exchange protein)
  ENST ID: ENST00000634156
  CDS Start-End: 720-1217

SEQ ID NO: 131006 - DNA, 1001 bp, Homo sapiens; identical to SEQ ID NO: 130968
  Payload ID: 5583
  Gene Symbol: EEF1D
  Gene Name: eukaryotic translation elongation factor 1 delta (guanine nucleotide exchange protein)
  ENST ID: ENST00000632423
  CDS Start-End: 217-1001

SEQ ID NO: 131007 - DNA, 614 bp, Homo sapiens; identical to SEQ ID NO: 130990
  Payload ID: 5583
  Gene Symbol: EEF1D
  Gene Name: eukaryotic translation elongation factor 1 delta (guanine nucleotide exchange protein)
  ENST ID: ENST00000631585
  CDS Start-End: 509-614

SEQ ID NO: 131008 - DNA, 573 bp, Homo sapiens
  Payload ID: 5583
  Gene Symbol: EEF1D
  Gene Name: eukaryotic translation elongation factor 1 delta (guanine nucleotide exchange protein)
  ENST ID: ENST00000631763
  CDS Start-End: 414-573
gattcctcctccttggtcgccgcgtccttggctggcgtgggatgacggagtgacgtcacctgtgtggactcagctgccacctgggattgtggtggcggcgggtctgtctggcgctcagcttccatctccaccagtgtcacctccacaccacctcgccaagcagcttctggaaaggcccccggccgccccgggctgacctgctgctgtgtctgacccggttagtctttctggctgcctctaaccttgctgcttttccttcatgctgtcctaggaggccaaagcaaaagacagggtttcaacgtgttagccaggatggtctcagtctccagaccctgtgatccgcccgcctcggcctcccaaagtgttgggattacaggtgtgagccaccgtgcctggccgaggctccttcttttatgaggagcgggaaggcctcctgcaccctggagaccgtgtgggaagacaagcacaagtatgaggaggccgagcggcgcttctacgaacacgaggccacacaggcggccgcctccgcccagcagctgccagccgaggggccagccatgaatgggcccggcc

SEQ ID NO: 131009 - DNA, 555 bp, Homo sapiens; identical to SEQ ID NO: 130963
  Payload ID: 5583
  Gene Symbol: EEF1D
  Gene Name: eukaryotic translation elongation factor 1 delta (guanine nucleotide exchange protein)
  ENST ID: ENST00000631688
  CDS Start-End: 351-555

SEQ ID NO: 131010 - DNA, 343 bp, Homo sapiens; identical to SEQ ID NO: 130950
  Payload ID: 5583
  Gene Symbol: EEF1D
  Gene Name: eukaryotic translation elongation factor 1 delta (guanine nucleotide exchange protein)
  ENST ID: ENST00000632733
  CDS Start-End: 156-343

SEQ ID NO: 131011 - DNA, 840 bp, Homo sapiens; identical to SEQ ID NO: 130959
  Payload ID: 5583
  Gene Symbol: EEF1D
  Gene Name: eukaryotic translation elongation factor 1 delta (guanine nucleotide exchange protein)
  ENST ID: ENST00000631650
  CDS Start-End: 61-777

SEQ ID NO: 131012 - DNA, 923 bp, Homo sapiens; identical to SEQ ID NO: 130955
  Payload ID: 5583
  Gene Symbol: EEF1D
  Gene Name: eukaryotic translation elongation factor 1 delta (guanine nucleotide exchange protein)
  Uniprot ID: P29692
  ENST ID: ENST00000632675
  CDS Start-End: 86-859

SEQ ID NO: 131013 - DNA, 553 bp, Homo sapiens; identical to SEQ ID NO: 130984
  Payload ID: 5583
  Gene Symbol: EEF1D
  Gene Name: eukaryotic translation elongation factor 1 delta (guanine nucleotide exchange protein)
  ENST ID: ENST00000633928
  CDS Start-End: 82-553

SEQ ID NO: 131014 - DNA, 367 bp, Homo sapiens; identical to SEQ ID NO: 130980
  Payload ID: 5583
  Gene Symbol: EEF1D
  Gene Name: eukaryotic translation elongation factor 1 delta (guanine nucleotide exchange protein)
  ENST ID: ENST00000631875
  CDS Start-End: 258-367

SEQ ID NO: 131015 - DNA, 770 bp, Homo sapiens
  Payload ID: 5583
  Gene Symbol: EEF1D
  Gene Name: eukaryotic translation elongation factor 1 delta (guanine nucleotide exchange protein)
  ENST ID: ENST00000633686
  CDS Start-End: 266-770
ctccttggtcgccgcgtccttggctggcgtggcctgcctaggctccaactgacagtaatcccaagagctcccctttcaggggatgacggagtgacgtcacctgtgtggactcagctgccacctgggattgtggtggcggcgggtctgtctggcgctcagcttccatctccaccagtgtcacctccacaccacctcgccaagcagcttctggaaaggcccccggccgccccgggctgacctgctgctgtgtctgacccgcagaaaaatggctacaaacttcctagcacatgagaagatctggttcgacaagttcaaatatgacgacgcagaaaggagattctacgagcagatgaacgggcctgtggcaggtgcctcccgccaggagaacggcgccagcgtgatcctccgtgacattgcgagagccagagagaacatccagaaatccctggctggaagctcaggccccggggcctccagcggcaccagcggagaccacggtgagctcgtcgtccggattgccagtctggaagtggagaaccagagtctgcgtggcgtggtacaggagctgcagcaggccatctccaagctggaggcccggctgaacgtgctggagaagagctcgcctggccaccgggccacggccccacagacccagcacgtatctcccatgcgccaagtggagcccccagccaagaagccagccacaccagcagaggatgacgaggatgatgacattgacctgtttggcagtgacaatgaggaggaggaca

SEQ ID NO: 131016 - DNA, 559 bp, Homo sapiens; identical to SEQ ID NO: 130949
  Payload ID: 5583
  Gene Symbol: EEF1D
  Gene Name: eukaryotic translation elongation factor 1 delta (guanine nucleotide exchange protein)
  ENST ID: ENST00000632626
  CDS Start-End: 316-559

SEQ ID NO: 131017 - DNA, 853 bp, Homo sapiens; identical to SEQ ID NO: 130986
  Payload ID: 5583
  Gene Symbol: EEF1D
  Gene Name: eukaryotic translation elongation factor 1 delta (guanine nucleotide exchange protein)
  ENST ID: ENST00000632402
  CDS Start-End: 242-853

SEQ ID NO: 131018 - DNA, 828 bp, Homo sapiens; identical to SEQ ID NO: 130962
  Payload ID: 5583
  Gene Symbol: EEF1D
  Gene Name: eukaryotic translation elongation factor 1 delta (guanine nucleotide exchange protein)
  ENST ID: ENST00000633394
  CDS Start-End: 287-828

SEQ ID NO: 131019 - DNA, 600 bp, Homo sapiens; identical to SEQ ID NO: 130991
  Payload ID: 5583
  Gene Symbol: EEF1D
  Gene Name: eukaryotic translation elongation factor 1 delta (guanine nucleotide exchange protein)
  ENST ID: ENST00000632241
  CDS Start-End: 163-600

SEQ ID NO: 131020 - DNA, 1084 bp, Homo sapiens; identical to SEQ ID NO: 130981
  Payload ID: 5583
  Gene Symbol: EEF1D
  Gene Name: eukaryotic translation elongation factor 1 delta (guanine nucleotide exchange protein)
  Uniprot ID: P29692
  ENST ID: ENST00000632965
  CDS Start-End: 255-1028

SEQ ID NO: 131021 - DNA, 770 bp, Homo sapiens; identical to SEQ ID NO: 130979
  Payload ID: 5583
  Gene Symbol: EEF1D
  Gene Name: eukaryotic translation elongation factor 1 delta (guanine nucleotide exchange protein)
  ENST ID: ENST00000633697
  CDS Start-End: 582-770

SEQ ID NO: 131022 - DNA, 538 bp, Homo sapiens; identical to SEQ ID NO: 130965
  Payload ID: 5583
  Gene Symbol: EEF1D
  Gene Name: eukaryotic translation elongation factor 1 delta (guanine nucleotide exchange protein)
  ENST ID: ENST00000633259
  CDS Start-End: 445-538

SEQ ID NO: 131023 - DNA, 996 bp, Homo sapiens; identical to SEQ ID NO: 130973
  Payload ID: 5583
  Gene Symbol: EEF1D
  Gene Name: eukaryotic translation elongation factor 1 delta (guanine nucleotide exchange protein)
  ENST ID: ENST00000632238
  CDS Start-End: 96-996

SEQ ID NO: 131024 - DNA, 419 bp, Homo sapiens; identical to SEQ ID NO: 130970
  Payload ID: 5583
  Gene Symbol: EEF1D
  Gene Name: eukaryotic translation elongation factor 1 delta (guanine nucleotide exchange protein)
  ENST ID: ENST00000632659
  CDS Start-End: 57-356

SEQ ID NO: 131025 - DNA, 473 bp, Homo sapiens; identical to SEQ ID NO: 130954
  Payload ID: 5583
  Gene Symbol: EEF1D
  Gene Name: eukaryotic translation elongation factor 1 delta (guanine nucleotide exchange protein)
  ENST ID: ENST00000633641
  CDS Start-End: 55-473

SEQ ID NO: 131026 - DNA, 610 bp, Homo sapiens; identical to SEQ ID NO: 130953
  Payload ID: 5583
  Gene Symbol: EEF1D
  Gene Name: eukaryotic translation elongation factor 1 delta (guanine nucleotide exchange protein)
  ENST ID: ENST00000634157
  CDS Start-End: 1-330

SEQ ID NO: 131027 - DNA, 791 bp, Homo sapiens; identical to SEQ ID NO: 130972
  Payload ID: 5583
  Gene Symbol: EEF1D
  Gene Name: eukaryotic translation elongation factor 1 delta (guanine nucleotide exchange protein)
  ENST ID: ENST00000633396
  CDS Start-End: 675-791

SEQ ID NO: 131028 - DNA, 842 bp, Homo sapiens; identical to SEQ ID NO: 130975
  Payload ID: 5583
  Gene Symbol: EEF1D
  Gene Name: eukaryotic translation elongation factor 1 delta (guanine nucleotide exchange protein)
  ENST ID: ENST00000631863
  CDS Start-End: 231-842

SEQ ID NO: 131029 - DNA, 926 bp, Homo sapiens; identical to SEQ ID NO: 130985
  Payload ID: 5583
  Gene Symbol: EEF1D
  Gene Name: eukaryotic translation elongation factor 1 delta (guanine nucleotide exchange protein)
  Uniprot ID: P29692
  ENST ID: ENST00000631698
  CDS Start-End: 74-862

SEQ ID NO: 131030 - DNA, 506 bp, Homo sapiens; identical to SEQ ID NO: 130982
  Payload ID: 5583
  Gene Symbol: EEF1D
  Gene Name: eukaryotic translation elongation factor 1 delta (guanine nucleotide exchange protein)
  ENST ID: ENST00000633476
  CDS Start-End: 359-506

SEQ ID NO: 131031 - DNA, 813 bp, Homo sapiens; identical to SEQ ID NO: 130958
  Payload ID: 5583
  Gene Symbol: EEF1D
  Gene Name: eukaryotic translation elongation factor 1 delta (guanine nucleotide exchange protein)
  ENST ID: ENST00000632162
  CDS Start-End: 43-813

SEQ ID NO: 131032 - DNA, 583 bp, Homo sapiens; identical to SEQ ID NO: 130967
  Payload ID: 5583
  Gene Symbol: EEF1D
  Gene Name: eukaryotic translation elongation factor 1 delta (guanine nucleotide exchange protein)
  ENST ID: ENST00000633058
  CDS Start-End: 197-583

SEQ ID NO: 131033 - DNA, 761 bp, Homo sapiens; identical to SEQ ID NO: 130961
  Payload ID: 5583
  Gene Symbol: EEF1D
  Gene Name: eukaryotic translation elongation factor 1 delta (guanine nucleotide exchange protein)
  ENST ID: ENST00000631850
  CDS Start-End: 191-761

SEQ ID NO: 131034 - DNA, 617 bp, Homo sapiens; identical to SEQ ID NO: 130952
  Payload ID: 5583
  Gene Symbol: EEF1D
  Gene Name: eukaryotic translation elongation factor 1 delta (guanine nucleotide exchange protein)
  ENST ID: ENST00000633339
  CDS Start-End: 57-617

SEQ ID NO: 131035 - DNA, 1077 bp, Homo sapiens
  Payload ID: 5584
  Gene Symbol: EEF1E1
  Gene Name: eukaryotic translation elongation factor 1 epsilon 1
  Uniprot ID: O43324
  ENST ID: ENST00000379715
  CDS Start-End: 58-582
aatgcgggaggttcttgttctgcaggtctcgcgtctgccaggagctacggccggaagatggcggcggccgcagagttgtcgctactggagaagtccctgggactgagtaaggggaataaatacagtgctcagggcgagcgacagattccagttcttcagacaaacaatggtccaagtctaacaggattgactactatagcagctcatctagtcaagcaagccaacaaagaatatttgctggggagtactgcagaagaaaaagcaatcgttcagcagtggttagaatacagggtcactcaagtagatgggcactccagtaaaaatgacatccacacactgttgaaggatcttaattcatatcttgaagataaagtctaccttacagggtataactttacattagcagatatactattgtactatggacttcatcgctttatagttgacctgacagttcaagaaaaggagaaatatcttaatgtgtctcgctggttttgtcacattcagcattatccaggcatcaggcaacatctgtctagtgttgtcttcatcaagaacagactatatactaattcccactagaagctgtccatgccatacagaagatctattaaaaatgttttaaatggaaaatgtactctagaccacaggactaatgtaaattaatatacagtcattcattatttgttgaagttgatagaatttttgaagtgtaaacttgtgtctgaatgttttatttgttctttagctgaagttttgcaatttttatgtcaaaattcaattgctattaaacaagttgagatccagttataaattaaccttgtttttagtagatgacatttatttcaataaaagttgcaaatcgggcttaatcttaaaattggtggtcatttcaatggttgacatatttggctatttattaacctctctttcatattctaaaattcattttccccttatggatatttatggtagtttgttaagaactgataaattgtgccaaggaagccaaaagggaagacagatggatttgttttaaaatatttatgtgagctagtaaatgtggttgaaaaaata

SEQ ID NO: 131036 - DNA, 562 bp, Homo sapiens
  Payload ID: 5584
  Gene Symbol: EEF1E1
  Gene Name: eukaryotic translation elongation factor 1 epsilon 1
  Uniprot ID: O43324
  ENST ID: ENST00000429723
  CDS Start-End: 28-447
gcgtctgccaggagctacggccggaagatggcggcggccgcagagttgtcgctactggagaagtccctgggactgagtaaggggaataaatacagtgctcagggcgagcgacagattccagttcttcagacaaacaatggtccaagtctaacaggattgactactatagcagctcatctagtcaagcaagccaacaaagaatatttgctggggagtactgcagaagaaaaagcaatcgttcagcagtggttagaatacagggtcactcaagtagatgggcactccagtaaaaatgacatccacacactgttgaaggatcttaattcatatcttgaagataaagtctaccttacagggtataactttacattagcagatatactattgtactatggacttcatcgctttataataaggaagctgaggcacacagaggtagggaactaacccaacatcatacaaggaactgagatcaaggaactgagattcaaacacaaatgtctggctcaaacttacctgtaaactactctacatggagtgccataaaattctgcttaattaa

SEQ ID NO: 131037 - DNA, 654 bp, Homo sapiens
  Payload ID: 5584
  Gene Symbol: EEF1E1
  Gene Name: eukaryotic translation elongation factor 1 epsilon 1
  ENST ID: ENST00000507463
  CDS Start-End: 39-491
ctgcaggtctcgcgtctgccaggagctacggccggaagatggcggcggccgcagagttgtcgctactggagaagtccctgggactgagtaaggggaataaatacagtgctcagggcgagcgacagattccagttcttcagacaaacaatggtccaagtctaacaggattgactactatagcagctcatctagtcaagcaagccaacaaagaatatttgctggggagtactgcagaagaaaaagcaatcgttcagcagtggttagaatacagggtcactcaagtagatgggcactccagtaaaaatgacatccacacactgttgaaggatcttaattcatatcttgaagataaagtctaccttacagggtataactttacattagcagatatactattgtactatggacttcatcgctttatagtgagtatttgtatagttactggctttttttctgtagtgttgagaatgatttttaaaactttgtcttgaatttaaatcagatttgcatttttggcttatcaaataaaaatgaaaggaattcctttatacaaggtgccttttgtaacaaacctgcacgttgtgcacatgtaccctaaaacttaaagtataataataataaaatttaaaaaaactttgtcttgaatttaaatca

SEQ ID NO: 131038 - DNA, 443 bp, Homo sapiens
  Payload ID: 5584
  Gene Symbol: EEF1E1
  Gene Name: eukaryotic translation elongation factor 1 epsilon 1
  ENST ID: ENST00000488226
  CDS Start-End: 160-443
gttatagctaacagggtgccaggtagcaccgtgctgggtctggggaatacaatgatgatttaggggaacatgcttcctcctctcaggcagcttgctttttggccaggtggacaaacattgcaaccatttaaattggaagagtgccacgttgcaccataaatggcagagagaacacctaaggagtcttggcccaatctaggggattcggggaaggcgtttctaaagccttggattatcagtttaagtgttacgacccacagtgaatgcgggaaacatcacaagattccagttcttcagacaaacaatggtccaagtctaacaggattgactactatagcagctcatctagtcaagcaagccaacaaagaatatttgctggggagtactgcagaagaaaaagcaatcgttcagcagtggttagaatacagggtcactcaagtaga

SEQ ID NO: 131039 - DNA, 460 bp, Homo sapiens
  Payload ID: 5584
  Gene Symbol: EEF1E1
  Gene Name: eukaryotic translation elongation factor 1 epsilon 1
  ENST ID: ENST00000515633
  CDS Start-End: 1-171
gtagatgggcactccagtaaaaatgacatccacacactgttgaaggttctcactctgtcacccaggctggaatgcaatggcgtaatcttggctcactgcaacctccgcctcctgggttcaagtgattctcgtgcctcagcctcccgagtaaatgggattacaggatcttaattcatatcttgaagataaagtctaccttacagggtataactttacattagcagatatactattgtactatggacttcatcgctttatagtgagtatttgtatagttactggctttttttctgtagtgttgagaatgatttttaaaactttgtcttgaatttaaatcagatttgcatttttggcttatcaaataaaaatgaaaggaattcctttatacaaggtgccttttgtaacaaacctgcacgttgtgcacatgtaccctaaaacttaaagtataataataataaaa

SEQ ID NO: 131040 - DNA, 591 bp, Homo sapiens
  Payload ID: 5584
  Gene Symbol: EEF1E1
  Gene Name: eukaryotic translation elongation factor 1 epsilon 1
  ENST ID: ENST00000502429
  CDS Start-End: 1-410
tgggactgagtaaggggaataaatacagtgctcagggcgagcgacagattccagttcttcagacaaacaatggtccaagtctaacaggattgactactatagcagctcatctagtcaagcaagccaacaaagaatatttgctggggagtactgcagaagaaaaagcaatcgttcagcagtggttagaatacagggtcactcaagtagatgggcactccagtaaaaatgacatccacacactgttgaaggatcttaattcatatcttgaagataaagtctaccttacagggtataactttacattagcagatatactattgtactatggacttcatcgctttatagcaaatcatgattgttttgtttataagaaaatgaggattgtaacaggcccccatgtttgtctctgaagtgactgagtcaggagacttcacaggccaggtgtgtgggcacaggcatgcctcattttactgcatcttcatcttcaacacatggaaggtttgtggcaaccctgcttcgagcgagactattggcaccatttttccgtcggcttgtgcttgcttcatgtctctgtgtcacattttggtaatt

SEQ ID NO: 131041 - DNA, 1523 bp, Homo sapiens
  Payload ID: 5585
  Gene Symbol: EEF1G
  Gene Name: eukaryotic translation elongation factor 1 gamma
  Uniprot ID: P26641
  ENST ID: ENST00000329251
  CDS Start-End: 132-1445
gtcttctgtttcgtcctcgctttccggctgctgtttctccacggctctcctctttccccctcccttctctcccgggcggcttactttgcggcagcgccgagaaccccaccccctttctttgcggaatcaccatggcggctgggaccctgtacacgtatcctgaaaactggagggccttcaaggctctcatcgctgctcagtacagcggggctcaggtccgcgtgctctccgcaccaccccacttccattttggccaaaccaaccgcacccctgaatttctccgcaaatttcctgccggcaaggtcccagcatttgagggtgatgatggattctgtgtgtttgagagcaacgccattgcctactatgtgagcaatgaggagctgcggggaagtactccagaggcagcagcccaggtggtgcagtgggtgagctttgctgattccgatatagtgcccccagccagtacctgggtgttccccaccttgggcatcatgcaccacaacaaacaggccactgagaatgcaaaggaggaagtgaggcgaattctggggctgctggatgcttacttgaagacgaggacttttctggtgggcgaacgagtgacattggctgacatcacagttgtctgcaccctgttgtggctctataagcaggttctagagccttctttccgccaggcctttcccaataccaaccgctggttcctcacctgcattaaccagccccagttccgggctgtcttgggcgaagtgaaactgtgtgagaagatggcccagtttgatgctaaaaagtttgcagagacccaacctaaaaaggacacaccacggaaagagaagggttcacgggaagagaagcagaagccccaggctgagcggaaggaggagaaaaaggcggctgcccctgctcctgaggaggagatggatgaatgtgagcaggcgctggctgctgagcccaaggccaaggaccccttcgctcacctgcccaagagtacctttgtgttggatgaatttaagcgcaagtactccaatgaggacacactctctgtggcactgccatatttctgggagcactttgataaggacggctggtccctgtggtactcagagtatcgcttccctgaagaactcactcagaccttcatgagctgcaatctcatcactggaatgttccagcgactggacaagctgaggaagaatgccttcgccagtgtcatcctttttggaaccaacaatagcagctccatttctggagtctgggtcttccgaggccaggagcttgcctttccgctgagtccagattggcaggtggactacgagtcatacacatggcggaaactggatcctggcagcgaggagacccagacgctggttcgagagtacttttcctgggagggggccttccagcatgtgggcaaagccttcaatcagggcaagatcttcaagtgaacatctcttgccatcacctagctgcctgcacctgcccttcagggagatgggggtcattaaaggaaactgaacattgaa

SEQ ID NO: 131042 - DNA, 3164 bp, Homo sapiens
  Payload ID: 5586
  Gene Symbol: EEF2
  Gene Name: eukaryotic translation elongation factor 2
  Uniprot ID: P13639
  ENST ID: ENST00000309311
  CDS Start-End: 90-2666
agcgttctcttccgccgtcgtcgccgccatcctcggcgcgactcgcttctttcggttctacctgggagaatccaccgccatccgccaccatggtgaacttcacggtagaccagatccgcgccatcatggacaagaaggccaacatccgcaacatgtctgtcatcgcccacgtggaccatggcaagtccacgctgacagactccctggtgtgcaaggcgggcatcatcgcctcggcccgggccggggagacacgcttcactgatacccggaaggacgagcaggagcgttgcatcaccatcaagtcaactgccatctccctcttctacgagctctcggagaatgacttgaacttcatcaagcagagcaaggacggtgccggcttcctcatcaacctcattgactcccccgggcatgtcgacttctcctcggaggtgactgctgccctccgagtcaccgatggcgcattggtggtggtggactgcgtgtcaggcgtgtgcgtgcagacggagacagtgctgcggcaggccattgccgagcgcatcaagcctgtgctgatgatgaacaagatggaccgcgccctgctggagctgcagctggagcccgaggagctctaccagactttccagcgcatcgtggagaacgtgaacgtcatcatctccacctacggcgagggcgagagcggccccatgggcaacatcatgatcgatcctgtcctcggtaccgtgggctttgggtctggcctccacgggtgggccttcaccctgaagcagtttgccgagatgtatgtggccaagttcgccgccaagggggagggccagttggggcctgccgagcgggccaagaaagtagaggacatgatgaagaagctgtggggtgacaggtactttgacccagccaacggcaagttcagcaagtcagccaccagccccgaagggaagaagctgccacgcaccttctgccagctgatcctggaccccatcttcaaggtgtttgatgcgatcatgaatttcaagaaagaggagacagcaaaactgatagagaaactggacatcaaactggacagcgaggacaaggacaaagaaggcaaacccctgctgaaggctgtgatgcgccgctggctgcctgccggagacgccttgttgcagatgatcaccatccacctgccctcccctgtgacggcccagaagtaccgctgcgagctcctgtacgaggggcccccggacgacgaggctgccatgggcattaaaagctgtgaccccaaaggccctcttatgatgtatatttccaaaatggtgccaacctccgacaaaggtcggttctacgcctttggacgagtcttctcggggctggtctccactggcctgaaggtcaggatcatggggcccaactatacccctgggaagaaggaggacctctacctgaagccaatccagagaacaatcttgatgatgggccgctacgtggagcccatcgaggatgtgccttgtgggaacattgtgggcctcgtgggcgtggaccagttcctggtgaagacgggcaccatcaccaccttcgagcacgcgcacaacatgcgggtgatgaagttcagcgtcagccctgttgtcagagtggccgtggaggccaagaacccggctgacctgcccaagctggtggaggggctgaagcggctggccaagtccgaccccatggtgcagtgcatcatcgaggagtcgggagagcatatcatcgcgggcgccggcgagctgcacctggagatctgcctgaaggacctggaggaggaccacgcctgcatccccatcaagaaatctgacccggtcgtctcgtaccgcgagacggtcagtgaagagtcgaacgtgctctgcctctccaagtcccccaacaagcacaaccggctgtacatgaaggcgcggcccttccccgacggcctggccgaggacatcgataaaggcgaggtgtccgcccgtcaggagctcaagcagcgggcgcgctacctggccgagaagtacgagtgggacgtggctgaggcccgcaagatctggtgctttgggcccgacggcaccggccccaacatcctcaccgacatcaccaagggtgtgcagtacctcaacgagatcaaggacagtgtggtggccggcttccagtgggccaccaaggagggcgcactgtgtgaggagaacatgcggggtgtgcgcttcgacgtccacgacgtcaccctgcacgccgacgccatccaccgcggagggggccagatcatccccacagcacggcgctgcctctatgccagtgtgctgaccgcccagccacgcctcatggagcccatctaccttgtggagatccagtgtccagagcaggtggtcggtggcatctacggggttttgaacaggaagcggggccacgtgttcgaggagtcccaggtggccggcacccccatgtttgtggtcaaggcctatctgcccgtcaacgagtcctttggcttcaccgctgacctgaggtccaacacgggcggccaggcgttcccccagtgtgtgtttgaccactggcagatcctgcccggagaccccttcgacaacagcagccgccccagccaggtggtggcggagacccgcaagcgcaagggcctgaaagaaggcatccctgccctggacaacttcctggacaaattgtaggcggcccttcctgcagcgcctgccgccccggggactcgcagcacccacagcaccacgtcctcgaattctcagacgacacctggagactgtcccgacacagcgacgctcccctgagaggtttctggggcccgctgcgtgccatcactcaaccataacacttgatgccgtttctttcaatatttatttccagagtccggaggcagcagacacgccctcttagtagggacttaatgggccggtcggggagggggaggcgggatgggacacccaacactttttccatttcttcagagggaaactcagatgtccaaactaattttaacaaacgcattaagaggtttatttgggtacatggcccgcagtggcttttgccccagaaaggggaaaggaacacgcgggtagatgatttctagcaggcaggaagtcctgtgcggtgtcaccatgagcacctccagctgtactagtgccattggaataataaatttgataaggtggtga

SEQ ID NO: 131043 - DNA, 352 bp, Homo sapiens
  Payload ID: 5586
  Gene Symbol: EEF2
  Gene Name: eukaryotic translation elongation factor 2
  ENST ID: ENST00000600794
  CDS Start-End: 1-256
tgaagagtcgaacgtgctctgcctctccaagtcccccaacaagcacaaccggctgtacatgaaggcgcggcccttccccgacggcctggccgaggacatcgataaaggcgggatgggacacccaacactttttccatttcttcagagggaaactcagatgtccaaactaattttaacaaacgcattaagaggtttatttgggtacatggcccgcagtggcttttgccccagaaaggggaaaggaacacgcgggtagatgatttctagcaggcaggaagtcctgtgcggtgtcaccatgagcacctccagctgtactagtgccattggaataataaatttgataaggtggtga

SEQ ID NO: 131044 - DNA, 2330 bp, Homo sapiens
  Payload ID: 5587
  Gene Symbol: EIF1
  Gene Name: eukaryotic translation initiation factor 1
  Uniprot ID: P41567
  ENST ID: ENST00000469257
  CDS Start-End: 147-488
cactgagccgccgccgaggattcagcagcctcccccttgagccccctcgcttcccgacgttccgttcccccctgcccgccttctcccgccaccgccgccgccgccttccgcaggccgtttccaccgaggaaaaggaatcgtatcgtatgtccgctatccagaacctccactctttcgacccctttgctgatgcaagtaagggtgatgacctgcttcctgctggcactgaggattatatccatataagaattcaacagagaaacggcaggaagacccttactactgtccaagggatcgctgatgattacgataaaaagaaactagtgaaggcgtttaagaaaaagtttgcctgcaatggtactgtaattgagcatccggaatatggagaagtaattcagctacagggtgaccaacgcaagaacatatgccagttcctcgtagagattggactggctaaggacgatcagctgaaggttcatgggttttaagtgcttgtggctcactgaagcttaagtgaggatttccttgcaatgagtagaatttcccttctctcccttgtcacaggtttaaaaacctcacagcttgtataatgtaaccatttggggtccgcttttaacttggactagtgtaactccttcatgcaataaactgaaaagagccatgctgtctagtcttgaagtccctcatttaaacagaggtcaagcaataggcgcctggcagtgtcaagcctgaaaccaagcaataccgtcatgtttcagccaagcccagagccctaagattacaaacaactatggccggaacctcctcagctctccctctgcagagttccctaccctaagagaatgttaccacctgaacagtcctcggtgaatctgagaggagaggatggggtaaggcagaagcaccagctgtactactagaagggagcttttggtggtagatcccctggtgtctccaacctgactaggtggacagagctcaaagaggccctcttaccgctagcgaggtgataggacatctggcttgccacaaaggtctgttcgaccagacatatcctagctaagggatgtccaaacatcagaatgtgaggccaaccttctatcagagttaaacttttgacaagggaacaaatctcaaactgatccatcagtcatgtagctagctgtagagcttgcaacttaatagcagcagctgcccaatgccatgtgaagtaacaaactggtttttggtttttttttccccttcagttttaatgttatgtgtaatgtatttaaacccttatttaaataaaacttgttttcagaaatacctgacttgcagattatttatatatagtcgatcttgtgcatataaaggaaccatagaaatgggcagtggaggattcgtccacacccacagcttctcaacgggcctgaatttggccaagaaaaacctttatgagcttgtccctctctggtcaactggttttttgttcgtttgttttttgagacaggtttgcccttgttgcccaggctggagtgcagtggcacaatctcggctcactgcaacctccacctcaggttcaagcaattgtcgtgcctcagcctccctagtagctgggattacaggcaccatgcccagctaacttttgtatttttagtagagacagggtttctccatgttggccaggctggtcttgaacacctggcctcaagtgatctgcctgtcttggcctcccaaagtgctgggattacaggcatgagccaccatgcccagcaggtcaactgtttttgcaagcatttagccagagtcatgctgtgctgttaatcagtgtcctggagaatgggttgcttggaaatcttggcgccccctcagtagtaacagccttggtttaagggcgcagagtggagagtaaatgcaagggctataacaagggcattcatgctgtgggttaagatccacaaatcgctaggaatgtgtatactctgggtagtaagtttgtagtattagaaggtttaatgacaagtatttgaagagctgaagttaagtgttgggaggccatcccttatgaaggacaatgaatggcaagtaaaagaccaagttctgttcctgggtccattaatttagttaaaaaggcaaagttctttcagcacacatatctgcatgcagtcacgtgctgcctaaggatgcttcattcaacaatgagcctcacagccgtgctacacaataagattataatactgtatttttactgtaccttttaacattgtgttacaatggcctacaagaagcttgtgtggatggctttgaatgtggcccaacacgaactaataaattttgctaaaacatga

SEQ ID NO: 131045 - DNA, 797 bp, Homo sapiens
  Payload ID: 5587
  Gene Symbol: EIF1
  Gene Name: eukaryotic translation initiation factor 1
  ENST ID: ENST00000591776
  CDS Start-End: 153-518
cccagtcactgagccgccgccgaggattcagcagcctcccccttgagccccctcgcttcccgacgttccgttcccccctgcccgccttctcccgccaccgccgccgccgccttccgcaggccgtttccaccgaggaaaaggaatcgtatcgtatgtccgctatccagaacctccactctttcgacccctttgctgatgcaagtaagggtgatgacctgcttcctgctggcactgaggattatatccatataagaattcaacagagaaacggcaggaagacccttactactgtccaagggatcgctgatgattacgataaaaagaaactagtgaaggcgtttaagaaaaagtttgcctgcaatggtactgtaattgagcatccggaatatggagaagtaattcagctacagggtgaccaacgcaagaacatatgccagttcctcgtagagattggactggctaaggacgatcagctgaaggttcatgggtttaaaaacctcacagcttgtataatgtaaccatttggggtccgcttttaacttggactagtgtaactccttcatgcaataaactgaaaagagccatgctgtctagtcttgaagtccctcatttaaacagaggtcaagcaataggcgcctggcagtgtcaagcctgaaaccaagcaataccgtcatgtttcagccaagcccagagccctaagattacaaacaactatggccggaacctcctcagctctccctctgcagagttccctaccctaagagaatgttaccacctgaacagtcctcggtgaatct

SEQ ID NO: 131046 - DNA, 572 bp, Homo sapiens
  Payload ID: 5587
  Gene Symbol: EIF1
  Gene Name: eukaryotic translation initiation factor 1
  ENST ID: ENST00000586699
  CDS Start-End: 1-162
gattacgataaaaagaaactagtgaaggcgtttaagaaaaagtttgcctgcaatggtactgtaattgagcatccggaatatggagaagtaattcagctacagggtgaccaacgcaagaacatatgccagttcctcgtagaggtgagttcagtcactacttgatttgtgcctctctgctggcaaatctcagatcctgtctgttagcttctgctggggacataaaagttggctttgtaaggctgagcaaaacctcagttgggttttaaagtacatagacttatttctgttttataggaaaaagcagaagggacttgtctacctttggtttactgtttctgtggatctacttcacagatgcaaatttgaatagcatatagatgcattgtaaaataagccaaatgctgggttgttcctgtatttgtaaggacatgagtttttaaaaatgaatttcctgagtattaatactaaaatactgttacatgatcagctcttgatataattgaagagatttcagatacctgatgagtctcattctcacactaattcagaaccttggaaggcactgagtgttc

SEQ ID NO: 131047 - DNA, 2887 bp, Homo sapiens
  Payload ID: 5588
  Gene Symbol: EIF1AD
  Gene Name: eukaryotic translation initiation factor 1A domain containing
  Uniprot ID: Q8N9N8
  ENST ID: ENST00000312234
  CDS Start-End: 336-833
agtacggttttcggagggatcagactcagactcacgtcgcactcctcgcagttggactggtgggaactgggaacactggagacctgatttctaactgacgctaccgtcgcggccgccggcaagttcctttactgtgttttcttggttcagccttgaagtgagtcgtggacgatcctctctcagcgtccagcctagacggcggtgttgctccggcagcgttcctgggagccgagggccagagactaagttcctgggttctgagcctgccatccaaggaactcaggaggaggagttgacagtctcttcgttcctaaccagtgtgggacgacttcagcatgtctcaggccaccaagaggaagcatgtggtgaaggaggtgctaggggagcacatagtgccctccgaccagcagcagattgtcagggtactcaggaccccagggaacaatctgcatgaggtggagacagcccaagggcagcgcttcctggtgagcatgccctccaaataccgcaagaacatctggatcaagagaggggactttctcattgttgaccccattgaagagggagaaaaggtgaaggctgaaatctcgtttgtgctctgcaaggaccacgtgcgctctctgcagaaggaggggttttggcctgaggccttctctgaagtggctgagaaacacaacaacaggaacagacaaactcaaccagaactcccagctgagccacagttatcaggagaggagtccagctcagaagatgattctgacctgtttgttaacacaaaccgcagacagtatcatgagagtgaggaggagagtgaagaggaggaggcagcctgagactccaggacccaattctccacttgctcagggactggcccctggctcttctgggcttggacattcccagggtgctctgcacatcttcacccctgcatgaggacaaagcagggctcctctctgaactgatcttttgattcagagaattaaacccctggtgggttggtgacttgttctggtgtctgagtggctctctcgggggagggagattgtgatgaagtgaaaaactgctccctatttattagagaccttgtgggtgggtgggctgaatggggaggaaatgggaaatggctggagtctttcccaggtggtttgttctttcttattgggcacttagaaagtgccaggccgtgctctgggccttcttgcatgtgtttaacagctgggagcactcctgcttccttgcctgcttgcagttcataccaatttaagcattcaggatgacagccctaggacctaacacccacctgcctctaagagacgctcaggagcccatggtgcctcgtgctgttctccccgcctttctagtcaccctgtgtacgggagtgctcacctccagctactgtgtccatccccacatacgacctcatctctcccactctgcaccatctatcacttccagaaggtggctggcaaatctctctatccttaactttgttttgaatggtccatccatctcctgactttatttgaaacctgattattccctgaggacattgattgtcttataaccttttaaatagaggctgcttttccaccctcacccttcattcttctaaccagccctgacattctcatgagtaaccttctgccttcacttccctcttgtgtagcatcaattccgtagtccaccctacacccctctgtctccctccattctgttccgctagtaaaaccctaaccctgggtaaacccaatcattcacctctgtgcccaaacccaagtcaccatcattaggtgagaaaacagccagcctggccaccagttgtaccttacgtttatcattacaaacctcagatggacactaagcactgcccagcagatctactctgggatgtctgtttcaaaacttctgtcttatctatcaattcccccttgtggtagttaccacaacacatgcctcattaagaaacagcaaccatcagagggaatgcctgcctccctgttaccagctctgcagatgtgcacatatcttcctgtcgtaagccaatgggacttaaaccttacctcttgtgttttggagactatctttttttttttttttttttttttgagagagtgtctccctgtgttgctcaggctggagtgcagtggtgtgatctcggctcactgtaaccttcacctactgggttcaagtaactctcctgcctcagcctcccgagtagcttggactacaggcgtgcaccaccacacctggctaactttttgtatttttagtagagacggggttttgccatgttgcccgggctggtctcgaactcctgaccttaaatgagcctcctgcctcagcctcccaaactgctgggattacaggcgtgtgccaccatgcctggctaatttttatattttcagtagagacgaggttttgccatgttggccaggctggtctcgaactcctgacctcaagtggtccacccaccttggcctcctagagtgctgggattacaggtgtgagccactgtgcccggcctcttttgctttcttaaagactttggtcgggtatttgtgttgttgagtattgtgtctgggtgtgggtatttgattctttttttgttttgtgtttttggctgtcctgtctattggatgtgatatgttatggatgtgatgtgttagtgtcgagcgtgctgtagaatctcccatttctgaaacaggcgtgaaaacctgtactgattcccacgtcctccagctaccacttcatttgtctgtttctcatttactttctcttatagcgtggctttaaacatatatacatttgtatatatgtatatatgaatataatgtataaaatgtatgtagatgtatatacaaaaaataaacgagatgggttaaagata

SEQ ID NO: 131048 - DNA, 588 bp, Homo sapiens
  Payload ID: 5588
  Gene Symbol: EIF1AD
  Gene Name: eukaryotic translation initiation factor 1A domain containing
  ENST ID: ENST00000527051
  CDS Start-End: 354-588
ttctcccttttctcctgtcttataaactagggaaaaggggaggttggagagaaactaagaaggccaacaggagaagtggtggcctcataccatactgtaacagtgctgagttagctgttatttttctgggacctagagaagttgaatagttaggaaataaaccaaggtaggatttgaatccaggcagttagacttcagaacccatgttcttaaccaagacaccgtgtcacccctcagtaaaaggcccctccccatcttcagaacagtcctgggttctgagcctgccatccaaggaactcaggaggaggagttgacagtctcttcgttcctaaccagtgtgggacgacttcagcatgtctcaggccaccaagaggaagcatgtggtgaaggaggtgctaggggagcacatagtgccctccgaccagcagcagattgtcagggtactcaggaccccagggaacaatctgcatgaggtggagacagcccaagggcagcgcttcctggtgagcatgccctccaaataccgcaagaacatctggatcaagagaggggactttctcattgttgaccccattgaagagggagaaa

SEQ ID NO: 131049 - DNA, 584 bp, Homo sapiens
  Payload ID: 5588
  Gene Symbol: EIF1AD
  Gene Name: eukaryotic translation initiation factor 1A domain containing
  ENST ID: ENST00000532707
  CDS Start-End: 245-584
agactcagactcacgtcgcactcctcgcagttggactggtgggaactgggaacactggagacctgatttctaactgacgctaccgtcgcggccgccggcaagttcctttactgtgttttcttggttcagccttgaagtgagtcgtggacgatcctctctcagcgtccagcctagacggcggtgttgctccggcagcgttcctgggagccgagggccagagactaagttgtgggacgacttcagcatgtctcaggccaccaagaggaagcatgtggtgaaggaggtgctaggggagcacatagtgccctccgaccagcagcagattgtcagggtactcaggaccccagggaacaatctgcatgaggtggagacagcccaagggcagcgcttcctggtgagcatgccctccaaataccgcaagaacatctggatcaagagaggggactttctcattgttgaccccattgaagagggagaaaaggtgaaggctgaaatctcgtttgtgctctgcaaggaccacgtgcgctctctgcagaaggaggggttttggcctgaggccttctctgaagtggctgagaaacaca

SEQ ID NO: 131050 - DNA, 965 bp, Homo sapiens
  Payload ID: 5588
  Gene Symbol: EIF1AD
  Gene Name: eukaryotic translation initiation factor 1A domain containing
  Uniprot ID: Q8N9N8
  ENST ID: ENST00000533544
  CDS Start-End: 362-859
acggttttcggagggatcagactcagactcacgtcgcactcctcgcagttggactggtgggaactgggaacactggagacctgatttctaactgacgctaccgtcgcggccgccggcaagttcctttactgtgttttcttggttcagccttgaagtgagtcgtggacgatcctctctcagcgtccagcctagacggcggtgttgctccggcagcgttcctgggagccgagggccagagactaagttaaaaggcccctccccatcttcagaacagtcctgggttctgagcctgccatccaaggaactcaggaggaggagttgacagtctcttcgttcctaaccagtgtgggacgacttcagcatgtctcaggccaccaagaggaagcatgtggtgaaggaggtgctaggggagcacatagtgccctccgaccagcagcagattgtcagggtactcaggaccccagggaacaatctgcatgaggtggagacagcccaagggcagcgcttcctggtgagcatgccctccaaataccgcaagaacatctggatcaagagaggggactttctcattgttgaccccattgaagagggagaaaaggtgaaggctgaaatctcgtttgtgctctgcaaggaccacgtgcgctctctgcagaaggaggggttttggcctgaggccttctctgaagtggctgagaaacacaacaacaggaacagacaaactcaaccagaactcccagctgagccacagttatcaggagaggagtccagctcagaagatgattctgacctgtttgttaacacaaaccgcagacagtatcatgagagtgaggaggagagtgaagaggaggaggcagcctgagactccaggacccaattctccacttgctcagggactggcccctggctcttctgggcttggacattcccagggtgctctgcacatcttcacccctgcatgaggacaa

SEQ ID NO: 131051 - DNA, 743 bp, Homo sapiens
  Payload ID: 5588
  Gene Symbol: EIF1AD
  Gene Name: eukaryotic translation initiation factor 1A domain containing
  ENST ID: ENST00000525767
  CDS Start-End: 192-533
cggaagtacggttttcggagggatcagactcagactcacgtcgcactcctcgcagttggactggtgggaactgggaacactggagacctgatttctaactgacgctaccgtcgcggccgccggtactcaggaccccagggaacaatctgcatgaggtggagacagcccaagggcagcgcttcctggtgagcatgccctccaaataccgcaagaacatctggatcaagagaggggactttctcattgttgaccccattgaagagggagaaaaggtgaaggctgaaatctcgtttgtgctctgcaaggaccacgtgcgctctctgcagaaggaggggttttggcctgaggccttctctgaagtggctgagaaacacaacaacaggaacagacaaactcaaccagaactcccagctgagccacagttatcaggagaggagtccagctcagaagatgattctgacctgtttgttaacacaaaccgcagacagtatcatgagagtgaggaggagagtgaagaggaggaggcagcctgagactccaggacccaattctccacttgctcagggactggcccctggctcttctgggcttggacattcccagggtgctctgcacatcttcacccctgcatgaggacaaagcagggctcctctctgaactgatcttttgattcagagaattaaacccctggtgggttggtgacttgttctggtgtctgagtggctctctcgggggagggagat

SEQ ID NO: 131052 - DNA, 889 bp, Homo sapiens
  Payload ID: 5588
  Gene Symbol: EIF1AD
  Gene Name: eukaryotic translation initiation factor 1A domain containing
  Uniprot ID: Q8N9N8
  ENST ID: ENST00000527249
  CDS Start-End: 360-857
cctccgagacagcgccggaagtacggttttcggagggatcagactcagactcacgtcgcactcctcgcagttggactggtgggaactgggaacactggagacctgatttctaactgacgctaccgtcgcggccgccggcaagttcctttactgtgttttcttggttcagccttgaagtgagtcgtggacgatcctctctcagcgtccagcctagacggcggtgttgctccggcagcgttcctgggagccgagggccagagactaagtaacagtcctgggttctgagcctgccatccaaggaactcaggaggaggagttgacagtctcttcgttcctaaccagtgtgggacgacttcagcatgtctcaggccaccaagaggaagcatgtggtgaaggaggtgctaggggagcacatagtgccctccgaccagcagcagattgtcagggtactcaggaccccagggaacaatctgcatgaggtggagacagcccaagggcagcgcttcctggtgagcatgccctccaaataccgcaagaacatctggatcaagagaggggactttctcattgttgaccccattgaagagggagaaaaggtgaaggctgaaatctcgtttgtgctctgcaaggaccacgtgcgctctctgcagaaggaggggttttggcctgaggccttctctgaagtggctgagaaacacaacaacaggaacagacaaactcaaccagaactcccagctgagccacagttatcaggagaggagtccagctcagaagatgattctgacctgtttgttaacacaaaccgcagacagtatcatgagagtgaggaggagagtgaagaggaggaggcagcctgagactccaggacccaattctccacttgctcagg

SEQ ID NO: 131053 - DNA, 580 bp, Homo sapiens
  Payload ID: 5588
  Gene Symbol: EIF1AD
  Gene Name: eukaryotic translation initiation factor 1A domain containing
  ENST ID: ENST00000530462
  CDS Start-End: 238-580
ggaagtacggttttcggagggatcagactcagactcacgtcgcactcctcgcagttggactggtgggaactgggaacactggagacctgatttctaactgacgctaccgtcgcggccgccgtaaaaggcccctccccatcttcagaacagtcctgggttctgagcctgccatccaaggaactcaggaggaggagttgacagtctcttcgttcctaaccagtgtgggacgacttcagcatgtctcaggccaccaagaggaagcatgtggtgaaggaggtgctaggggagcacatagtgccctccgaccagcagcagattgtcagggtactcaggaccccagggaacaatctgcatgaggtggagacagcccaagggcagcgcttcctggtgagcatgccctccaaataccgcaagaacatctggatcaagagaggggactttctcattgttgaccccattgaagagggagaaaaggtgaaggctgaaatctcgtttgtgctctgcaaggaccacgtgcgctctctgcagaaggaggggttttggcctgaggccttctctgaagtggctgagaaacacaaca

SEQ ID NO: 131054 - DNA, 808 bp, Homo sapiens
  Payload ID: 5588
  Gene Symbol: EIF1AD
  Gene Name: eukaryotic translation initiation factor 1A domain containing
  Uniprot ID: Q8N9N8
  ENST ID: ENST00000529964
  CDS Start-End: 145-642
agcgccggaagtacggttttcggagggatcagactcagactcacgtcgcactcctcgcagttggactggtgggaactgggaacactggagacctgatttctaactgacgctaccgtcgcggccgccgtgtgggacgacttcagcatgtctcaggccaccaagaggaagcatgtggtgaaggaggtgctaggggagcacatagtgccctccgaccagcagcagattgtcagggtactcaggaccccagggaacaatctgcatgaggtggagacagcccaagggcagcgcttcctggtgagcatgccctccaaataccgcaagaacatctggatcaagagaggggactttctcattgttgaccccattgaagagggagaaaaggtgaaggctgaaatctcgtttgtgctctgcaaggaccacgtgcgctctctgcagaaggaggggttttggcctgaggccttctctgaagtggctgagaaacacaacaacaggaacagacaaactcaaccagaactcccagctgagccacagttatcaggagaggagtccagctcagaagatgattctgacctgtttgttaacacaaaccgcagacagtatcatgagagtgaggaggagagtgaagaggaggaggcagcctgagactccaggacccaattctccacttgctcagggactggcccctggctcttctgggcttggacattcccagggtgctctgcacatcttcacccctgcatgaggacaaagcagggctcctctctgaactgatcttttgattcagagaattaaacccctggtgggttgg

SEQ ID NO: 131055 - DNA, 2761 bp, Homo sapiens
  Payload ID: 5588
  Gene Symbol: EIF1AD
  Gene Name: eukaryotic translation initiation factor 1A domain containing
  Uniprot ID: Q8N9N8
  ENST ID: ENST00000526451
  CDS Start-End: 210-707
gtacggttttcggagggatcagactcagactcacgtcgcactcctcgcagttggactggtgggaactgggaacactggagacctgatttctaactgacgctaccgtcgcggccgccgaacagtcctgggttctgagcctgccatccaaggaactcaggaggaggagttgacagtctcttcgttcctaaccagtgtgggacgacttcagcatgtctcaggccaccaagaggaagcatgtggtgaaggaggtgctaggggagcacatagtgccctccgaccagcagcagattgtcagggtactcaggaccccagggaacaatctgcatgaggtggagacagcccaagggcagcgcttcctggtgagcatgccctccaaataccgcaagaacatctggatcaagagaggggactttctcattgttgaccccattgaagagggagaaaaggtgaaggctgaaatctcgtttgtgctctgcaaggaccacgtgcgctctctgcagaaggaggggttttggcctgaggccttctctgaagtggctgagaaacacaacaacaggaacagacaaactcaaccagaactcccagctgagccacagttatcaggagaggagtccagctcagaagatgattctgacctgtttgttaacacaaaccgcagacagtatcatgagagtgaggaggagagtgaagaggaggaggcagcctgagactccaggacccaattctccacttgctcagggactggcccctggctcttctgggcttggacattcccagggtgctctgcacatcttcacccctgcatgaggacaaagcagggctcctctctgaactgatcttttgattcagagaattaaacccctggtgggttggtgacttgttctggtgtctgagtggctctctcgggggagggagattgtgatgaagtgaaaaactgctccctatttattagagaccttgtgggtgggtgggctgaatggggaggaaatgggaaatggctggagtctttcccaggtggtttgttctttcttattgggcacttagaaagtgccaggccgtgctctgggccttcttgcatgtgtttaacagctgggagcactcctgcttccttgcctgcttgcagttcataccaatttaagcattcaggatgacagccctaggacctaacacccacctgcctctaagagacgctcaggagcccatggtgcctcgtgctgttctccccgcctttctagtcaccctgtgtacgggagtgctcacctccagctactgtgtccatccccacatacgacctcatctctcccactctgcaccatctatcacttccagaaggtggctggcaaatctctctatccttaactttgttttgaatggtccatccatctcctgactttatttgaaacctgattattccctgaggacattgattgtcttataaccttttaaatagaggctgcttttccaccctcacccttcattcttctaaccagccctgacattctcatgagtaaccttctgccttcacttccctcttgtgtagcatcaattccgtagtccaccctacacccctctgtctccctccattctgttccgctagtaaaaccctaaccctgggtaaacccaatcattcacctctgtgcccaaacccaagtcaccatcattaggtgagaaaacagccagcctggccaccagttgtaccttacgtttatcattacaaacctcagatggacactaagcactgcccagcagatctactctgggatgtctgtttcaaaacttctgtcttatctatcaattcccccttgtggtagttaccacaacacatgcctcattaagaaacagcaaccatcagagggaatgcctgcctccctgttaccagctctgcagatgtgcacatatcttcctgtcgtaagccaatgggacttaaaccttacctcttgtgttttggagactatctttttttttttttttttttttttgagagagtgtctccctgtgttgctcaggctggagtgcagtggtgtgatctcggctcactgtaaccttcacctactgggttcaagtaactctcctgcctcagcctcccgagtagcttggactacaggcgtgcaccaccacacctggctaactttttgtatttttagtagagacggggttttgccatgttgcccgggctggtctcgaactcctgaccttaaatgagcctcctgcctcagcctcccaaactgctgggattacaggcgtgtgccaccatgcctggctaatttttatattttcagtagagacgaggttttgccatgttggccaggctggtctcgaactcctgacctcaagtggtccacccaccttggcctcctagagtgctgggattacaggtgtgagccactgtgcccggcctcttttgctttcttaaagactttggtcgggtatttgtgttgttgagtattgtgtctgggtgtgggtatttgattctttttttgttttgtgtttttggctgtcctgtctattggatgtgatatgttatggatgtgatgtgttagtgtcgagcgtgctgtagaatctcccatttctgaaacaggcgtgaaaacctgtactgattcccacgtcctccagctaccacttcatttgtctgtttctcatttactttctcttatagcgtggctttaaacatatatacatttgtatatatgtatatatgaatataatgtataaaatgtatgtagatgtatatacaaaaaataaacgagatgggttaaagata

SEQ ID NO: 131056 - DNA, 530 bp, Homo sapiens
  Payload ID: 5588
  Gene Symbol: EIF1AD
  Gene Name: eukaryotic translation initiation factor 1A domain containing
  ENST ID: ENST00000529973
  CDS Start-End: 94-288
gaacagtcctgggttctgagcctgccatccaaggaactcaggaggaggagttgacagtctcttcgttcctaaccagtgtgggacgacttcagcatgtctcaggccaccaagaggaagcatgtggtgaaggaggtgctaggggagcacatagtgccctccgaccagcagcagattgtcagggtactcaggaccccagggaacaatctgcatgaggtggagacagcccaagggcagcgcttcctggggactttctcattgttgaccccattgaagagggagaaaaggtgaaggctgaaatctcgtttgtgctctgcaaggaccacgtgcgctctctgcagaaggaggggttttggcctgaggccttctctgaagtggctgagaaacacaacaacaggaacagacaaactcaaccagaactcccagctgagccacagttatcaggagaggagtccagctcagaagatgattctgacctgtttgttaacacaaaccgcagacagtatcatgagagtgaggaggagagtgaagag

SEQ ID NO: 131057 - DNA, 765 bp, Homo sapiens
  Payload ID: 5589
  Gene Symbol: EIF1AX
  Gene Name: eukaryotic translation initiation factor 1A, X-linked
  ENST ID: ENST00000379593
  CDS Start-End: 187-537
cgccgagcgtggacgcaggcggatctctgaagagctgggtcgccagcctctcccgcgcacgttgcctggcctccagcacctacttggtcccgcgcgctccctcgtgtcgcccctcggagcagcagccgccgcggtcgccgctacccggaaagaagtcagagacgccgcgaggtcgccgccaccgccatgcccaagaataaagagtatgctcaggtaatcaaaatgttgggaaatggacggctagaagcaatgtgtttcgatggtgtaaagaggttatgtcacatcagaggaaaattgagaaaaaaggtttggataaatacctcggacattattttggttggtctccgagactaccaggataacaaagctgatgtaattttaaaatacaatgcagacgaagctagaagtctgaaggcatacggcgagcttccagagcatgctaaaatcaatgaaactgatacatttggtcctggagatgatgatgaaattcagtttgatgacattggagatgatgatgaagatattgatgacatctaaattgaactcaacattttacattccatcttttctgaagattgtcctacaatttggattttgatcatgacaaagaagattaaaatttcattagcatgaatgcaatttgttaaagcagactgatttgtttctaagatatttttggtttttttaaaactgataataatgctgaattatcttaagtgagatgttaagcccactttgttcttttaatgtaatggagcttatggg

SEQ ID NO: 131058 - DNA, 4427 bp, Homo sapiens
  Payload ID: 5589
  Gene Symbol: EIF1AX
  Gene Name: eukaryotic translation initiation factor 1A, X-linked
  Uniprot ID: P47813
  ENST ID: ENST00000379607
  CDS Start-End: 205-639
cgcggcgccatttgctgccgccgagcgtggacgcaggcggatctctgaagagctgggtcgccagcctctcccgcgcacgttgcctggcctccagcacctacttggtcccgcgcgctccctcgtgtcgcccctcggagcagcagccgccgcggtcgccgctacccggaaagaagtcagagacgccgcgaggtcgccgccaccgccatgcccaagaataaaggtaaaggaggtaaaaacagacgcaggggtaagaatgagaatgaatctgaaaaaagagaactggtattcaaagaggatggtcaggagtatgctcaggtaatcaaaatgttgggaaatggacggctagaagcaatgtgtttcgatggtgtaaagaggttatgtcacatcagaggaaaattgagaaaaaaggtttggataaatacctcggacattattttggttggtctccgagactaccaggataacaaagctgatgtaattttaaaatacaatgcagacgaagctagaagtctgaaggcatacggcgagcttccagagcatgctaaaatcaatgaaactgatacatttggtcctggagatgatgatgaaattcagtttgatgacattggagatgatgatgaagatattgatgacatctaaattgaactcaacattttacattccatcttttctgaagattgtcctacaatttggattttgatcatgacaaagaagattaaaatttcattagcatgaatgcaatttgttaaagcagactgatttgtttctaagatatttttggtttttttaaaactgataataatgctgaattatcttaagtgagatgttaagcccactttgttcttttaatgtaatggagcttatgggtagaagaccatgtctactaattacaaaaaaaaaaaaaaaccatgcattgctgcttttcctaccacttccagtaagaaaatgggtgttttgaagaaatcatttgccttgtcctcacggaatctgattaagccctggcctcttgattgtatagagtcattgtgtatattccagttacctagatattcccttgagattttgatacaatttgagggaggcagaagtctgcagttgaagaaaaaaaataagtctgtttgtcatatttaagtagcctgtggctatttttatactgattttgatatcatgttcttttcatagtcgtattttgccaccgtaaacataaaaaaaaaaaaaaagatttccaaaatgccgttttcagaacctgggttttaatagcagtattgaatttgtaagcttagtagttgcagaaattgaacactaggtggcactcagttatcttaacaggggaagtactgatacaattgttgacttttcttttactatgtgtaagaaataccccaaacatgaaaagattgttttgatcatatgcatgtatgtagaatatttttgcagagcagaaagattatgttagaagtgtgatttttattttcagaagtcatatacatgtaagctacaattttgagtgctttataaacacttaagatatatatataaattttaatttcatagcaacttgtaaaaaataaaatacttgttgaaaagcctttttcaacatatccctaagctaagggaagaggaaggaataacaactcagtgaaaagatggtctccagtttctgaatgaaaaagctacagctgagaaataaaataaaatgtcatgctgcagaatatgttatacccttattttgtgttaaggatatattttattatgtgaatggttttgtttttgttttttgtttttgttttttgcttgtattgggaattagctttactggtaacttccttatttagtttttagtggtcaactctaataaaatgaaactagggctgagctagttagccctcactagccaaactgaaactctatgcaacattaaaagaagagatccatcatgtagcttgtgacacttttattttattagtcaccggggaacttttcagtgatgaaaatacacagggtaataaaccttcacatggcttcaaaaggaaaacaagcaaatcttctctaatctactcttactataatttcctaagtgtacaccaaactctggatttaaaaatctgaagtactatagaacattaagttgaagaatggaaattaagagtacgtattcatggtttatatttcttattctatggagttcgtgaacacatctaggtggaatgcatctgagactaagggctggtttttaatcctcataagaaaccagccttgaagaattaacaattctcttcattggtattctaaacctcctaagatatttaggcttctgtacataaaagtgtttttgctaaatttacagtatatatagatcctttcatattattttactaagaatgtttgaactttgcatatttgatatagttcctggtaggaatagcacagctcaaacattagtttttctacttacctcctctaacacgtggtttgtctggagagtttctaaaaattcagctataaccccagttcatgtatttactggtgattgttcttgctgaggtagtaacagcccaatcttgggctgttaaatcctaggaaatctcgaatcatagtgattaaaatagttggggtaaagttgtagcttatatgcaatactacttggaggaattcttctactaatttgtatttaatgtggaaattgtatagtttcattgatttaatcataaataatggaaatggtctccaagaagttttatttttcatttttttgcttatacactctgattcctataatacagtgctataagctatgcacagaaaataaaatgtttgaaatccaagaataatggttcttactgctaagagggagtaatagttattactaatgattttgattgggttgcatttttgttgcaatgtttattccacttgcagttagaatatgaatatgttttatcactagtgtggctaaataaccaaacatttgtgtaaaaaaaaaaaaaagccaagatttcattgtttgttgaatatttcttaagcatctggcccctaaagagaccgcttcttaccaagcctgtaaactatgcatgatggaaattcttgtattttatttaggaatggctgttggtttactcaccacatctgtggaatcatggctataaatgtttgcttacaaactctttgtgacttgtaatttaacttaatctcatctaatgtaaatattagattatgatgttcagtaacatcttccataggtataaactgctgtcattattgatttcagagtaactctgagtaatcaaataggtaaaagcatgttttgagtaaaatagctagatttatactttacttgtatacagacttaacaacaaccggtattgactggattgacagctaaagtatcagaatgaaagcaaggtttttttgatgttacctgactgtcataaagatgaaaatgatttgtattggtatgaaatgcttatctttattctacttcgtaagggtaagttttatttatactctttggactcccatgaacttttgcacactgctttgtgtttttggtttaccctaaactaccatcctttttatctttgctttttttcttcctattcagaaaagagcaaaatgtgaaaagacacaagactctcaggtatagaatgaactgagcaatttggagaatgtattggactttgtcctctcttattcccccctcctagccctgcaagttgctaggtacttgtgaggcagtgtactggagaggggagagcatggatcctggggtcaaagggcctttgcccccacccttacttggccctctacctgcaggtgaccactggcacattctcctgcttgtctcagcttcaggttcttcacctctaagatggggatgatgaaaacagtacctgtcatgcagaattgttgggaggattgataatttagatgtttatacatgtaatgtacttagatcagtgtctgctcttttcacttgatatccagtactatgtaagatagaaggtgcatgtcttctgtattctgtatttcccatttcttttgcgtgcagtctttgattcgtacaatagaaggaacacgtagaatgtatatttgtacattcatgtcaacatagtatttgaaattgctaccaaactcatttaatttggcataagactaacagatgaagtctctcatttgcttgaagatattttacaaaataccaactgttctatatttctttagaaaaagattatagttattaatattgatacctctgataatattttattcttaaatcttcagtgattccttttactatagattcatgacagctaattagtactaactgatttagaggtttcctttcccatcatatggaatgatgtaaagaaatcagatacaaactactgcaattagaaaataaaatatgaacaactttcaacaatgta

SEQ ID NO: 131059 - DNA, 1390 bp, Homo sapiens
  Payload ID: 5590
  Gene Symbol: EIF1AY
  Gene Name: eukaryotic translation initiation factor 1A, Y-linked
  Uniprot ID: O14602
  ENST ID: ENST00000361365
  CDS Start-End: 148-582
agagagtgcgcgtcagcagtttattagagagctctgtagccagcctcttctgcgcacccacctgctgcatcttagttcagtcggctcttagagtagtaaccgccagaaaggagtcggaagaggtctcacgaggctgtcatcaccgccatgcccaagaataaaggtaaaggaggtaaaaacaggcgcaggggtaaaaatgagaatgaatctgaaaaaagagagttggtgtttaaagaggatggacaagagtatgctcaggtaatcaaaatgttgggaaatggacgattggaagcattgtgttttgatggtgtaaagaggttatgccatatcagagggaaattgagaaaaaaggtttggataaatacatcagacattatattggttggtctacgggactatcaggataacaaagctgatgtaattttaaagtacaatgcagatgaagctagaagcctgaaggcatatggcgagcttccagaacatgctaaaatcaatgaaacagacacatttggtcctggagatgatgatgaaatccagtttgacgatattggagatgatgatgaagacattgatgatatctaaattgaaccaagtgtttttacatgacaagttctctgaggatggttctacagttgggattttggccatcatcaaccaagaagagaaattcatttagtgtgtagtttctgaaagcaaactgatttattttcattgttttaaagtatttatttctttaaaagctgaggacactgaattaccttaagttaaatgttaatactttattgttttgatgtaatggaacttaaggataaaagaccataatatttgctgttaaaataaataaacgagtgcctttcctactgtgataacgtcaagtaattggatattttgaatacatttctgcctgataatcatgctgggttctaataagccctacttccacctaatctgtttacagtcttttggtatgtttcagttacttagatggtctcataaggtttctgatacaatttgaagacagaaatctgcatttagaatcagaaaacatggacatatttttcatatttatctagtcatatgtaattttatgctaacattgatagtttataaatccttttcatcctttgtgcctcggttattaaggaaaaaaaaatgtccaacatacagtttttaaagtgtggcagttttgagtagtaacttagaatgtataagattaagagttaaagaaaccgaacaataagtggcaaccaattatcttaacattggaaatactggggtgccattttgttttcaaaagttattcattgtaatccactgttttggctttcatgaacaagtaaattacagtgtataaatgaaaagcaatttcataataaattctataaactga

SEQ ID NO: 131060 - DNA, 746 bp, Homo sapiens
  Payload ID: 5590
  Gene Symbol: EIF1AY
  Gene Name: eukaryotic translation initiation factor 1A, Y-linked
  ENST ID: ENST00000382772
  CDS Start-End: 79-462
tcttagttcagtcggctcttagagtagtaaccgccagaaaggagtcggaagaggtctcacgaggctgtcatcaccgccatgcccaagaataaaggtaaaggaggtaaaaacaggcgcaggggtaaaaatgagaatgaatctgaaaaaagagagttggtgtttaaagaggatggacaagagtatgctcaggtaatcaaaatgttgggaaatggacgattggaagcattgtgttttgatggtgtaaagaggttatgccatatcagagggaaattgagaaaaaaggataacaaagctgatgtaattttaaagtacaatgcagatgaagctagaagcctgaaggcatatggcgagcttccagaacatgctaaaatcaatgaaacagacacatttggtcctggagatgatgatgaaatccagtttgacgatattggagatgatgatgaagacattgatgatatctaaattgaaccaagtgtttttacatgacaagttctctgaggatggttctacagttgggattttggccatcatcaaccaagaagagaaattcatttagtgtgtagtttctgaaagcaaactgatttattttcattgttttaaagtatttatttctttaaaagctgaggacactgaattaccttaagttaaatgttaatactttattgttttgatgtaatggaacttaaggataaaagaccataatatttgctgttaaaataaataaacgagtgcctttcctactgtga

SEQ ID NO: 131061 - DNA, 1010 bp, Homo sapiens
  Payload ID: 5591
  Gene Symbol: EIF1B
  Gene Name: eukaryotic translation initiation factor 1B
  Uniprot ID: O60739
  ENST ID: ENST00000232905
  CDS Start-End: 259-600
agtctccatcggccattttgtgcgagaagccgcagcgccgcctcttctctcgcgccctcgcctcttcctccgcctcctccttcgcctcttcctgcctcctcccggcttccgccgccgccactccagcctaatcccaaccccagggcgaagcgttttcttatttatttccgttttctcgccactacagcctcctgacaaggtgatccgggcgggccccgcaggaattttatcccctcaccggcctcacactagtatcgcatgtccactatccagaacctccaatctttcgacccctttgctgatgcaactaagggtgacgacttactcccggcagggactgaggattacattcatataagaatccagcaacggaacggcagaaagacactgactactgttcagggcattgcagatgattatgacaaaaagaaacttgtgaaagctttcaaaaagaaatttgcctgtaatggtactgtgattgaacatcctgaatacggagaggttattcagcttcaaggtgaccaaagaaaaaacatctgccagtttctcttggaggttggcattgtaaaggaggaacagcttaaggttcatggattctaaaatgaacctaaatacgtggagaatttcttgaatagttttgttctctaaacccggtttggctgccttgtgaaatgattccctgcagtaaacggacttttcatttatttaatcattcaaacttccattcacatctgcatgattacagaaaacatggggtatgtagactagtaacacataagaaaattgcagtaagatggtaacaaaacctcatattgtctttacatgtttccaatggaaaatgttttgagtgtttattgttcagtttattacgtttcacttgattaaatttttttgttgttgtattaaaccatgtacgttgcagcttaacaataaaaaaaaatctatgaatctttgtgagcaattatgctcccaaatctaagcaagtaaaatacacattttgtctttcttaa

SEQ ID NO: 131062 - DNA, 5499 bp, Homo sapiens
  Payload ID: 5592
  Gene Symbol: EIF2AK4
  Gene Name: eukaryotic translation initiation factor 2 alpha kinase 4
  Uniprot ID: Q9P2K8
  ENST ID: ENST00000263791
  CDS Start-End: 44-4993
cgccgcccaggcaaggccgccctgccttgggcgcagcgctgccatggctgggggccgtggggcccccgggcgcggccgggacgagcctccggagagctacccgcaacgacaggaccacgagctacaggccctggaggccatttacggcgcggacttccaagacctgcggccggacgcttgcggaccggtcaaagagccccctgaaatcaatttagttttgtaccctcaaggcctaactggtgaagaagtatatgtaaaagtggatttgagggttaaatgcccacctacctatccagatgtagttcctgaaatagagttaaaaaatgccaaaggtctatcaaatgaaagtgtcaatttgttaaaatctcgcctagaagaactggccaagaaacactgtggggaggtgatgatctttgaactggcttaccacgtgcagtcatttctcagcgagcataacaagccccctcccaagtcttttcatgaagaaatgctggaaaggcgggctcaggaggagcagcagaggctgttggaggccaagcggaaagaagagcaggagcaacgtgaaatcctgcatgagattcagagaaggaaagaagagataaaagaagagaaaaaaaggaaagaaatggctaagcaggaacgtttggaaattgctagtttgtcaaaccaagatcatacctctaagaaggacccaggaggacacagaacggctgccattctacatggaggctctcctgactttgtaggaaatggtaaacatcgggcaaactcctcaggaaggtctaggcgagaacgtcagtattctgtatgtaatagtgaagattctcctggctcttgtgaaattctgtatttcaatatggggagtcctgatcagctcatggtgcacaaagggaaatgtattggcagtgatgaacaacttggaaaattagtctacaatgctttggaaacagccactggtggctttgtcttgttgtatgagtgggtccttcagtggcagaaaaaaatgggtccattccttaccagtcaagaaaaagagaagattgataagtgcaaaaagcagattcaaggaacagaaacagaattcaactcactggtaaaattgagccatccaaatgtagtacgctaccttgcaatgaatctcaaagagcaagacgactccatcgtggtggacattttagtggagcacattagtggggtctctcttgctgcacacctgagccactcaggccccatccctgtgcatcagcttcgcaggtacacagctcagctcctgtcaggccttgattatctgcacagcaattctgtggtgcataaggtcctgagtgcatctaatgtcttggtggatgcagaaggcaccgtcaagattacggactatagcatttctaagcgcctcgcagacatttgcaaggaggatgtgtttgagcaaacccgagttcgttttagtgacaatgctctgccttataaaacggggaagaaaggagatgtttggcgtcttggccttctgctgctgtccctcagccaaggacaggaatgtggagagtaccctgtgaccatccctagtgacttaccagctgactttcaagattttctaaagaaatgtgtgtgcttggatgacaaggaaagatggagtccccagcagttgttgaaacacagctttataaatccccagccaaaaatgcctctagtggaacaaagtcctgaagattctgaaggacaagattatgttgagactgttattcctagcaaccggctacccagtgctgccttctttagtgagacacagagacagttttcccgatacttcattgagtttgaagaattacaacttcttggtaaaggagcttttggagctgtcatcaaggtgcagaacaagttggacggctgctgctacgcagtgaagcgcatccccatcaacccggccagccggcagttccgcaggatcaagggcgaagtgacactgctgtcacggctgcaccatgagaacattgtgcgctactacaacgcctggatcgagcggcacgagcggccggcgggaccggggacgccgcccccggactccgggcccctggccaaggatgaccgagctgcacgcgggcagccggcgagcgacacagacggcctggacagcgtagaggccgccgcgccgccacccatcctcagcagctcggtggagtggagcacttcgggcgagcgctcggccagtgcccgtttccccgccaccggcccgggctccagcgatgacgaggacgacgacgaggacgagcacggtggcgtcttctcccagtccttcctgcctgcttcagattctgaaagtgatattatctttgacaatgaagatgagaacagtaaaagtcagaatcaggatgaagattgcaatgaaaagaatggctgccatgaaagtgagccatcagtgacgactgaggctgtgcactacctatacatccagatggagtactgtgagaagagcactttacgagacaccattgaccagggactgtatcgagacaccgtcagactctggaggctttttcgagagattctggatggattagcttatatccatgagaaaggaatgattcaccgggatttgaagcctgtcaacatttttttggattctgatgaccatgtgaaaataggtgattttggtttggcgacagaccatctagccttttctgctgacagcaaacaagacgatcagacaggagacttgattaagtcagacccttcaggtcacttaactgggatggttggcactgctctctatgtaagcccagaggtccaaggaagcaccaaatctgcatacaaccagaaagtggatctcttcagcctgggaattatcttctttgagatgtcctatcaccccatggtcacggcttcagaaaggatctttgttctcaaccaactcagagatcccacttcgcctaagtttccagaagactttgacgatggagagcatgcaaagcagaaatcagtcatctcctggctgttgaaccacgatccagcaaaacggcccacagccacagaactgctcaagagtgagctgctgcccccaccccagatggaggagtcagagctgcatgaagtgctgcaccacacgctgaccaacgtggatgggaaggcctaccgcaccatgatggcccagatcttctcgcagcgcatctcccctgccatcgattacacctatgacagcgacatactgaagggcaacttctcaatccgtacagccaagatgcagcagcatgtgtgtgaaaccatcatccgcatctttaaaagacatggagctgttcagttgtgtactccactactgcttccccgaaacagacaaatatatgagcacaacgaagctgccctattcatggaccacagcgggatgctggtgatgcttccttttgacctgcggatcccttttgcaagatatgtggcaagaaataatatattgaatttaaaacgatactgcatagaacgtgtgttcaggccgcgcaagttagatcgatttcatcccaaagaacttctggagtgtgcatttgatattgtcacttctaccaccaacagctttctgcccactgctgaaattatctacactatctatgaaatcatccaagagtttccagcacttcaggaaagaaattacagtatttatttgaaccataccatgttattgaaagcaatactcttacactgtgggatcccagaagataaactcagtcaagtctacattattctgtatgatgctgtgacagagaagctgacgaggagagaagtggaagctaaattttgtaatctgtctttgtcttctaatagtctgtgtcgactctacaagtttattgaacagaagggagatttgcaagatcttatgccaacaataaattcattaataaaacagaaaacaggtattgcacagttggtgaagtatggcttaaaagacctagaggaggttgttggactgttgaagaaactcggcatcaagttacaggtcttgatcaatttgggcttggtttacaaggtgcagcagcacaatggaatcatcttccagtttgtggctttcatcaaacgaaggcaaagggctgtacctgaaatcctcgcagctggaggcagatatgacctgctgattccccagtttagagggccacaagctctggggccagttcccactgccattggggtcagcatagctatagacaagatatctgctgctgtcctcaacatggaggaatctgttacaataagctcttgtgacctcctggttgtaagtgttggccagatgtctatgtccagggccatcaacctaacccagaaactctggacagcaggcatcacagcagaaatcatgtacgactggtcacagtcccaagaggaattacaagagtactgcagacatcatgaaatcacctatgtggcccttgtctcggataaagaaggaagccatgtcaaggttaagtctttcgagaaggaaaggcagacagagaagcgtgtgctggagactgaacttgtggaccatgtactgcagaaactgaggactaaagtcactgatgaaaggaatggcagagaagcttccgataatcttgcagtgcaaaatctgaaggggtcattttctaatgcttcaggtttgtttgaaatccatggagcaacagtggttcccattgtgagtgtgctagccccggagaagctgtcagccagcactaggaggcgctatgaaactcaggtacaaactcgacttcagacctcccttgccaacttacatcagaaaagcagtgaaattgaaattctggctgtggatctacccaaagaaacaatattacagtttttatcattagagtgggatgctgatgaacaggcatttaacacaactgtgaagcagctgctgtcacgcctgccaaagcaaagatacctcaaattagtctgtgatgaaatttataacatcaaagtagaaaaaaaggtgtctgtgctatttctgtacagctatagagatgactactacagaatcttattttaaccctaaagaactgtcgttaacctcattcaaacagacagaggcttatactggaataatggaatgttgtacattcatcataatttaaaattaaattctaagaagaggctgggtgcagtggctcacacctttaatcccagcactttgggaagccaaggcaggaagactgcttgaaaccaggagtttgagaccagcctgagcaacaaagcaagaccccatctctataaaaactaaaaaaattagttgggcatggtggcacatgcctgtagtcccagctactccagaggctgagatggatcatctgagcctcaggaggttgaggctgcagtgagctgtgactgcgccactgcactccagtctgggacaacagagcaagaccctgtcttaaaaaaaaaaagaaaaaaaaaatttttttctaagaagctgtcctacaaagttgagctttgttagtttttcatgtgtaatatattataaatttatcttttgggatataataaatgctttcatat

SEQ ID NO: 131063 - DNA, 3548 bp, Homo sapiens
  Payload ID: 5592
  Gene Symbol: EIF2AK4
  Gene Name: eukaryotic translation initiation factor 2 alpha kinase 4
  Uniprot ID: Q9P2K8
  ENST ID: ENST00000559624
  CDS Start-End: 51-1901
ggcccaccgccgcccaggcaaggccgccctgccttgggcgcagcgctgccatggctgggggccgtggggcccccgggcgcggccgggacgagcctccggagagctacccgcaacgacaggaccacgagctacaggccctggaggccatttacggcgcggacttccaagacctgcggccggacgcttgcggaccggtcaaagagccccctgaaatcaatttagttttgtaccctcaaggcctaactggtgaagaagtatatgtaaaagtggatttgagggttaaatgcccacctacctatccagatgtagttcctgaaatagagttaaaaaatgccaaaggtctatcaaatgaaagtgtcaatttgttaaaatctcgcctagaagaactggccaagaaacactgtggggaggtgatgatctttgaactggcttaccacgtgcagtcatttctcagcgagcataacaagccccctcccaagtcttttcatgaagaaatgctggaaaggcgggctcaggaggagcagcagaggctgttggaggccaagcggaaagaagagcaggagcaacgtgaaatcctgcatgagattcagagaaggaaagaagagataaaagaagagaaaaaaaggaaagaaatggctaagcaggaacgtttggaaattgctagtttgtcaaaccaagatcatacctctaagaaggacccaggaggacacagaacggctgccattctacatggaggctctcctgactttgtaggaaatggtaaacatcgggcaaactcctcaggaaggtctaggcgagaacgtcagtattctgtatgtaatagtgaagattctcctggctcttgtgaaattctgtatttcaatatggggagtcctgatcagctcatggtgcacaaagggaaatgtattggcagtgatgaacaacttggaaaattagtctacaatgctttggaaacagccactggtggctttgtcttgttgtatgagtgggtccttcagtggcagaaaaaaatgggtccattccttaccagtcaagaaaaagagaagattgataagtgcaaaaagcagattcaaggaacagaaacagaattcaactcactggtaaaattgagccatccaaatgtagtacgctaccttgcaatgaatctcaaagagcaagacgactccatcgtggtggacattttagtggagcacattagtggggtctctcttgctgcacacctgagccactcaggccccatccctgtgcatcagcttcgcaggtacacagctcagctcctgtcaggccttgattatctgcacagcaattctgtggtgcataaggtcctgagtgcatctaatgtcttggtggatgcagaaggcaccgtcaagattacggactatagcatttctaagcgcctcgcagacatttgcaaggaggatgtgtttgagcaaacccgagttcgttttagtgacaatgctctgccttataaaacggggaagaaaggagatgtttggcgtcttggccttctgctgctgtccctcagccaaggacaggaatgtggagagtaccctgtgaccatccctagtgacttaccagctgactttcaagattttctaaagaaatgtgtgtgcttggatgacaaggaaagatggagtccccagcagttgttgaaacacagctttataaatccccagccaaaaatgcctctagtggaacaaagtcctgaagattctgaaggacaagattatgttgagactgttattcctagcaaccggctacccagtgctgccttctttagtgagacacagagacagttttcccgatacttcattgagtttgaagaattacaacttcttggtaaaggagcttttggagctgtcatcaaggtgtggtacagagtcattcccagtcccctttagagctccttctctgttccatttccacaaagactcatggactttacttttattttgggagtggggagggaagtgaatatggctgttggatactatgctcatcctcaccttcctggagttaaaggttttatttaagttacgctggacacagttgagaattgtcccactcctctttccttgcttcatgtggagcattaacatgaaacacacatggttataacagcacttcaagtggaatcaagacctccacagaaagaacatttttgtgtgctttggttcagaaagaacattgttctttttttctcctgtttgctgttagagttgctgtagataaaaaggttctaaggttagaagagagatggacttcaaactgggagatggccccagcaggtctcgatggcttttattttccagctattattgggacaggaaagtagcgatgtattattaaggtacactgttgttgggtcttcctttcttcgttctagtctatttgggtgacttttattattatctgccccttgtagaaagaggtttcagctgtttttatataatagaagtatttctttgtaaattaggagacccagattattgtattaagtccatatacagtacatgtcatctttcacatatgaaggtaacccaccatcaactgagtatattgtctgttaaggattctgagagtatcattaggaagcattactgttactgtagaaaaacttttacactaaaaaaggaattaaattagttttcctgtggtaaaagacagacaagcaagacagatgtcctgatcagaaagatcataattatgtctaagaggaggggatgattgaagcgtatactgtccctttaacacaatatcattttgatcaaatcctttaacttcattctattttaaattcttgaacgtagaatagtaacaaatttcatctctttacaagtacttaataatgataggcaagctcatataacaaaaacatctgagtaacttaagcccccacggtttccagtagtttctccctgtgagaatccacagccctcacctcctacctctgtgcttctgtgtcagagtagggcagcctgcccagtgatctggcattcattagcagttggacccattactgtttctgcaccttttcacttcagtaaatgaattcctaggggtttccagtatagcaagctttactcccaacccagttcgtatatgatgtgtactgagacaggagatcgaaaggcaatgccaagatccccacctcccgccctacactgtcctcttccctattaatgtggcagtaaaagaacacagggctatcattttttggagcacctgccatatttcagattgtgtgccaggtgatttacaaaccttgtctttaaatctcaggacattcttacgagatgggtatgatcctcattccctagatgagggaactgaagctcagagaaggttatgtcctttgcctgagataagggagataaaaccagcattcagacccacctctgttgtactacaaagtgtgtgttcttgtcactatttccatacaaaaaaagataatctgaaactcaattttgtagtacttccttcttattcccaggacttcacttagacttttattagtttaattgaaacttgtgagccaaacaagagaa

SEQ ID NO: 131064 - DNA, 4789 bp, Homo sapiens
  Payload ID: 5592
  Gene Symbol: EIF2AK4
  Gene Name: eukaryotic translation initiation factor 2 alpha kinase 4
  ENST ID: ENST00000560855
  CDS Start-End: 1-4282
ggctaagcaggaacgtttggaaattgctagtttgtcaaaccaagatcatacctctaagaaggacccaggaggacacagaacggctgccattctacatggaggctctcctgactttgtaggaaatggtaaacatcgggcaaactcctcaggaaggtctaggcgagaacgtcagtattctgtatgtaatagtgaagattctcctggctcttgtgaaattctgtatttcaatatggggagtcctgatcagctcatggtgcacaaagggaaatgtattggcagtgatgaacaacttggaaaattagtctacaatgctttggaaacagccactggtggctttgtcttgttgtatgagtgggtccttcagtggcagaaaaaaatgggtccattccttaccagtcaagaaaaagagaagattgataagtgcaaaaagcagattcaaggaacagaaacagaattcaactcactggtaaaattgagccatccaaatgtagtacgctaccttgcaatgaatctcaaagagcaagacgactccatcgtggtggacattttagtggagcacattagtggggtctctcttgctgcacacctgagccactcaggccccatccctgtgcatcagcttcgcaggtacacagctcagctcctgtcaggccttgattatctgcacagcaattctgtggtgcataaggtcctgagtgcatctaatgtcttggtggatgcagaaggcaccgtcaagattacggactatagcatttctaagcgcctcgcagacatttgcaaggaggatgtgtttgagcaaacccgagttcgttttagtgacaatgctctgccttataaaacggggaagaaaggagatgtttggcgtcttggccttctgctgctgtccctcagccaaggacaggaatgtggagagtaccctgtgaccatccctagtgacttaccagctgactttcaagattttctaaagaaatgtgtgtgcttggatgacaaggaaagatggagtccccagcagttgttgaaacacagctttataaatccccagccaaaaatgcctctagtggaacaaagtcctgaagattctgaaggacaagattatgttgagactgttattcctagcaaccggctacccagtgctgccttctttagtgagacacagagacagttttcccgatacttcattgagtttgaagaattacaacttcttggtaaaggagcttttggagctgtcatcaaggtgcagaacaagttggacggctgctgctacgcagtgaagcgcatccccatcaacccggccagccggcagttccgcaggatcaagggcgaagtgacactgctgtcacggctgcaccatgagaacattgtgcgctactacaacgcctggatcgagcggcacgagcggccggcgggaccggggacgccgcccccggactccgggcccctggccaaggatgaccgagctgcacgcgggcagccggcgagcgacacagacggcctggacagcgtagaggccgccgcgccgccacccatcctcagcagctcggtggagtggagcacttcgggcgagcgctcggccagtgcccgtttccccgccaccggcccgggctccagcgatgacgaggacgacgacgaggacgagcacggtggcgtcttctcccagtccttcctgcctgcttcagattctgaaagtgatattatctttgacaatgaagatgagaacagtaaaagtcagaatcagatggagtactgtgagaagagcactttacgagacaccattgaccagggactgtatcgagacaccgtcagactctggaggctttttcgagagattctggatggattagcttatatccatgagaaaggaatgattcaccgggatttgaagcctgtcaacatttttttggattctgatgaccatgtgaaaataggtgattttggtttggcgacagaccatctagccttttctgctgacagcaaacaagacgatcagacaggagacttgattaagtcagacccttcaggtcacttaactgggatggttggcactgctctctatgtaagcccagaggtccaaggaagcaccaaatctgcatacaaccagaaagtggatctcttcagcctgggaattatcttctttgagatgtcctatcaccccatggtcacggcttcagaaaggatctttgttctcaaccaactcagagatcccacttcgcctaagtttccagaagactttgacgatggagagcatgcaaagcagaaatcagtcatctcctggctgttgaaccacgatccagcaaaacggcccacagccacagaactgctcaagagtgagctgctgcccccaccccagatggaggagtcagagctgcatgaagtgctgcaccacacgctgaccaacgtggatgggaaggcctaccgcaccatgatggcccagatcttctcgcagcgcatctcccctgccatcgattacacctatgacagcgacatactgaagggcaacttctcaatccgtacagccaagatgcagcagcatgtgtgtgaaaccatcatccgcatctttaaaagacatggagctgttcagttgtgtactccactactgcttccccgaaacagacaaatatatgagcacaacgaagctgccctattcatggaccacagcgggatgctggtgatgcttccttttgacctgcggatcccttttgcaagatatgtggcaagaaataatatattgaatttaaaacgatactgcatagaacgtgtgttcaggccgcgcaagttagatcgatttcatcccaaagaacttctggagtgtgcatttgatattgtcacttctaccaccaacagctttctgcccactgctgaaattatctacactatctatgaaatcatccaagagtttccagcacttcaggaaagaaattacagtatttatttgaaccataccatgttattgaaagcaatactcttacactgtgggatcccagaagataaactcagtcaagtctacattattctgtatgatgctgtgacagagaagctgacgaggagagaagtggaagctaaattttgtaatctgtctttgtcttctaatagtctgtgtcgactctacaagtttattgaacagaagggagatttgcaagatcttatgccaacaataaattcattaataaaacagaaaacaggtattgcacagttggtgaagtatggcttaaaagacctagaggaggttgttggactgttgaagaaactcggcatcaagttacaggtcttgatcaatttgggcttggtttacaaggtgcagcagcacaatggaatcatcttccagtttgtggctttcatcaaacgaaggcaaagggctgtacctgaaatcctcgcagctggaggcagatatgacctgctgattccccagtttagagggccacaagctctggggccagttcccactgccattggggtcagcatagctatagacaagatatctgctgctgtcctcaacatggaggaatctgttacaataagctcttgtgacctcctggttgtaagtgttggccagatgtctatgtccagggccatcaacctaacccagaaactctggacagcaggcatcacagcagaaatcatgtacgactggtcacagtcccaagaggaattacaagagtactgcagacatcatgaaatcacctatgtggcccttgtctcggataaagaaggaagccatgtcaaggttaagtctttcgagaaggaaaggcagacagagaagcgtgtgctggagactgaacttgtggaccatgtactgcagaaactgaggactaaagtcactgatgaaaggaatggcagagaagcttccgataatcttgcagtgcaaaatctgaaggggtcattttctaatgcttcaggtttgtttgaaatccatggagcaacagtggttcccattgtgagtgtgctagccccggagaagctgtcagccagcactaggaggcgctatgaaactcaggtacaaactcgacttcagacctcccttgccaacttacatcagaaaagcagtgaaattgaaattctggctgtggatctacccaaagaaacaatattacagtttttatcattagagtgggatgctgatgaacaggcatttaacacaactgtgaagcagctgctgtcacgcctgccaaagcaaagatacctcaaattagtctgtgatgaaatttataacatcaaagtagaaaaaaaggtgtctgtgctatttctgtacagctatagagatgactactacagaatcttattttaaccctaaagaactgtcgttaacctcattcaaacagacagaggcttatactggaataatggaatgttgtacattcatcataatttaaaattaaattctaagaagaggctgggtgcagtggctcacacctttaatcccagcactttgggaagccaaggcaggaagactgcttgaaaccaggagtttgagaccagcctgagcaacaaagcaagaccccatctctataaaaactaaaaaaattagttgggcatggtggcacatgcctgtagtcccagctactccagaggctgagatggatcatctgagcctcaggaggttgaggctgcagtgagctgtgactgcgccactgcactccagtctgggacaacagagcaagaccctgtcttaaaaaaaaaaagaaaaaaaaaatttttttctaagaagctgtcctacaaagttgagctttgttagtttttcatgtgtaatatattataaatttatcttttgggatataataaatgctttcatata

SEQ ID NO: 131065 - DNA, 687 bp, Homo sapiens
  Payload ID: 5592
  Gene Symbol: EIF2AK4
  Gene Name: eukaryotic translation initiation factor 2 alpha kinase 4
  ENST ID: ENST00000560648
  CDS Start-End: 21-431
gccttgggcgcagcgctgccatggctgggggccgtggggcccccgggcgcggccgggacgagcctccggagagctacccgcaacgacaggaccacgagctacaggccctggaggccatttacggcgcggacttccaagacctgcggccggacgcttgcggaccggtcaaagagccccctgaaatcaatttagttttgtaccctcaaggcctaactggtgaagaagtatatgtaaaagtggatttgagggttaaatgcccacctacctatccagatgtagttcctgaaatagagttaaaaaatgccaaaggtctatcaaatgaaagtgtcaatttgttaaaatctcgcctagaagaactggccaagaaacactgtggggagcagcagggttggagaggattgaccccaactttgaaagaagttcaagtgtgactcaaaggctatcaaacagcattgaatgctacagagaaatcttccatgaaaggaagagtcaatcgatgcagcaacttcattgttgtcttcttttaagaaattgccgcaaccaccccagccttcaccagccaccaccttgatcagtcagcagccatcatcaagacaaaaccctctgtctgcaaaaagattatgacgtcctgaaggttcagatgatcattagcattttttagcaataaagtattttaaaattaaggta

SEQ ID NO: 131066 - DNA, 638 bp, Homo sapiens
  Payload ID: 5592
  Gene Symbol: EIF2AK4
  Gene Name: eukaryotic translation initiation factor 2 alpha kinase 4
  ENST ID: ENST00000558823
  CDS Start-End: 1-241
cattgtgagtgtgctagccccggagaagctgtcagccagcactaggaggcgctatgaaactcagtgggatgctgatgaacaggcatttaacacaactgtgaagcagctgctgtcacgcctgccaaagcaaagatacctcaaattagtctgtgatgaaatttataacatcaaagtagaaaaaaaggtgtctgtgctatttctgtacagctatagagatgactactacagaatcttattttaaccctaaagaactgtcgttaacctcattcaaacagacagaggcttatactggaataatggaatgttgtacattcatcataatttaaaattaaattctaagaagaggctgggtgcagtggctcacacctttaatcccagcactttgggaagccaaggcaggaagactgcttgaaaccaggagtttgagaccagcctgagcaacaaagcaagaccccatctctataaaaactaaaaaaattagttgggcatggtggcacatgcctgtagtcccagctactccagaggctgagatggatcatctgagcctcaggaggttgaggctgcagtgagctgtgactgcgccactgcactccagtctgggacaacagagcaagaccctgtcttaaaaaaaaaaagaa

SEQ ID NO: 131067 - DNA, 4485 bp, Homo sapiens
  Payload ID: 5593
  Gene Symbol: EIF2S1
  Gene Name: eukaryotic translation initiation factor 2, subunit 1 alpha, 35kDa
  Uniprot ID: P05198
  ENST ID: ENST00000256383
  CDS Start-End: 462-1409
gcgcaatacgcggcacgcgccaggccaaagactaggagcgaagcgtgcacgccttgtctttctccacctttcgtctttggtcacagcgccatctcatggttagctgaaactttgaaagaggattcattcttcagaggcaaggaatcggagtcctatgtctttctcgcgccttgaaggttacttagctaaagctaagatagcgagaaacagtacttttcaggtccttccatgatctacattcgtccttgttctcggaggacccagactctatggttaatgatgaagaggggcctctattcgttcagcgcttgcgcatgcgaggaggttccgcatgcgcggtggagtgagcgaagcgcacgctgaggaggatcggcggccggtgagggggaagcaagtctggtctctgtgattgaagaagtcggctctgggctccagtgcgggaatcacacacatacctcagaatgccgggtctaagttgtagattttatcaacacaaatttcctgaggtggaagatgtagtgatggtgaatgtcagatccattgctgaaatgggggcttatgtcagcttgctggaatacaacaacattgaaggcatgattcttcttagtgaattatccagaaggcgtatccgttctatcaacaaactcatccgaattggcaggaatgagtgtgtggttgtcattagggtggacaaagaaaaaggatatattgatttgtcaaaaagaagagtttctccagaggaagcaatcaaatgtgaagacaaattcacaaaatccaaaactgtttatagcattcttcgtcatgttgctgaggtgttagaatacaccaaggatgagcagctggaaagcctattccagaggactgcctgggtctttgatgacaagtacaagagacctggatatggtgcctatgatgcatttaagcatgcagtctcagacccatctattttggatagtttagatttgaatgaagatgaacgggaagtactcattaataatattaataggcgcttgaccccacaggctgtcaaaattcgagcagatattgaagtggcttgttatggttatgaaggcattgatgctgtaaaagaagccctaagagcaggtttgaattgttctacagaaaacatgcccattaagattaatctaatagctcctcctcggtatgtaatgactacgacaaccctggagagaacagaaggcctttctgtcctcagtcaagctatggctgttatcaaagagaagattgaggaaaagaggggtgtgttcaatgttcaaatggagcccaaagtggtcacagatacagatgagactgaacttgcgaggcagatggagaggcttgaaagagaaaatgccgaagtggatggagatgatgatgcagaagaaatggaagccaaagctgaagattaactttgtgggaaacagagtccaatttaaggaacacagagcagcgcttcctggctgtaaatcctagacttgaaagttttccagtattgaaaacttcaaagctgaatattttttatttctaagtatttaaatgttctaacagatcagaacatgaaatgccctcctaaatgtcagctgttgtcacacagtagctccaacactttgagcatttttaagggagtggcctcatttcactagagacaaatctttaagaatagttctaaaattgggcttgtgatttccatttctgatgtctccagattggcacccctttctagttcaatgcctcacgagatttgccaggggcatccaaggcaaacaatcccaatctttctatataaaatgtattcaagcaaacatcaaataaatttctgggatatttaactataggcttcttccttcttgtcaccagttaaaagcattttaatactaagaccctaattcttttatctttattttagtcttgatgtggaactgtaggagcaggtgaataaaggatctctataacagatcctttcaaaagaagagttttagagaaaataaatttaactttaaccacagtgaaagttgacccttagcgggacaaagccttaaaatgcattgaaagaattagatcggttctgtgccttttatctatttgagattgatgacaacctgtgtgagagaatttatcacaccacgtccttattggaataataagctacttgccttgagtttataattcagggtggtaaagtatgtttttaaattttaaaaagcagctgcattttttatttagttggaatatcacccaattttttatttttattgctattaaaatatccactagatgccacctagagctccagttctttataacaaaacagggatctgtttgaacacttactgttgtttttttttttttacatgtttccatcatttctgtctttaagaactaattcgtacataataagtttcataggtaacacattatttgaagttacagctacagtagtcaggtgtagaaaatcttgagttgctttggtctgcttgtcttcataaatttattctcttatgatacttgaggtaccagttgtatttaattttattcattatccctagatagctattaagatacttagattagacctaacccaccatagtcaatccaagactagactactcaatattaaagggtctggaaaatagaagagtgtgttgggcaggtagtttgtaccatttatgaaggtttgttcctttgttaaatttagcagcctgtactagcttttgaaatccagaagttttaacttccagtggctggtttctgagagagtgccatgattgctagccagcattccatattgggaatatgtagaggagaacctggatgtacttaagagtggcatataattttcacttctgtctgttgaggcatcaaaaaaacaagtttagaaagctggcaacatgaagaatgcattcaaaatataacaggtgcttctttgttgtacgcagaggaattttttcttttgattttgtttactgaaatttgttatacttcaaaagccataacttgaaaaatactggtggcgtcgatggtgagtgatttttatcccacgtgggccttttgctcagttccatggcaattttgtaaattgaccctagccagagaatagatcagtatttcactgataccacgaggaaaagaacaaacaaaacttaaaagtattcatacaccttgctaacctaaaagacagcagggacaagatacatatgaggacaaggtatacacccagttctgaataacttgaagaacaggcttggcaaagaagtaagtttatccaaatcttgaatttctgccaggcatggtagctcatgcctgtaaccctggcacttaaggggccaaggcaggaggatcacttgaggccagtgagctgtgatcactccagtgcactcgagcctgggtgacagggcaagaccctgtctcaaaaaaaaaaaaaaaaaccaaaaatcttgaatctcccatcaaagccttttcattaaaaatacaatttcatctactccctactgtacctttcactgatgtcaagtggctatcaattcatatagctgaaaattagtgatagtttgggtctcatttatgcataaattaattgaaaatcagtaatggccaggaagaaatatgaatattcaaaccacttttttctttttttttttttttttttggcaaatggtgttatattgcctgggcaggtctcgaaatcctgggctcaagctatcctcctgcctctgcctctgtaagagtgtgagccaccatgccccacccaaaccatttttcatatcagttatagcaaaacaagacaaaccagttcttaataatgttcaaagttggacccatagagacatgctaagcactacatcatgctaagaagaacagttattactcagctgccatacttcagccattctacttttacaccaagaacaaaatggctagagatttttttaaaaatacaaatgccagtaccttgccgagacttgttcactgatttgccccaaccccaaggtaatggtcatctactttgcaacctatggagatcctgatagctcccatacaaagtgaggtacactgttgccaatttggaggcaggaagccatcaaactaaacgtagtttaattcagatgaacacctatcgatattcaaaaggcaaaacaaaaaaactaattccagggacattagaccttggtgaaatgccaaatggaaaatggtgctttaaaaggtagtctcttaccatataaggaataagtaaaacattagcttgtgatttctcattattcaggtcaatgttttagacacgactaacaagggacagttcaaactattaaagagaacaaatttttacttaagcactttgaggtatccactccccttaaatgtaagttatgtattttatctgttgattaaggggaggtccaagcatttgtacttggcaggaatgctggcaatagcttgtgccagattactgtataaacttgaaagtaataaaaatgttctttaaaagta

SEQ ID NO: 131068 - DNA, 2390 bp, Homo sapiens
  Payload ID: 5593
  Gene Symbol: EIF2S1
  Gene Name: eukaryotic translation initiation factor 2, subunit 1 alpha, 35kDa
  Uniprot ID: P05198
  ENST ID: ENST00000466499
  CDS Start-End: 761-1708
aattgtaaatatctttaatgcttggaggttaagagaaacttgaactttgtagtaatggagattaaagctattctcaagattaggtatacctattcaataaaagaaaggaatatttgggagtattggggataagagaagctagacattgtgaattcaaggaaaaagaattatgagaggaggatgcattttagtttattttgtgattaaaatttttttagtttttgttgttttgacatgtgacactgtaattttggctataataaatgacagaatgtatcatttggtatattggttagggtttaggtagaaaattttttcctttatatagtgagtggtagcgtatacaatgtttgctcacttcggcaaagagtagctttagttttctgattagttataatagtgatgcttcccatcatttgatatgccttaaagtagtattttactcttgaggtattcctttaatccttaggtcttggagtactttatagatggtcattattttttatgattcctctgaaactaaaggcagagaatcacccaagcattacaaaaatgttgagcaaaataaaaattaaagcttggttcctgaacattatctgttttctggtaccacttaagaagtttcaaaggatgagaagactaagactaataactatttttttcttcatcttttctttcagtggcaggatgtggaaattgattttttttttattttcaccttaactgaatacttacttaattcttttgtttaaattgcagaatgccgggtctaagttgtagattttatcaacacaaatttcctgaggtggaagatgtagtgatggtgaatgtcagatccattgctgaaatgggggcttatgtcagcttgctggaatacaacaacattgaaggcatgattcttcttagtgaattatccagaaggcgtatccgttctatcaacaaactcatccgaattggcaggaatgagtgtgtggttgtcattagggtggacaaagaaaaaggatatattgatttgtcaaaaagaagagtttctccagaggaagcaatcaaatgtgaagacaaattcacaaaatccaaaactgtttatagcattcttcgtcatgttgctgaggtgttagaatacaccaaggatgagcagctggaaagcctattccagaggactgcctgggtctttgatgacaagtacaagagacctggatatggtgcctatgatgcatttaagcatgcagtctcagacccatctattttggatagtttagatttgaatgaagatgaacgggaagtactcattaataatattaataggcgcttgaccccacaggctgtcaaaattcgagcagatattgaagtggcttgttatggttatgaaggcattgatgctgtaaaagaagccctaagagcaggtttgaattgttctacagaaaacatgcccattaagattaatctaatagctcctcctcggtatgtaatgactacgacaaccctggagagaacagaaggcctttctgtcctcagtcaagctatggctgttatcaaagagaagattgaggaaaagaggggtgtgttcaatgttcaaatggagcccaaagtggtcacagatacagatgagactgaacttgcgaggcagatggagaggcttgaaagagaaaatgccgaagtggatggagatgatgatgcagaagaaatggaagccaaagctgaagattaactttgtgggaaacagagtccaatttaaggaacacagagcagcgcttcctggctgtaaatcctagacttgaaagttttccagtattgaaaacttcaaagctgaatattttttatttctaagtatttaaatgttctaacagatcagaacatgaaatgccctcctaaatgtcagctgttgtcacacagtagctccaacactttgagcatttttaagggagtggcctcatttcactagagacaaatctttaagaatagttctaaaattgggcttgtgatttccatttctgatgtctccagattggcacccctttctagttcaatgcctcacgagatttgccaggggcatccaaggcaaacaatcccaatctttctatataaaatgtattcaagcaaacatcaaataaatttctgggatatttaactataggcttcttccttcttgtcaccagttaaaagcattttaatactaagaccctaattcttttatctttattttagtcttgatgtggaactgtaggagcaggtgaataaaggatctctataacagatcctttcaaaagaagagttttagagaaaataaatttaactttaaccacagtgaaagttgacccttagcgggacaaagccttaaaatgcattgaaagaattagatcggttctgtgccttttatctatttgagattg

SEQ ID NO: 131069 - DNA, 999 bp, Homo sapiens
  Payload ID: 5593
  Gene Symbol: EIF2S1
  Gene Name: eukaryotic translation initiation factor 2, subunit 1 alpha, 35kDa
  ENST ID: ENST00000557310
  CDS Start-End: 181-999
tttcccgtccctgcgcgggaagtggctggacagcaccgccaccacccgcgctgtcgtgggcctcctcgccggctccgtgtaggtcatcctgtgttccagaggcatcgttgttcgagcagaggaatctcgtgaaggaaagtgggccgagtggattgtacagcctctacaatatgccgaaaaatgccgggtctaagttgtagattttatcaacacaaatttcctgaggtggaagatgtagtgatggtgaatgtcagatccattgctgaaatgggggcttatgtcagcttgctggaatacaacaacattgaaggcatgattcttcttagtgaattatccagaaggcgtatccgttctatcaacaaactcatccgaattggcaggaatgagtgtgtggttgtcattagggtggacaaagaaaaaggatatattgatttgtcaaaaagaagagtttctccagaggaagcaatcaaatgtgaagacaaattcacaaaatccaaaactgtttatagcattcttcgtcatgttgctgaggtgttagaatacaccaaggatgagcagctggaaagcctattccagaggactgcctgggtctttgatgacaagtacaagagacctggatatggtgcctatgatgcatttaagcatgcagtctcagacccatctattttggatagtttagatttgaatgaagatgaacgggaagtactcattaataatattaataggcgcttgaccccacaggctgtcaaaattcgagcagatattgaagtggcttgttatggttatgaaggcattgatgctgtaaaagaagccctaagagcaggtttgaattgttctacagaaaacatgcccattaagattaatctaatagctcctcctcggtatgtaatgactacgacaaccctggagagaacagaaggcctttctgtcctcagtcaagctatggctgttatcaaagagaagattgaggaaaagaggggtgtgttcaatgttcaaatg

SEQ ID NO: 131070 - DNA, 783 bp, Homo sapiens
  Payload ID: 5593
  Gene Symbol: EIF2S1
  Gene Name: eukaryotic translation initiation factor 2, subunit 1 alpha, 35kDa
  ENST ID: ENST00000555876
  CDS Start-End: 1-758
gcatgattcttcttagtgaattatccagaaggcgtatccgttctatcaacaaactcatccgaattggcaggaatgagtgtgtggttgtcattagggtggacaaagaaaaaggatatattgatttgtcaaaaagaagagtttctccagaggaagcaatcaaatgtgaagacaaattcacaaaatccaaaactgtttatagcattcttcgtcatgttgctgaggtgttagaatacaccaaggatgagcagctggaaagcctattccagaggactgcctgggtctttgatgacaagtacaagagacctggatatggtgcctatgatgcatttaagcatgcagtctcagacccatctattttggatagtttagatttgaatgaagatgaacgggaagtactcattaataatattaataggcgcttgaccccacaggctgtcaaaattcgagcagatattgaagtggcttgttatggttatgaaggcattgatgctgtaaaagaagccctaagagcaggtttgaattgttctacagaaaacatgcccattaagattaatctaatagctcctcctcggtatgtaatgactacgacaaccctggagagaacagaaggcctttctgtcctcagtcaagctatggctgttatcaaagagaagattgaggaaaagaggggtgtgttcaatgttcaaatggaggtgagatcaatagattcatttttaataatgactcaggaggttcctaaaaggagttcttgtaggtaaataagagctgtcggccttggaatgt

SEQ ID NO: 131071 - DNA, 2656 bp, Homo sapiens
  Payload ID: 5594
  Gene Symbol: EIF2S2
  Gene Name: eukaryotic translation initiation factor 2, subunit 2 beta, 38kDa
  Uniprot ID: P20042
  ENST ID: ENST00000374980
  CDS Start-End: 223-1224
gaagcgcgctaggttggctcttctgcgcgcctgcgccttggcgagctctgcgcaggcgcatttccaacgcttggaggagagggcggggtgtcgtttcctttcgctgatgcaagagcctagtgcggtggtgggagaggtatcggcaggggcagcgctgccgccggggcctggggctgacccgtctgacttcccgtccgtgccgagcccactcgagccgcagccatgtctggggacgagatgatttttgatcctactatgagcaagaagaaaaagaagaagaagaagccttttatgttagatgaggaaggggatacccaaacagaggaaacccagccttcagaaacaaaagaagtggagccagagccaactgaggacaaggatttggaagctgatgaagaggacactaggaaaaaagatgcttctgatgatctagatgacttgaacttctttaatcaaaagaaaaagaagaaaaaaactaaaaagatatttgatattgatgaagctgaagaaggtgtaaaggatcttaagattgaaagtgatgttcaagaaccaactgaaccagaggatgaccttgacattatgcttggcaataaaaagaagaaaaagaagaatgttaagttcccagatgaggatgaaatactagagaaagatgaagctctagaagatgaagacaacaaaaaagatgatggtatctcattcagtaatcagacaggccctgcttgggcaggctcagaaagagactacacatacgaggagctgctgaatcgagtgttcaacatcatgagggaaaagaatccagatatggttgctggggagaaaaggaaatttgtcatgaaacctccacaagtcgtccgagtaggaaccaagaaaacttcttttgtcaactttacagatatctgtaaactattacatcgtcagcccaaacatctccttgcatttttgttggctgaattgggtacaagtggttctatagatggtaataaccaacttgtaatcaaaggaagattccaacagaaacagatagaaaatgtcttgagaagatatatcaaggaatatgtcacttgtcacacatgccgatcaccggacacaatcctgcagaaggacacacgactctatttcctacagtgcgaaacttgtcattctagatgttctgttgccagtatcaaaaccggcttccaggctgtcacgggcaagcgagcacagctccgtgccaaagctaactaatttgctaatcactgattttgcaaagcttgttgtggagatgtggctggacaggtttgccatcagagtggatataccgttgtattaaaaacaagataaaaaagctgccaagatttttggcgagtggttggtctgaagtccttgcaagacgctgatgctcaagctgttgacatactcattgcctactttaacacctgtcagagaaacgtgatatggggtaaggaggtgcttttttaaaatcgttcatagacttctgtaaaatgcaagataaattaaagttattataacagtgattctttcaatttggtttgtccttcagttttcttttctataaatgtgcttggtgaaatcagcaagaaaccaaccatataaaacagtgtgtgccgggctctgactgagaaactgaacaatggcaggcgcttcatctgggcagccatttttcttctctgcttctcttgagatacatagttaaagtagacacggcctcccacgcgagtgtggtgggaccttgagacttaggaggattgcctgttttcagtgtccagggaatgactccatagatttgaattcttttccgtatgtggggatggttgctactacctcaccgccaagtcctcccccagctgttaccacatgagggaatacaaggtgctaggtaccctccttcctcgttggccactaagaggtcttagaaacatagcctgtaaatgtgtcttgtaactggcacactaaaaaagatcctagttgagcatctctcttggtgaggaagcgatgtgtgtgcggttcaggaaactcctccaagaggaggaggagtccaaacagggatgccagaggaagctttccgttttcctagccaacttgtgttctgggtttgaaaaagacccaccacaaatgctttttctattttctgatttaaaagtcgcttttgaatatgaccatgagaaaccaagaaatgctgcttgtgtggtgctctgcttcctgaggatttggctggaaggggattctccgctggcacatgggagaaggccatcttctgtgtcggtgctgtgatctgccttgttctcacttgctgaggataagggcatacacgctgctcctcgctttcttgttgcccgacttcgtactaagcagctcaggagcagtcactcagacccaaatgtcttgactgtgttgtttttaatcactgtgacccttaaagtacaggccaagtgttgtcaaacaccttggctaaaacagtggagggtgatgggtaaagcagtagagggccctcaacccacacactggctgaaactgccaccaactgccacgatgaacccaactgctgtttatgcccccattttcctttttttgtatctacacccacacgattcccaatgttggatatttctacatgaataaagcaaggatcagtgcctcttatgtaattaacgctcca

SEQ ID NO: 131072 - DNA, 2858 bp, Homo sapiens
  Payload ID: 5595
  Gene Symbol: EIF2S3
  Gene Name: eukaryotic translation initiation factor 2, subunit 3 gamma, 52kDa
  Uniprot ID: P41091
  ENST ID: ENST00000253039
  CDS Start-End: 254-1672
agtattgcctgcacaaatatctaccaggtctgcgacgaatagctccagcaacttcgcaccgtgttttccactcagcctaccgacaggcactgtgcagattcaagcggagagatgtccaagcagtgaggccgctgctgcaccggccatcctgagcccctactcggccttcccgtctccgcttccccgccccgcactaggacccctgcagatgatcaggcggcagccggggtgatttccttcctcttttggcaacatggcgggcggagaagctggagtgactctagggcagccgcatctttcgcgtcaggatctcaccaccttggatgttaccaagttgacgccactttcacacgaagttatcagcagacaagccacaattaacataggtacaattggtcatgtagctcatgggaaatccacagtcgtcaaagctatttctggagttcatactgtcaggttcaaaaatgaactagaaagaaatattacaatcaagcttggatatgctaatgctaagatttataagcttgatgacccaagttgccctcggccagaatgttatagatcttgtgggagcagtacacctgacgagtttcctacggacattccagggaccaaagggaacttcaaattagtcagacatgtttcctttgttgactgtcctggccacgatattttgatggctactatgctgaacggtgcagcagtgatggatgcagctcttctgttgatagctggtaatgaatcttgccctcagcctcagacatcggaacacctggctgctatagagatcatgaaactgaagcatattttgattctacaaaataaaattgatttggtaaaagaaagtcaggctaaagaacaatacgagcagatccttgcatttgtccaaggtacagtagcagagggagctcccattattccaatttcagctcagctgaaatacaatattgaagttgtttgtgagtacatagtaaagaaaattccagtacccccaagagactttacttcagagccccggcttattgttattagatcttttgatgtcaacaaacctggctgtgaagttgatgaccttaagggaggtgtagctggtggtagtatcctaaaaggagtattaaaggtgggccaggagatagaagtaagacctggtattgtttccaaagatagtgaaggaaaactcatgtgtaaaccaatcttttccaaaattgtatcactttttgcggagcataatgatctgcaatatgctgctccaggcggtcttattggagttggaacaaaaattgaccccactttgtgccgggctgacagaatggtggggcaagtacttggtgcagtcggagctttacctgagatattcacagaattggaaatttcctatttcctgcttagacggcttctaggtgtacgcactgaaggagacaagaaagcagcaaaggttcaaaagctgtctaagaatgaagtgctcatggtgaacataggatccctgtcaacaggagggagagttagtgctgtcaaggccgatttgggtaaaattgttttgaccaatccagtgtgcacagaggtaggagaaaaaattgcccttagccgaagagttgaaaaacactggcgtttaattggttggggtcagataagaagaggagtgacaatcaagccaacagtagatgatgactgaagaataccagttaaataatacattcggatggatttggaagttggaattcctcttaacaaccaaggggtttattttcaaagcaatattggggaattgatttcacagttcgttaccttagtaggtaacggtaaggttattctctttttttttttttttttttttggttatgaaaacttagggactaaaattaatataaaaattggcataatgttggattgaatctacattttggcagaagttaaacattcccacataatgtcaaaattatacatcatgcagttctgtttttttgtttgttttattttgttttgtttttgagtctggctctgtcacccaggctggagtgcagtggcgtgatctgcaacctctgccccccgggttcaagcgattctcctgcctcagcctcccgagtagctgagattacaggtgcgcgccaccacacttggctaatttttgtattattagtagagacggggtttcagcatgttggctaggccggtctctcctgacctcagggtgatcagcccacctcggcctcacaaagtgctgggattacaggcgtgagccaccttgcccagcccacatcatacagtttgaaatgaaactttgccacaaccagcctttgctgtagcacacacatatatcactgaacctgtttgaaataaagttttttttctttttcatgattcgtctttgagtacctccaggctgaaagactgttgtaccagtaaaaacttaaaggcacaaattctccttgaagaccttctcccttttatgtggccccatattttatgttgctttatctttgaaattttgcatgaaaaggaaatgaatggattcgaatgaaattgtcctttagagcatgattacttgttcccatggacaaatatttttctccccttgctcttcctggcctgaaacacgggaaaccagagtcaaaagttatctccctctccctgtgatgccttgagatttttttctgcgttgtttaatgcctgaaatccaagtcttcctccatgggaaaatactgttataccaaataattctagatgagtaacaaagatctttttaggccttcattttatgttttttcttaactgttatattatgattgtgacatagattatactactactaatttttggatgtttcaaaaggtcaagaagtaaaagatgttagaaagcaa

SEQ ID NO: 131073 - DNA, 773 bp, Homo sapiens
  Payload ID: 5595
  Gene Symbol: EIF2S3
  Gene Name: eukaryotic translation initiation factor 2, subunit 3 gamma, 52kDa
  ENST ID: ENST00000423068
  CDS Start-End: 1-550
ggcgggcggagaagctggagtgactctagggcagccgcatctttcgcgtcaggatctcaccaccttggatgttaccaagttgacgccactttcacacgaagttatcagcagacaagccacaattaacataggtacaattggtcatgtagctcatgggaaatccacagtcgtcaaagctatttctggagttcatactgtcaggttcaaaaatgaactagaaagaaatattacaatcaagcttggatatgctaatgctaagatttataagcttgatgacccaagttgccctcggccagaatgttatagatcttgtgggagcagtacacctgacgagtttcctacggacattccagggaccaaagggaacttcaaattagtcagacatgtttcctttgttgactgtcctggccacgatattttgatggctactatgctgaacggtgcagcagtgatggatgcagctcttctgttgataggtaaatacctcacaattggtttggacaaatcaatgtggaacaaatccaagatgaaatatttaaaggggaactaaggcctttaaggatcatatctattacctaagggtgacatgaatgggaactaacatgtcatccaggatgactttcctacctatcagctatcacaaaatactcaaaaagatagacttggggctgatagcttgcgagaattcttgtggtagcatttgagaaaaagaaaaaaagtcaatagttcatttttctcatttaaatcacatgaggtgatttatttagttttaa

SEQ ID NO: 131074 - DNA, 2083 bp, Homo sapiens
  Payload ID: 5596
  Gene Symbol: EIF2A
  Gene Name: eukaryotic translation initiation factor 2A, 65kDa
  ENST ID: ENST00000273435
  CDS Start-End: 10-1752
cgggacaacatggcgccgtccacgccgctcttgacagtccgaggatcagaaggactgtacatggtgaatggaccaccacattttacagaaagcacagtgtttccaagggaatctgggaagaattgcaaagtctgtatctttagtaaggatgggaccttgtttgcctggggcaatggagaaaatgtcactaacaagggactactgcactccttcgacctcctgaaggcagtttgccttgaattctcacccaaaaatactgtcctggcaacgtggcagccttacactacttctaaagatggcacagctgggatacccaacctacaactttatgatgtgaaaactgggacatgtttgaaatctttcatccagaaaaaaatgcaaaattggtgtccatcctggtcagaagatgaaactctttgtgcccgcaatgttaacaatgaagttcacttctttgaaaacaacaattttaacacaattgcaaataaattgcatttgcaaaaaattaatgattttgtattatcacctggaccccaaccatacaaggtggctgtctatgttccaggaagtaaaggtgcaccttcatttgttagattatatcagtaccccaactttgctggacctcatgcagctttagctaataaaagtttctttaaggcagataaagttacaatgctgtggaataaaaaagctactgctgtgttggtaatagctagcacagatgttgacaagacaggagcttcctactatggagaacaaactctacactacattgcaacaaatggagaaagtgctgtagtgcaattaccaaaaaatggccccatttatgatgtagtttggaattctagttctactgagttttgtgctgtatatggttttatgcctgccaaagcgacaattttcaacttgaaatgtgatcctgtatttgactttggaactggtcctcgtaatgcagcctactatagccctcatggacatatattagtattagctggatttggaaatctgaggggacaaatggaagtgtgggatgtgaaaaactacaaacttatttctaaaccggtggcttctgattctacatattttgcttggtgcccggatggtgagcatattttaacagctacatgtgctcccaggttacgggttaataatggatacaaaatttggcattatactggctctatcttgcacaagtatgatgtgccatcaaatgcagaattatggcaggtttcttggcagccatttttggatggaatatttccagcaaaaacaataacttaccaagcagttccaagtgaagtacccaatgaggaacctaaagttgcaacagcttatagacccccagctttaagaaataaaccaatcaccaattccaaattgcatgaagaggaaccacctcagaatatgaaaccacaatcaggaaacgataagccattatcaaaaacagctcttaaaaatcaaaggaagcatgaagctaagaaagctgcaaagcaggaagcaagaagtgacaagagtccagatttggcacctactcctgccccacagagcacaccacgaaacactgtctctcagtcaatttctggggaccctgagatagacaaaaaaatcaagaacctaaagaagaaactgaaagcaatcgaacaactgaaagaacaagcagcaactggaaaacagctagaaaaaaatcagttggagaaaattcagaaagaaacagcccttctccaggagctggaagatttggaattgggtatttaaagattcacggaaagcaagttgatgaccagaaatcagtgcaaacacatcttctgttaaacccattggtatacacagaatattcctgtgcccacacttaatgtcaatctataattttaaccatttatccaagattctactaagtgtaaaattatttaataatgtctattaaattgatatttatatcttgcatcctatatcatgtcaatatgtgatatagaaaagagatacgtgaattttttagctaagcttgacagattgaaagacaagtgtcatttttttttgtagagggtgatatataccatgtaaatgaacaaagacattttaaatttaa

SEQ ID NO: 131075 - DNA, 1795 bp, Homo sapiens
  Payload ID: 5596
  Gene Symbol: EIF2A
  Gene Name: eukaryotic translation initiation factor 2A, 65kDa
  Uniprot ID: Q9BY44
  ENST ID: ENST00000406576
  CDS Start-End: 17-1591
ctctttccgggacaacatggcgccgtccacgccgctcttgacagtccgaggatcagaaggactgtacatggtgaatggaccaccacattttacagaaagcacagtgtttccaagggaatctgggaagaattgcaaagtctgtatctttagtaaggatgggaccttgtttgcctggggcaatggagaaaaagtaaatattatcagtgtcactaacaagggactactgcactccttcgacctcctgaaggcagtttgccttgaattctcacccaaaaatactgtcctggcaacgtggcagccttacactaacacaattgcaaataaattgcatttgcaaaaaattaatgattttgtattatcacctggaccccaaccatacaaggtggctgtctatgttccaggaagtaaaggtgcaccttcatttgttagattatatcagtaccccaactttgctggacctcatgcagctttagctaataaaagtttctttaaggcagataaagttacaatgctgtggaataaaaaagctactgctgtgttggtaatagctagcacagatgttgacaagacaggagcttcctactatggagaacaaactctacactacattgcaacaaatggagaaagtgctgtagtgcaattaccaaaaaatggccccatttatgatgtagtttggaattctagttctactgagttttgtgctgtatatggttttatgcctgccaaagcgacaattttcaacttgaaatgtgatcctgtatttgactttggaactggtcctcgtaatgcagcctactatagccctcatggacatatattagtattagctggatttggaaatctgaggggacaaatggaagtgtgggatgtgaaaaactacaaacttatttctaaaccggtggcttctgattctacatattttgcttggtgcccggatggtgagcatattttaacagctacatgtgctcccaggttacgggttaataatggatacaaaatttggcattatactggctctatcttgcacaagtatgatgtgccatcaaatgcagaattatggcaggtttcttggcagccatttttggatggaatatttccagcaaaaacaataacttaccaagcagttccaagtgaagtacccaatgaggaacctaaagttgcaacagcttatagacccccagctttaagaaataaaccaatcaccaattccaaattgcatgaagaggaaccacctcagaatatgaaaccacaatcaggaaacgataagccattatcaaaaacagctcttaaaaatcaaaggaagcatgaagctaagaaagctgcaaagcaggaagcaagaagtgacaagagtccagatttggcacctactcctgccccacagagcacaccacgaaacactgtctctcagtcaatttctggggaccctgagatagacaaaaaaatcaagaacctaaagaagaaactgaaagcaatcgaacaactgaaagaacaagcagcaactggaaaacagctagaaaaaaatcagttggagaaaattcagaaagaaacagcccttctccaggagctggaagatttggaattgggtatttaaagattcacggaaagcaagttgatgaccagaaatcagtgcaaacacatcttctgttaaacccattggtatacacagaatattcctgtgcccacacttaatgtcaatctataattttaaccatttatccaagattctactaagtgtaaaattatttaataatgtctattaaattgatatttatatcttgcatcctatatcatgtca

SEQ ID NO: 131076 - DNA, 2198 bp, Homo sapiens
  Payload ID: 5596
  Gene Symbol: EIF2A
  Gene Name: eukaryotic translation initiation factor 2A, 65kDa
  Uniprot ID: Q9BY44
  ENST ID: ENST00000460851
  CDS Start-End: 110-1867
gatggctccggaaacaccaattcgctgtctccacgcatgaggagacgtgtaggggccgggttcggccctggtgaactctcacccgagcggtttctctttccgggacaacatggcgccgtccacgccgctcttgacagtccgaggatcagaaggactgtacatggtgaatggaccaccacattttacagaaagcacagtgtttccaagggaatctgggaagaattgcaaagtctgtatctttagtaaggatgggaccttgtttgcctggggcaatggagaaaaagtaaatattatcagtgtcactaacaagggactactgcactccttcgacctcctgaaggcagtttgccttgaattctcacccaaaaatactgtcctggcaacgtggcagccttacactacttctaaagatggcacagctgggatacccaacctacaactttatgatgtgaaaactgggacatgtttgaaatctttcatccagaaaaaaatgcaaaattggtgtccatcctggtcagaagatgaaactctttgtgcccgcaatgttaacaatgaagttcacttctttgaaaacaacaattttaacacaattgcaaataaattgcatttgcaaaaaattaatgattttgtattatcacctggaccccaaccatacaaggtggctgtctatgttccaggaagtaaaggtgcaccttcatttgttagattatatcagtaccccaactttgctggacctcatgcagctttagctaataaaagtttctttaaggcagataaagttacaatgctgtggaataaaaaagctactgctgtgttggtaatagctagcacagatgttgacaagacaggagcttcctactatggagaacaaactctacactacattgcaacaaatggagaaagtgctgtagtgcaattaccaaaaaatggccccatttatgatgtagtttggaattctagttctactgagttttgtgctgtatatggttttatgcctgccaaagcgacaattttcaacttgaaatgtgatcctgtatttgactttggaactggtcctcgtaatgcagcctactatagccctcatggacatatattagtattagctggatttggaaatctgaggggacaaatggaagtgtgggatgtgaaaaactacaaacttatttctaaaccggtggcttctgattctacatattttgcttggtgcccggatggtgagcatattttaacagctacatgtgctcccaggttacgggttaataatggatacaaaatttggcattatactggctctatcttgcacaagtatgatgtgccatcaaatgcagaattatggcaggtttcttggcagccatttttggatggaatatttccagcaaaaacaataacttaccaagcagttccaagtgaagtacccaatgaggaacctaaagttgcaacagcttatagacccccagctttaagaaataaaccaatcaccaattccaaattgcatgaagaggaaccacctcagaatatgaaaccacaatcaggaaacgataagccattatcaaaaacagctcttaaaaatcaaaggaagcatgaagctaagaaagctgcaaagcaggaagcaagaagtgacaagagtccagatttggcacctactcctgccccacagagcacaccacgaaacactgtctctcagtcaatttctggggaccctgagatagacaaaaaaatcaagaacctaaagaagaaactgaaagcaatcgaacaactgaaagaacaagcagcaactggaaaacagctagaaaaaaatcagttggagaaaattcagaaagaaacagcccttctccaggagctggaagatttggaattgggtatttaaagattcacggaaagcaagttgatgaccagaaatcagtgcaaacacatcttctgttaaacccattggtatacacagaatattcctgtgcccacacttaatgtcaatctataattttaaccatttatccaagattctactaagtgtaaaattatttaataatgtctattaaattgatatttatatcttgcatcctatatcatgtcaatatgtgatatagaaaagagatacgtgaattttttagctaagcttgacagattgaaagacaagtgtcatttttttttgtagagggtgatatataccatgtaaatgaacaaagacattttaaatttaa

SEQ ID NO: 131077 - DNA, 568 bp, Homo sapiens
  Payload ID: 5596
  Gene Symbol: EIF2A
  Gene Name: eukaryotic translation initiation factor 2A, 65kDa
  ENST ID: ENST00000490505
  CDS Start-End: 4-231
aacatggcgccgtccacgccgctcttgacagtccgaggatcagaaggactgtacatggtgaatggaccaccacattttacagaaagcacagtgtttccaagagacagggtttcgccatgttgcccagctggtctcgaactcccaacctcaggtgatccgcctgcctcggcctcccaaactgctgggattacaggtggaatctgggaagaattgcaaagtctgtatctttagtaaggatgggaccttgtttgcctggggcaatggagaaaaagtaaatattatcagtgtcactaacaagggactactgcactccttcgacctcctgaaggcagtttgccttgaattctcacccaaaaatactgtcctggcaacgtggcagccttacactacttctaaagatggcacagctgggatacccaacctacaactttatgatgtgaaaactgggacatgtttgaaatctttcatccagaaaaaaatgcaaaattggtgtccatcctggtcagaagatgaaactctttgtgcccgcaatgttaacaatgaagttcacttctttgaaaacaacaat

SEQ ID NO: 131078 - DNA, 725 bp, Homo sapiens
  Payload ID: 5596
  Gene Symbol: EIF2A
  Gene Name: eukaryotic translation initiation factor 2A, 65kDa
  ENST ID: ENST00000482093
  CDS Start-End: 16-725
tctttccgggacaacatggcgccgtccacgccgctcttgacagtccgaggatcagaaggactgtacatggtgaatggaccaccacattttacagaaagcacagtgtttccaagggaatctgggaagaattgcaaagtctgtatctttagtaaggatgggaccttgtttgcctggggcaatggagaaaaagtaaatattatcagtgtcactaacaagggactactgcactccttcgacctcctgaaggcagtttgccttgaattctcacccaaaaatactgtcctggcaacgtggcagccttacactacttctaaagatggcacagctgggatacccaacctacaactttatgatgtgaaaactgggacatgtttgaaatctttcatccagaaaaaaatgcaaaattggtgtccatcctggtcagaagatgaaactctttgtgcccgcaatgttaacaatgaagttcacttctttgaaaacaacaattttattggctctagagtttcagcttcaggttcttttttagacacaattgcaaataaattgcatttgcaaaaaattaatgattttgtattatcacctggaccccaaccatacaaggtggctgtctatgttccaggaagtaaaggtgcaccttcatttgttagattatatcagtaccccaactttgctggacctcatgcagctttagctaataaaagtttctttaaggcagataaagttac

SEQ ID NO: 131079 - DNA, 710 bp, Homo sapiens
  Payload ID: 5596
  Gene Symbol: EIF2A
  Gene Name:: eukaryotic translation initiation factor 2A, 65kDa
  ENST ID: ENST00000494558
  CDS Start-End: 37-216
aactctcacccgagcggtttctctttccgggacaacatggcgccgtccacgccgctcttgacagtccgaggatcagaaggactgtacatggtgaatggaccaccacattttacagaaagcacagtgtttccaagggaatctgggaagaattgcaaagtctgtatctttagtaaggatgggaccttgtttgcctggggcaatggagaaaacttctaaagatggcacagctgggatacccaacctacaactttatgatgtgaaaactgggacatgtttgaaatctttcatccagaaaaaaatgcaaaattggtgtccatcctggtcagaagatgaaactctttgtgcccgcaatgttaacaatgaagttcacttctttgaaaacaacaattttaacacaattgcaaataaattgcatttgcaaaaaattaatgattttgtattatcacctggaccccaaccatacaaggtggctgtctatgttccaggaagtaaaggtgcaccttcatttgttagattatatcagtaccccaactttgctggacctcatgcagctttagctaataaaagtttctttaaggcagataaagttacaatgctgtggaataaaaaagctactgctgtgttggtaatagctagcacagatgttgacaagacaggagcttcctactatggagaacaaactctacactacattgcaacaaatggagaaa

SEQ ID NO: 131080 - DNA, 1906 bp, Homo sapiens
  Payload ID: 5596
  Gene Symbol: EIF2A
  Gene Name: eukaryotic translation initiation factor 2A, 65kDa
  ENST ID: ENST00000477551
  CDS Start-End: 1-475
agtccgaggatcagaaggactgtacatggtgaatggaccaccacattttacagaaagcacagtgtttccaagggaatctgggaagaattgcaaagtctgtatctttagtaaggatgggaccttgtttgcctggggcaatggagaaaaagtaaatattatcagtgtcactaacaagggactactgcactccttcgacctcctgaaggcagtttgccttgaattctcacccaaaaatactgtcctggcaacgtggcagccttacactacttctaaagatggcacagctgggatacccaacctacaactttatgatgtgaaaactgggacatgtttgaaatctttcatccagaaaaaaatgcaaaattggtgtccatcctggtcagaagatgaaactctttgtgcccgcaatgttaacaatgaagttcacttctttgaaaacaacaattttagtggctgtctatgttccaggaagtaaaggcagataaagttacaatgctgtggaataaaaaagctactgctgtgttggtaatagctagcacagatgttgacaagacaggagcttcctactatggagaacaaactctacactacattgcaacaaatggagaaagtgctgtagtgcaattaccaaaaaatggccccatttatgatgtagtttggaattctagttctactgagttttgtgctgtatatggttttatgcctgccaaagcgacaattttcaacttgaaatgtgatcctgtatttgactttggaactggtcctcgtaatgcagcctactatagccctcatggacatatattagtattagctggatttggaaatctgaggggacaaatggaagtgtgggatgtgaaaaactacaaacttatttctaaaccggtggcttctgattctacatattttgcttggtgcccggatggtgagcatattttaacagctacatgtgctcccaggttacgggttaataatggatacaaaatttggcattatactggctctatcttgcacaagtatgatgtgccatcaaatgcagaattatggcaggtttcttggcagccatttttggatggaatatttccagcaaaaacaataacttaccaagcagttccaagtgaagtacccaatgaggaacctaaagttgcaacagcttatagacccccagctttaagaaataaaccaatcaccaattccaaattgcatgaagaggaaccacctcagaatatgaaaccacaatcaggaaacgataagccattatcaaaaacagctcttaaaaatcaaaggaagcatgaagctaagaaagctgcaaagcaggaagcaagaagtgacaagagtccagatttggcacctactcctgccccacagagcacaccacgaaacactgtctctcagtcaatttctggggaccctgagatagacaaaaaaatcaagaacctaaagaagaaactgaaagcaatcgaacaactgaaagaacaagcagcaactggaaaacagctagaaaaaaatcagttggagaaaattcagaaagaaacagcccttctccaggagctggaagatttggaattgggtatttaaagattcacggaaagcaagttgatgaccagaaatcagtgcaaacacatcttctgttaaacccattggtatacacagaatattcctgtgcccacacttaatgtcaatctataattttaaccatttatccaagattctactaagtgtaaaattatttaataatgtctattaaattgatatttatatcttgcatcctatatcatgtcaatatgtgatatagaaaagagatacgtgaattttttagctaagcttgacagattgaaagacaagtgtcatttttttttgtagagggtgatatataccatgtaaatgaacaaagacattttaaatttaa

SEQ ID NO: 131081 - DNA, 817 bp, Homo sapiens
  Payload ID: 5596
  Gene Symbol: EIF2A
  Gene Name: eukaryotic translation initiation factor 2A, 65kDa
  ENST ID: ENST00000462221
  CDS Start-End: 1-123
cacgccgctcttgacagtccgaggatcagaaggactgtacatggtgaatggaccaccacattttacagaaagcacagtgtttccaagggaatctgggaagaattgcaaagtctgtatctttagtaaggatgggaccttgtttgcctggggcaatggagaaaaagtaaatattatcagtgtcactaacaagggactactgcactccttcgacctcctgaaggcagtttgccttgaattctcacccaaaaatactgtcctggcaacgtggcagccttacactacttctaaagatggcacagctgggatacccaacctacaactttatgatgtgaaaactgggacatgtttgaaatctttcatccagaaaaaaatgcaaaattggtgtccatcctggtcagaagatgaaactctttgtgcccgcaatgttaacaatgaagttcacttctttgaaaacaacaattttaacacaattgcaaataaattgcatttgcaaaaaattaatgattttgtattatcacctggaccccaaccatacaaggtggctgtctatgttccaggaagtaaagataaagttacaatgctgtggaataaaaaagctactgctgtgttggtaatagctagcacagatgttgacaagacaggagcttcctactatggagaacaaactctacactacattgcaacaaatggagaaagtgctgtagtgcaattaccaaaaaatggccccatttatgatgtagtttggaattctagttctactgagttttgtgctgtatatggttttatgcctgccaaagcgacaattttcaacttgaaa

SEQ ID NO: 131082 - DNA, 1913 bp, Homo sapiens
  Payload ID: 5596
  Gene Symbol: EIF2A
  Gene Name: eukaryotic translation initiation factor 2A, 65kDa
  Uniprot ID: Q9BY44
  ENST ID: ENST00000487799
  CDS Start-End: 119-1801
cccgaggctgatggctccggaaacaccaattcgctgtctccacgcatgaggagacgtgtaggggccgggttcggccctggtgaactctcacccgagcggtttctctttccgggacaacatggcgccgtccacgccgctcttgacagtccgaggatcagaaggactgtacatggtgaatggaccaccacattttacagaaagcacagtgtttccaagagtaaatattatcagtgtcactaacaagggactactgcactccttcgacctcctgaaggcagtttgccttgaattctcacccaaaaatactgtcctggcaacgtggcagccttacactacttctaaagatggcacagctgggatacccaacctacaactttatgatgtgaaaactgggacatgtttgaaatctttcatccagaaaaaaatgcaaaattggtgtccatcctggtcagaagatgaaactctttgtgcccgcaatgttaacaatgaagttcacttctttgaaaacaacaattttaacacaattgcaaataaattgcatttgcaaaaaattaatgattttgtattatcacctggaccccaaccatacaaggtggctgtctatgttccaggaagtaaaggtgcaccttcatttgttagattatatcagtaccccaactttgctggacctcatgcagctttagctaataaaagtttctttaaggcagataaagttacaatgctgtggaataaaaaagctactgctgtgttggtaatagctagcacagatgttgacaagacaggagcttcctactatggagaacaaactctacactacattgcaacaaatggagaaagtgctgtagtgcaattaccaaaaaatggccccatttatgatgtagtttggaattctagttctactgagttttgtgctgtatatggttttatgcctgccaaagcgacaattttcaacttgaaatgtgatcctgtatttgactttggaactggtcctcgtaatgcagcctactatagccctcatggacatatattagtattagctggatttggaaatctgaggggacaaatggaagtgtgggatgtgaaaaactacaaacttatttctaaaccggtggcttctgattctacatattttgcttggtgcccggatggtgagcatattttaacagctacatgtgctcccaggttacgggttaataatggatacaaaatttggcattatactggctctatcttgcacaagtatgatgtgccatcaaatgcagaattatggcaggtttcttggcagccatttttggatggaatatttccagcaaaaacaataacttaccaagcagttccaagtgaagtacccaatgaggaacctaaagttgcaacagcttatagacccccagctttaagaaataaaccaatcaccaattccaaattgcatgaagaggaaccacctcagaatatgaaaccacaatcaggaaacgataagccattatcaaaaacagctcttaaaaatcaaaggaagcatgaagctaagaaagctgcaaagcaggaagcaagaagtgacaagagtccagatttggcacctactcctgccccacagagcacaccacgaaacactgtctctcagtcaatttctggggaccctgagatagacaaaaaaatcaagaacctaaagaagaaactgaaagcaatcgaacaactgaaagaacaagcagcaactggaaaacagctagaaaaaaatcagttggagaaaattcagaaagaaacagcccttctccaggagctggaagatttggaattgggtatttaaagattcacggaaagcaagttgatgaccagaaatcagtgcaaacacatcttctgttaaacccattggtatacacagaatattcctgtgcccacacttaatgtcaatctataat

SEQ ID NO: 131083 - DNA, 1273 bp, Homo sapiens
  Payload ID: 5596
  Gene Symbol: EIF2A
  Gene Name: eukaryotic translation initiation factor 2A, 65kDa
  ENST ID: ENST00000465535
  CDS Start-End: 1-950
tgtggaataaaaaagctactgctgtgttggtaatagctagcacagatgttgacaagacaggagcttcctactatggagaacaaactctacactacattgcaacaaatggagaaagtgctgtagtgcaattaccaaaaaatggccccatttatgatgtagtttggaattctagttctactgagttttgtgctgtatatggttttatgcctgccaaagcgacaattttcaacttgaaatgtgatcctgtatttgactttggaactggtcctcgtaatgcagcctactatagccctcatggacatatattagtattagctggatttggaaatctgaggggacaaatggaagtgtgggatgtgaaaaactacaaacttatttctaaaccggtggcttctgattctacatattttgcttggtgcccggatggtgagcatattttaacagctacatgtgctcccaggttacgggttaataatggatacaaaatttggcattatactggctctatcttgcacaagtatgatgtgccatcaaatgcagaattatggcaggtttcttggcagccatttttggatggaatatttccagcaaaaacaataacttaccaagcagttccaagtgaagtacccaatgaggaacctaaagttgcaacagcttatagacccccagctttaagaaataaaccaatcaccaattccaaattgcatgaagaggaaccacctcagaatatgaaaccacaatcaggaaacgataagccattatcaaaaacagctcttaaaaatcaaaggaagcatgaagctaagaaagctgcaaagcagaaactgaaagcaatcgaacaactgaaagaacaagcagcaactggaaaacagctagaaaaaaatcagttggagaaaattcagaaagaaacagcccttctccaggagctggaagatttggaattgggtatttaaagattcacggaaagcaagttgatgaccagaaatcagtgcaaacacatcttctgttaaacccattggtatacacagaatattcctgtgcccacacttaatgtcaatctataattttaaccatttatccaagattctactaagtgtaaaattatttaataatgtctattaaattgatatttatatcttgcatcctatatcatgtcaatatgtgatatagaaaagagatacgtgaattttttagctaagcttgacagattgaaagacaagtgtcatttttttttgtagagggtgatatataccatgtaaatgaacaaagacatttt

SEQ ID NO: 131084 - DNA, 4469 bp, Homo sapiens
  Payload ID: 5597
  Gene Symbol: EIF2AK1
  Gene Name: eukaryotic translation initiation factor 2-alpha kinase 1
  Uniprot ID: Q9BQI3
  ENST ID: ENST00000199389
  CDS Start-End: 148-2040
cccccagtgaaggtgcgcgcgtggcggaggctggttttccgtctggtgaggggttacttccgggtcggacggcgctagctgcagcatcggagtgtggcagtgctgggctggccggcgggctgggctgcggcccgcgcgcggccggcgatgcaggggggcaactccggggtccgcaagcgcgaagaggagggcgacggggctggggctgtggctgcgccgccggccatcgactttcccgccgagggcccggaccccgaatatgacgaatctgatgttccagcagaaatccaggtgttaaaagaacccctacaacagccaaccttcccttttgcagttgcaaaccaactcttgctggtttctttgctggagcacttgagccacgtgcatgaaccaaacccacttcgttcaagacaggtgtttaagctactttgccagacgtttatcaaaatggggctgctgtcttctttcacttgtagtgacgagtttagctcattgagactacatcacaacagagctattactcacttaatgaggtctgctaaagagagagttcgtcaggatccttgtgaggatatttctcgtatccagaaaatcagatcaagggaagtagccttggaagcacaaacttcacgttacttaaatgaatttgaagaacttgccatcttaggaaaaggtggatacggaagagtatacaaggtcaggaataaattagatggtcagtattatgcaataaaaaaaatcctgattaagggtgcaactaaaacagtttgcatgaaggtcctacgggaagtgaaggtgctggcaggtcttcagcaccccaatattgttggctatcacaccgcgtggatagaacatgttcatgtgattcagccacgagcagacagagctgccattgagttgccatctctggaagtgctctccgaccaggaagaggacagagagcaatgtggtgttaaaaatgatgaaagtagcagctcatccattatctttgctgagcccaccccagaaaaagaaaaacgctttggagaatctgacactgaaaatcagaataacaagtcggtgaagtacaccaccaatttagtcataagagaatctggtgaacttgagtcgaccctggagctccaggaaaatggcttggctggtttgtctgccagttcaattgtggaacagcagctgccactcaggcgtaattcccacctagaggagagtttcacatccaccgaagaatcttccgaagaaaatgtcaactttttgggtcagacagaggcacagtaccacctgatgctgcacatccagatgcagctgtgtgagctctcgctgtgggattggatagtcgagagaaacaagcggggccgggagtatgtggacgagtctgcctgtccttatgttatggccaatgttgcaacaaaaatttttcaagaattggtagaaggtgtgttttacatacataacatgggaattgtgcaccgagatctgaagccaagaaatatttttcttcatggccctgatcagcaagtaaaaataggagactttggtctggcctgcacagacatcctacagaagaacacagactggaccaacagaaacgggaagagaacaccaacacatacgtccagagtgggtacttgtctgtacgcttcacccgaacagttggaaggatctgagtatgatgccaagtcagatatgtacagcttgggtgtggtcctgctagagctctttcagccgtttggaacagaaatggagcgagcagaagttctaacaggtttaagaactggtcagttgccggaatccctccgtaaaaggtgtccagtgcaagccaagtatatccagcacttaacgagaaggaactcatcgcagagaccatctgccattcagctgctgcagagtgaacttttccaaaattctggaaatgttaacctcaccctacagatgaagataatagagcaagaaaaagaaattgcagaactaaagaagcagctaaacctcctttctcaagacaaaggggtgagggatgacggaaaggatgggggcgtgggatgaaagtggacttaacttttaaggtagttaactggaatgtaaatttttaatctttattagggtatagttggtacaatgcttcgttgtatttagtaagcctttacaagacttgttaaagatgtcagagtgccccaagctgccgttccttcccttcctgccccacaagctccttttcctgaatttcctacctaaatattaaccatatgcctagtctctgaaactaaaaacttggacctcatcctcaattattttctcctttcaactctgttgaccctctgtctggtcttcctctagaaggtaccgcagaaattgatgtgtgctccctgccctcgtcactgcccaagcccgggcctgcacatactcactggactgttccagttttgacagctgccagtcttcctgcccctttcacactgcagctgaagttcattacctgaaggacgcctcatcatttcattccttggctccaaaccttctgctgcctctaagataaaagctcaacttcttaacagtgtacagtgtgcaacttccaacctttttatctgttctctccaccttcagtttagcgtcattccaaaaccacacccttgcaaagctttgtactccgcaccccagatgatctccaggcagctcagatctctttcctgcctttgccctgcactgttccccggtacttcctcctttattgtagcactcagctccccagccaatctgtacatccctcagaggcagcgatctgatgaattggtttttgaatcccagaaagggtctgccatggagttggcagtcatcacggtagatggcgtatgattttgctgaattttaaataaaatgaaaaccataaattacatgatgcttttattgacacttgacaactggcctaaataaaaagactctgactctaatacaagtccccttactgataataggcatgaaagagcaccattcttaaaatctaaaccctttaaaatcagttacggcaattcacttaaggagcttgagggccgtgttaaaaggagccaggttttcacaagacctcatccacctctgcacattggctggcactgtcacactgcagcctccgatctgctggagtacagaccacagcaccacgtctgctacggtgagttcattcccagcgagccaagggctcttcccaagagcagagttcatggagcggaaaacagcggctttttctttactgcttccctcttttaactgaaaaatcgcaatatctacccagctatctataagggttgcgttgacagcattatgcttctggccaaacagagagaacaagaaacgtgcaatgttcccttcgccttcgatggggcacatcgtctggatgctgaatttcatctgcgtcttcggcactgaaaagaaaaaacacgccaggtagcatcaccagagcagccctgagggaagtactcgcacagtggggaaggggacagtcaccaaacaccacagactgatgacatgggaaagggtgttttcaagaagaacatcacattttcagtctgtctctaagatgcttactactgaaaagggtttaagtgcaaactatgttaaaaaagtaaccaaagagtcattcctggtatttgattatgacacttctgaagctagaagggacctcagaccacctgctccaatccctgctgcctaaggttttgggggctgagggctggaaacccaggagctgcatctcccaggctcttggcctcataatcgccttctgtgagactgagggcaattaagatatgaatgacatgaactcgcttatctccatatcaacataaaccagaagaggcatacatctgtgggatagtcaatacataacatcctatctttatatggccatatgagaagataacttcagtgtccctatgatggtaagttcttgaatgtgagggcaagatggctgtgatagccatgactccccgctttgcctggttggacagaacccccttccccaaatgctcacagtcccccccttgagctgtgtctcactcagagaccctaaattttgcagacgaacaagggcatctttgcgttgcttcatctctgctcctcctctagaactatcccacaggctttctagacttagaatatctgacctgatgcaaatcgctatgtggccagtatgccacagaatgtcctaaacccttgctgcctcttatcaaaaccatgttgcacatctcatcatatagtacagctaacccttgaacagtgggggggttagggacactgacccccgactgctgtgcagtcgaaaatccacataaaacttctgactccttcaaaacttaagcactaatagcctactattcatgggaagccttacccatcacagttgattaacacgttttgtatggtctgtatattatatgctatattcttacaataaacttgagaaaatgttaagaaaataataa

SEQ ID NO: 131085 - DNA, 806 bp, Homo sapiens
  Payload ID: 5597
  Gene Symbol: EIF2AK1
  Gene Name: eukaryotic translation initiation factor 2-alpha kinase 1
  ENST ID: ENST00000431744
  CDS Start-End: 82-327
ggacggcgctagctgcagcatcggagtgtggcagtgctgggctggccggcgggctgggctgcggcccgcgcgcggccggcgatgcaggggggcaactccggggtccgcaagcgcgaagaggagggcgacggggctggggctgtggctgcgccgccggccatcgactttcccgccgagggcccggaccccgaatatgacgagatgtggtcttgctgtgtttcccaggctggtctcgaacgcctggcctcaagcgattctcccgcctcggccttccaaaatgctgggattatagataatctgatgttccagcagaaatccaggtgttaaaagaacccctacaacagccaaccttcccttttgcagttgcaaaccaactcttgctggtttctttgctggagcacttgagccacgtgcatgaaccaaacccacttcgttcaagacaggtgtttaagctactttgccagacgtttatcaaaatggggctgctgtcttctttcacttgtagtgacgagtttagctcattgagactacatcacaacagagctattactcacttaatgaggtctgctaaagagagagttcgtcaggatccttgtgaggatatttctcgtatccagaaaatcagatcaagggaagtagccttggaagcacaaacttcacgttacttaaatgaatttgaagaacttgccatcttaggaaaaggtggatacggaagagtatacaaggtcaggaataaattagatggtcagtattatgcaataaaaaaaatcctgattaagggtgcaactaaaacagtttgcatgaag

SEQ ID NO: 131086 - DNA, 782 bp, Homo sapiens
  Payload ID: 5597
  Gene Symbol: EIF2AK1
  Gene Name: eukaryotic translation initiation factor 2-alpha kinase 1
  ENST ID: ENST00000422786
  CDS Start-End: 1-217
gctggcaggactcactccccttggggtagcagctgtggcctcagcaggcacaggaggtatctgctggtgttcacaaagaggagcggagggctgggggccaaccccacagcgaaggccggttaacctcaccctacagatgaagataatagagcaagaaaaagaaattgcagaactaaagaagcagctaaacctcctttctcaagacaaaggggcatgaaagagcaccattcttaaaatctaaaccctttaaaatcagttacggcaattcacttaaggagcttgagggccgtgttaaaaggagccaggttttcacaagacctcatccacctctgcacattggctggcactgtcacactgcagcctccgatctgctggagtacagaccacagcaccacgtctgctacggtgagttcattcccagcgagccaagggctcttcccaagagcagagttcatggagcggaaaacagcggctttttctttactgcttccctcttttaactgaaaaatcgcaatatctacccagctatctataagggttgcgttgacagcattatgcttctggccaaacagagagaacaagaaacgtgcaatgttcccttcgccttcgatggggcacatcgtctggatgctgaatttcatctgcgtcttcggcactgaaaagaaaaaacacgccaggtagcatcaccagagcagccctgagggaagtactcgcacagtggggaaggggacagtcaccaaacaccacagactgatgacatgggaaagggtgttttcaagaag

SEQ ID NO: 131087 - DNA, 573 bp, Homo sapiens
  Payload ID: 5597
  Gene Symbol: EIF2AK1
  Gene Name: eukaryotic translation initiation factor 2-alpha kinase 1
  ENST ID: ENST00000446699
  CDS Start-End: 82-573
ggacggcgctagctgcagcatcggagtgtggcagtgctgggctggccggcgggctgggctgcggcccgcgcgcggccggcgatgcaggggggcaactccggggtccgcaagcgcgaagaggagggcgacggggctggggctgtggctgcgccgccggccatcgactttcccgccgagggcccggaccccgaatatgacgaatctgatgttccagcagaaatccaggtgttaaaagaacccctacaacagccaaccttcccttttgcagttgcaaaccaactcttgctggtttctttgctggagcacttgagccacgtgcatgaaccaaacccacttcgttcaagacaggtgtttaagctactttgccagacgtttatcaaaatggggctgctgtcttctttcacttgtagtgacgagtttagctcattgagactacatcacaacagagctattactcacttaatgaggtctgctaaagagagagttcgtcaggatccttgtgaggatatttctcgtatccagaaaatcagggatgaaaaatttcattttagcccatcctttccaaatcagcac

SEQ ID NO: 131088 - DNA, 10042 bp, Homo sapiens
  Payload ID: 5598
  Gene Symbol: EIF2AK2
  Gene Name: eukaryotic translation initiation factor 2-alpha kinase 2
  Uniprot ID: P19525
  ENST ID: ENST00000233057
  CDS Start-End: 324-1979
agcagacgagggcttgtgcgagagggggccgggcggctgcagggaaggcggagtccaaggggaaaacgaaactgagaaccagctctcccgaagccgcgggtctccggccggcggcggcggcggcggcggcggcggcgcagtttctggagcaaattcagtttgccttcctggatttgtaaattgtaatgacctcaaaactttagcagttcttccatctgactcaggtttgcttctctggcggtcttcagaatcaacatccacacttccgtgattatctgcgtgcattttggacaaagcttccaaccaggatacgggaagaagaaatggctggtgatctttcagcaggtttcttcatggaggaacttaatacataccgtcagaagcagggagtagtacttaaatatcaagaactgcctaattcaggacctccacatgataggaggtttacatttcaagttataatagatggaagagaatttccagaaggtgaaggtagatcaaagaaggaagcaaaaaatgccgcagccaaattagctgttgagatacttaataaggaaaagaaggcagttagtcctttattattgacaacaacgaattcttcagaaggattatccatggggaattacataggccttatcaatagaattgcccagaagaaaagactaactgtaaattatgaacagtgtgcatcgggggtgcatgggccagaaggatttcattataaatgcaaaatgggacagaaagaatatagtattggtacaggttctactaaacaggaagcaaaacaattggccgctaaacttgcatatcttcagatattatcagaagaaacctcagtgaaatctgactacctgtcctctggttcttttgctactacgtgtgagtcccaaagcaactctttagtgaccagcacactcgcttctgaatcatcatctgaaggtgacttctcagcagatacatcagagataaattctaacagtgacagtttaaacagttcttcgttgcttatgaatggtctcagaaataatcaaaggaaggcaaaaagatctttggcacccagatttgaccttcctgacatgaaagaaacaaagtatactgtggacaagaggtttggcatggattttaaagaaatagaattaattggctcaggtggatttggccaagttttcaaagcaaaacacagaattgacggaaagacttacgttattaaacgtgttaaatataataacgagaaggcggagcgtgaagtaaaagcattggcaaaacttgatcatgtaaatattgttcactacaatggctgttgggatggatttgattatgatcctgagaccagtgatgattctcttgagagcagtgattatgatcctgagaacagcaaaaatagttcaaggtcaaagactaagtgccttttcatccaaatggaattctgtgataaagggaccttggaacaatggattgaaaaaagaagaggcgagaaactagacaaagttttggctttggaactctttgaacaaataacaaaaggggtggattatatacattcaaaaaaattaattcatagagatcttaagccaagtaatatattcttagtagatacaaaacaagtaaagattggagactttggacttgtaacatctctgaaaaatgatggaaagcgaacaaggagtaagggaactttgcgatacatgagcccagaacagatttcttcgcaagactatggaaaggaagtggacctctacgctttggggctaattcttgctgaacttcttcatgtatgtgacactgcttttgaaacatcaaagtttttcacagacctacgggatggcatcatctcagatatatttgataaaaaagaaaaaactcttctacagaaattactctcaaagaaacctgaggatcgacctaacacatctgaaatactaaggaccttgactgtgtggaagaaaagcccagagaaaaatgaacgacacacatgttagagcccttctgaaaaagtatcctgcttctgatatgcagttttccttaaattatctaaaatctgctagggaatatcaatagatatttaccttttattttaatgtttcctttaattttttactatttttactaatctttctgcagaaacagaaaggttttcttctttttgcttcaaaaacattcttacattttactttttcctggctcatctctttattctttttttttttttaaagacagagtctcgctctgttgcccaggctggagtgcaatgacacagtcttggctcactgcaacttctgcctcttgggttcaagtgattctcctgcctcagcctcctgagtagctggattacaggcatgtgccacccacccaactaatttttgtgtttttaataaagacagggtttcaccatgttggccaggctggtctcaaactcctgacctcaagtaatccacctgcctcggcctcccaaagtgctgggattacagggatgagccaccgcgcccagcctcatctctttgttctaaagatggaaaaaccacccccaaattttctttttatactattaatgaatcaatcaattcatatctatttattaaatttctaccgcttttaggccaaaaaaatgtaagatcgttctctgcctcacatagcttacaagccagctggagaaatatggtactcattaaaaaaaaaaaaaaaagtgatgtacaaccacttcggaaaacaatttggcattatctagtaaagttgaatccatgtatacccacatagctatcaattctattcctacatacgtgcttacaagaatgtccataaaaccctgtttataatagccaaaagaacagggaacaaccataatgcacatcaaaagaagaatggattaaaaaaattatattcacacacaggagtactatatagtattgaaaacaattgaagtacagctaaatgtaataacgtaacacaatacaactctcagaaacataatgttaagcgaacaaagcaggttttcagaaaatatatgcagaataattccatttatataaagttccagagcatgcaaaactaaatcattttgtataaaaaacccaacaaatgtgatgagacaataatgggaaggaagggaatgagaaatattaaattctggatggtggttatctttgagggaggggaatgatgtgattggggaaatggactttcaaaggtaatggtaacttccttaagctggatggtaggtccactagtgtttgctgcatagttataccttttatcttaaatacattttgtatctattgtaacaaccactttaaagacaaccgtgctgtaaggcagtagctaaaaacagaaaatagtccatcgggaagggtaagatggctttctgctgagcacagggctagaagtgacagcccagtgggccttccaactatatgccagggtgttagatgagtagagaggagaccacccaggaagtctggacaaggggtctggcatgagctctggagaagatatatttgaggaacatggggtatgctagtttgttgtcctgaattgctgtagagaagataatttaaattgcatcttagaagacgaccctgagggtgaatttcaacttagggcaattgttttagtttgtttcttattggtttaaatggatacttgaagctggataatttataaggaaaagagatttatatgacttacagttctgcaggctgtacaagaaacatggcaccagcatctgcttcttccccggctgcttccactcatggtggaaggtgaaggggagccggatgtgcagagatcatatggcaagagaggaagcaagagagcgagggagaaggtgccaggctctttttaaataaccggctcttgagggaactaatagattgagaactccttgcttctcctccccagcacaccccacccccagggacggcattaatgtattcatgaggggtcttcccccatgacccaaacacctcccatcaggccccacctccaacactgggatcaaatttcaacatgagattttgggggacaaacatgcaaactatagcagcaaccagctaccattctaaaactgccatatgattttaggatttttaaaaagggccaaatttaggttaagcaaaaagtgaaaatacagtaagagaaaatagttttataaaggctttaaaaagtgttcataaagagcagttcatagatttttcacgtaacgttcatcaatagatgctaaaactattggatgaaaagctattgtggaataggatcttctacaaggatttaaatataatcctacagaagaggtatcaattatacaggggaaaatgtacctttacaatggtcaccacaataaccaagtgattcaatttagcatcacccaaggtggaacaccctaacattatgcccctcctgatgtgacttaagaattttacctatttagttttcttgcacaaagtgttaaactggaatttaatcatgaggaaattattagacaaatcctgaatgtagtcattctataagatgattgacttgggcttctcaaaaagtcagtgtcatgaaaaaaaaaaaaaggggagagacttgtaagatacaatgaccaaatgcaatgtttgaatctttattgtattctggatatttaaaaagacaaaagctggacgcagtagctaatgcctgttatcccagcatttttgggaggtcaaaaggggaggatggcttgagcataggattttgagactagcctgggcaacacagtgagttctcatctctacaaaaaatcagaaaattagctgggcatggtagtgtgcatctgtggtcccagctacttgggggggtgaggtgggaggatcacttgagcctaggaggtcaaggccgcagtgagccatgatcatgttactgcattccagcctgggtgacagagtgagatcatatctaaataataataataataaaagaaagcaacaacccagcaaacagctataaagatatcttcgggacaattgagaacatttgaatatagactgcatattagataacaatgccaaataactgttttctcaggtgtgataatagtatatgtagaaaatgtctttttgttttgttttattttgtttttgtttgtttgtttgttttgagacagagtctcactgtgtcgcccaggctggagtgcagtggcacgatctcggctcactgcaacctctgcctcccaggttcaagtgattctcctgcctctgcttcctgagtagctgggattacaggtatctgccaccactccaggttaattttttctatttttagtagagacggaatttcaccatgttgacccagctggttttgaactcctgacctcaggtgattcacttgccttggcctcccaaagtgttgagattacaggcatgagtcactgcacccagccaaaaatgtttttttaggcaatgcatgcacaaacatttagaggccaagtgtgtcatgatgtctgcaactttcaatgttcagcaaaaatcaacatggagagagaaagagggcacacatgtggcaaaatattagccattgtacaattggtaaatctagatgacagtacacaggtgtttgttgtattattctttgaacttttctgtagatttggaaatgttctgcgtagagagaaatctttttttaaaaaaacaatatctggttttgattaatgaggctatattcaaaagaaacactaaatgatgtggccagttagtgagaatgtagccttatctttactgacctcattttaatattcctactctggctgggcatggtggctcacgcctataatcccagcactctgggaggccgagacgggtggatcacctgaggtcaggggttcgagaccagcctggccaacatggtgaaaccccatctctactaaaaatacaaaaattagctgggtgtggtggtaggcgcctgtaatcccagctactcgggagtccgtggcaggagaatcgcttgaacccaggaggtggaggttgcagtgagctgagatcacgccattgcactccagcctgggtgacaagagcaaaactcagtctcaaaaaaaaaaaagaaaaaaaaagatatatatattcctactcttattaaatgaatatagcatttcttagcaacttcttttgatttgtgagtatatattttcttggcctcaaaattaaagtaaaaagtatcctcttactcagaggaggacaggggcaagagcctgggaccttatttgctaattaaaatgcacacacacacacacacacacagaaattttgagagccattttaatataattgcctccctagaaacataccttttagggaatttttatcactaaaccacatgttatttaaatacgtacatgtttaacataaatacatacataaaattcacatgcatacttaacacttatgttaaatatattcaatgtatatacatatgtacacaatatatgcatatatacatgtgggtatgtggtatgtgtgcatgtgtgtgtatggccagctacataatttgtgggactaagggcaaaatgaaactgtacggccctcgttcaaaaattaggtgtggggtgcttctaagcacagtcttgtgcaactgcacaggttgcatgtccatgaagccatcctgtgtgtgtgcacatatgtgtatgaatatgtattttatataatacatatatatgcatgtatgtatctgagaagaaatgtttaaaaggctacatacaagcttttccaggtctctactatctgttaactaactagagacataactcacaatatgcagtccccactgagtgttcaccataatttgagattcttggcatgttaacttttcattatggaatattgaataatttcaatattattcatacatttctttatgttcaaacatacacaaaaatagaataatgaaactctacccatcacccagctgcaacaaatatcaatactttaccgttcttaatacatctaaccccttactttttgtttgtttcttttggtgaagtatttaattgtaattttttttttaagagacaggatctcactctgtcacccaggccagagtacagtggtacgatcacagctccttgtaacctcgaactcctaggctcaagtgatcctcctgcctcagccgcttgaatagctgggactacatgcatacaccaacacacccaactaatttttaaattttttgtagaaatatggtcttgctgtgtttcccaggctggtctcaaactcctggccttgagagattctcctgccttggtcttccaaactgctgggattacaatatccggccctactggaatattttaaagtaaatctcaggtgttacatcattgcacttgtaagtactttaaaatgtatctctagcagataaatctttttaacaaaaccacagcatcattgtcacactcaaaaaattgacaagatttccttaattatcatataatagtctgtattgtttctatctcaaaaatacagttttcttggttgttgaaatctagatccaacattgcatttggttgatgtgtctcctttactctgtaaaatttacccctgcgttttagttcttttcggcttttatttgtcctgtggaatttcctccactcaggatttgactgagagtatccccagagtgtccagttagacctagaagctggatttgatcctggttcatttattttcccccaagaatactccataggtgatgctatacactttctcttacatcatttcaggaggaacatgatgtctgattgttccactttcagtgattttaatattgatcaatgagttctggtggtaccaactactacaaagtttctcatcaatctttcacctgatggttttagcagctattgataattgttgcctggatccattatttcatttcaggggttgtaaaatagtgattttctggttctatcaaacctcttgcatttatcatctatgattcttctttaaggaactttctctaaatctgaatgggaaagatgcgataaatatttatcaaattttagagtgagttagtgccctagcaacctccacagttgacaaatgagtatttctttaaagcaaggtatggcccaaccaatactttgaaactagcatgtttagaatagagcaggaggaaactatatttgaaaggtcagaagtggaaagactaagagggcctgaacaataagaggacagaaccaagaggagttggcaactaattggatgtggggattaaggaaaggtaagcatcaaagattacctccaagtttgttagaaggttagtagcaggattctgatgccattcaagtaaatacaagtctcagtcagatgaaccccaagagccacatgtatttgaggggtactttgtctcacacttttacctgttacatggttttcagtaatttagaatttaagccagtagtggggcgactgtacatctatcgacatggtgaggtagagcatgtttgggaggaaagacgttgaatcccatttggtgacagtgagcttgaggtgctgccagaacactgcactgaagataggaggagactgtaggaaatacaagataggaaaggtctccactgaaatgttaactctttctctctaaacggccatccaggcctcaatgtctgcagtttctgatctgtgattatgacttatccaaatcttacatttcttaaaaatagtcatagatgaagggaatcacagttgatagttatatggtgacattattggcttaaattctaaataactagaaactgtataataggcaaaactgtgaggcaaataaaatgcttctcaaatctgtgtggctcttatggggttaatttgatttggacctgtattaatttcttatggctgctataactaacaaattaccacaaacttggtggtttaaaacaacacacatttattctctttctgttctggaggccagaagtctaaaatgagattcactgggctgcagttcactgggcaaggccatgctcctctggaggcttccatgatgcatcccatattcagtgtttcccgagtaagccccacccatgcaggtctgcagttttacctcaacaggcttttgcactcagtggctctctcctgtggtttctatctgaaattctcttcattttttttttaataactgctttattgagatataattcacatgccatacaattcacctatacagtatacaattcagtagtgtttactatattcagagttgtgcaactatcatttttctcacccccaaaagaaaccctatgcccgttagtattcactctgttttctcacaactctaggtaaccactaatctactctccatctctatagatttgcccatgctagacatttcatataaatggaatcatacatgtggtctttttcactgagtatattttcaaggtgcatcccagctgtggcatgaatcagcatctcattcctttttattgccaaataatattctatcatatggatatgtcgcattttatgtatccattcatcagctgatggacatttgggttgtttgtactttttggctaccatgaataatgctactatgaacttttgtgtacaaatcttatgtggacttgttttcatttctcttggatgtatattcctaggagaatggctggattatacagtaactctttcctcataactttgcatatcaaaattatatccatctttcagaacccaaattcagtgttatttccaaagtgttccaacatctcccactcaaaatgaatcttctccctagtactcccattgtttagtacctaattgttcttaccagtttgtcttagagctcagtcattcctacacagcacttttcttcattatactgctaatttcattacactgtaagagtggggacaagctgttcttcttgtataccagaaagtagtgagtgcactgctgtgaagaaagcaggaactcaaaagttaagaattttgaatgagcctataaaatgtgtctaataaataataatgttcattttcaaatctcaacaattaaatgtttaacaaataacacttgaaataaatgtttattagaaaaaccaa

SEQ ID NO: 131089 - DNA, 564 bp, Homo sapiens
  Payload ID: 5598
  Gene Symbol: EIF2AK2
  Gene Name: eukaryotic translation initiation factor 2-alpha kinase 2
  ENST ID: ENST00000390013
  CDS Start-End: 258-564
aatttaccccaatcccgtagcagacgagggcttgtgcgagagggggccgggcggctgcagggaaggcggagtccaaggggaaaacgaaactgagaaccagctctcccgaagccgcgggtctccggccggcggcggcggcggcggcggcggcggcgcaggtttgcttctctggcggtcttcagaatcaacatccacacttccgtgattatctgcgtgcattttggacaaagcttccaaccaggatacgggaagaagaaatggctggtgatctttcagcaggtttcttcatggaggaacttaatacataccgtcagaagcagggagtagtacttaaatatcaagaactgcctaattcaggacctccacatgataggaggtttacatttcaagttataatagatggaagagaatttccagaaggtgaaggtagatcaaagaaggaagcaaaaaatgccgcagccaaattagctgttgagatacttaataaggaaaagaaggcagttagtcctttattattgacaacaacgaattcttcagaaggattatccatggggaattacatag

SEQ ID NO: 131090 - DNA, 4343 bp, Homo sapiens
  Payload ID: 5598
  Gene Symbol: EIF2AK2
  Gene Name: eukaryotic translation initiation factor 2-alpha kinase 2
  Uniprot ID: P19525
  ENST ID: ENST00000395127
  CDS Start-End: 558-2213
agcagacgagggcttgtgcgagagggggccgggcggctgcagggaaggcggagtccaaggggaaaacgaaactgagaaccagctctcccgaagccgcgggtctccggccggcggcggcggcggcggcggcggcggcgcagtttgctcatactttgtgacttgcggtcacagtggcattcagctccacacttggtagaaccacaggcacgacaagcatagaaacatcctaaacaatcttcatcgaggcatcgaggtccatcccaataaaaatcaggagaccctggctatcatagaccttagtcttcgctggtatcactcgtctgtctgaaccagcggttgcatttttttaagccttcttttttctcttttaccagtttctggagcaaattcagtttgccttcctggatttgtaaattgtaatgacctcaaaactttagcagttcttccatctgactcaggtttgcttctctggcggtcttcagaatcaacatccacacttccgtgattatctgcgtgcattttggacaaagcttccaaccaggatacgggaagaagaaatggctggtgatctttcagcaggtttcttcatggaggaacttaatacataccgtcagaagcagggagtagtacttaaatatcaagaactgcctaattcaggacctccacatgataggaggtttacatttcaagttataatagatggaagagaatttccagaaggtgaaggtagatcaaagaaggaagcaaaaaatgccgcagccaaattagctgttgagatacttaataaggaaaagaaggcagttagtcctttattattgacaacaacgaattcttcagaaggattatccatggggaattacataggccttatcaatagaattgcccagaagaaaagactaactgtaaattatgaacagtgtgcatcgggggtgcatgggccagaaggatttcattataaatgcaaaatgggacagaaagaatatagtattggtacaggttctactaaacaggaagcaaaacaattggccgctaaacttgcatatcttcagatattatcagaagaaacctcagtgaaatctgactacctgtcctctggttcttttgctactacgtgtgagtcccaaagcaactctttagtgaccagcacactcgcttctgaatcatcatctgaaggtgacttctcagcagatacatcagagataaattctaacagtgacagtttaaacagttcttcgttgcttatgaatggtctcagaaataatcaaaggaaggcaaaaagatctttggcacccagatttgaccttcctgacatgaaagaaacaaagtatactgtggacaagaggtttggcatggattttaaagaaatagaattaattggctcaggtggatttggccaagttttcaaagcaaaacacagaattgacggaaagacttacgttattaaacgtgttaaatataataacgagaaggcggagcgtgaagtaaaagcattggcaaaacttgatcatgtaaatattgttcactacaatggctgttgggatggatttgattatgatcctgagaccagtgatgattctcttgagagcagtgattatgatcctgagaacagcaaaaatagttcaaggtcaaagactaagtgccttttcatccaaatggaattctgtgataaagggaccttggaacaatggattgaaaaaagaagaggcgagaaactagacaaagttttggctttggaactctttgaacaaataacaaaaggggtggattatatacattcaaaaaaattaattcatagagatcttaagccaagtaatatattcttagtagatacaaaacaagtaaagattggagactttggacttgtaacatctctgaaaaatgatggaaagcgaacaaggagtaagggaactttgcgatacatgagcccagaacagatttcttcgcaagactatggaaaggaagtggacctctacgctttggggctaattcttgctgaacttcttcatgtatgtgacactgcttttgaaacatcaaagtttttcacagacctacgggatggcatcatctcagatatatttgataaaaaagaaaaaactcttctacagaaattactctcaaagaaacctgaggatcgacctaacacatctgaaatactaaggaccttgactgtgtggaagaaaagcccagagaaaaatgaacgacacacatgttagagcccttctgaaaaagtatcctgcttctgatatgcagttttccttaaattatctaaaatctgctagggaatatcaatagatatttaccttttattttaatgtttcctttaattttttactatttttactaatctttctgcagaaacagaaaggttttcttctttttgcttcaaaaacattcttacattttactttttcctggctcatctctttattctttttttttttttaaagacagagtctcgctctgttgcccaggctggagtgcaatgacacagtcttggctcactgcaacttctgcctcttgggttcaagtgattctcctgcctcagcctcctgagtagctggattacaggcatgtgccacccacccaactaatttttgtgtttttaataaagacagggtttcaccatgttggccaggctggtctcaaactcctgacctcaagtaatccacctgcctcggcctcccaaagtgctgggattacagggatgagccaccgcgcccagcctcatctctttgttctaaagatggaaaaaccacccccaaattttctttttatactattaatgaatcaatcaattcatatctatttattaaatttctaccgcttttaggccaaaaaaatgtaagatcgttctctgcctcacatagcttacaagccagctggagaaatatggtactcattaaaaaaaaaaaaaaaagtgatgtacaaccacttcggaaaacaatttggcattatctagtaaagttgaatccatgtatacccacatagctatcaattctattcctacatacgtgcttacaagaatgtccataaaaccctgtttataatagccaaaagaacagggaacaaccataatgcacatcaaaagaagaatggattaaaaaaattatattcacacacaggagtactatatagtattgaaaacaattgaagtacagctaaatgtaataacgtaacacaatacaactctcagaaacataatgttaagcgaacaaagcaggttttcagaaaatatatgcagaataattccatttatataaagttccagagcatgcaaaactaaatcattttgtataaaaaacccaacaaatgtgatgagacaataatgggaaggaagggaatgagaaatattaaattctggatggtggttatctttgagggaggggaatgatgtgattggggaaatggactttcaaaggtaatggtaacttccttaagctggatggtaggtccactagtgtttgctgcatagttataccttttatcttaaatacattttgtatctattgtaacaaccactttaaagacaaccgtgctgtaaggcagtagctaaaaacagaaaatagtccatcgggaagggtaagatggctttctgctgagcacagggctagaagtgacagcccagtgggccttccaactatatgccagggtgttagatgagtagagaggagaccacccaggaagtctggacaaggggtctggcatgagctctggagaagatatatttgaggaacatggggtatgctagtttgttgtcctgaattgctgtagagaagataatttaaattgcatcttagaagacgaccctgagggtgaatttcaacttagggcaattgttttagtttgtttcttattggtttaaatggatacttgaagctggataatttataaggaaaagagatttatatgacttacagttctgcaggctgtacaagaaacatggcaccagcatctgcttcttccccggctgcttccactcatggtggaaggtgaaggggagccggatgtgcagagatcatatggcaagagaggaagcaagagagcgagggagaaggtgccaggctctttttaaataaccggctcttgagggaactaatagattgagaactccttgcttctcctccccagcacaccccacccccagggacggcattaatgtattcatgaggggtcttcccccatgacccaaacacctcccatcaggccccacctccaacactgggatcaaatttcaacatgagattttgggggacaaacatgcaaactatagcagcaaccagctaccattctaaaactgccatatgattttaggatttttaaaaagggccaaatttaggttaagc

SEQ ID NO: 131091 - DNA, 1533 bp, Homo sapiens
  Payload ID: 5598
  Gene Symbol: EIF2AK2
  Gene Name: eukaryotic translation initiation factor 2-alpha kinase 2
  Uniprot ID: P19525
  ENST ID: ENST00000405334
  CDS Start-End: 1-1533
atggctggtgatctttcagcaggtttcttcatggaggaacttaatacataccgtcagaagcagggagtagtacttaaatatcaagaactgcctaattcaggacctccacatgataggaggtttacatttcaagttataatagatggaagagaatttccagaaggtgaaggtagatcaaagaaggaagcaaaaaatgccgcagccaaattagctgttgagatacttaataaggaaaagaaggcagttagtcctttattattgacaacaacgaattcttcagaaggattatccatggggaattacataggccttatcaatagaattgcccagaagaaaagactaactgtaaattatgaacagtgtgcatcgggggtgcatgggccagaaggatttcattataaatgcaaaatgggacagaaagaatatagtattggtacaggttctactaaacaggaagcaaaacaattggccgctaaacttgcatatcttcagatattatcagaagaaacctcagtgaaatctgactacctgtcctctggttcttttgctactacgtgtgagtcccaaagcaactctttagtgaccagcacactcgcttctgaatcatcatctgaaggtgacttctcagcagatacatcagagataaattctaacagtgacagtttaaacagttcttcgttgcttatgaatggtctcagaaataatcaaaggaaggcaaaaagatctttggcacccagatttgaccttcctgacatgaaagaaacaaagtatactgtggacaagaggaaggcggagcgtgaagtaaaagcattggcaaaacttgatcatgtaaatattgttcactacaatggctgttgggatggatttgattatgatcctgagaccagtgatgattctcttgagagcagtgattatgatcctgagaacagcaaaaatagttcaaggtcaaagactaagtgccttttcatccaaatggaattctgtgataaagggaccttggaacaatggattgaaaaaagaagaggcgagaaactagacaaagttttggctttggaactctttgaacaaataacaaaaggggtggattatatacattcaaaaaaattaattcatagagatcttaagccaagtaatatattcttagtagatacaaaacaagtaaagattggagactttggacttgtaacatctctgaaaaatgatggaaagcgaacaaggagtaagggaactttgcgatacatgagcccagaacagatttcttcgcaagactatggaaaggaagtggacctctacgctttggggctaattcttgctgaacttcttcatgtatgtgacactgcttttgaaacatcaaagtttttcacagacctacgggatggcatcatctcagatatatttgataaaaaagaaaaaactcttctacagaaattactctcaaagaaacctgaggatcgacctaacacatctgaaatactaaggaccttgactgtgtggaagaaaagcccagagaaaaatgaacgacacacatgttag

SEQ ID NO: 131092 - DNA, 623 bp, Homo sapiens
  Payload ID: 5598
  Gene Symbol: EIF2AK2
  Gene Name: eukaryotic translation initiation factor 2-alpha kinase 2
  ENST ID: ENST00000411537
  CDS Start-End: 201-623
gtgcgagagggggccgggcggctgcagggaaggcggagtccaaggggaaaacgaaactgagaaccagctctcccgaagccgcgggtctccggccggcggcggcggcggcggcggcggcggcgcagaatcaacatccacacttccgtgattatctgcgtgcattttggacaaagcttccaaccaggatacgggaagaagaaatggctggtgatctttcagcaggtttcttcatggaggaacttaatacataccgtcagaagcagggagtagtacttaaatatcaagaactgcctaattcaggacctccacatgataggaggtttacatttcaagttataatagatggaagagaatttccagaaggtgaaggtagatcaaagaaggaagcaaaaaatgccgcagccaaattagctgttgagatacttaataaggaaaagaaggcagttagtcctttattattgacaacaacgaattcttcagaaggattatccatggggaattacataggccttatcaatagaattgcccagaagaaaagactaactgtaaattatgaacagtgtgcatcgggggtgcatgggccagaaggatttcattataaatgcaaaatgggacagaaagaa

SEQ ID NO: 131093 - DNA, 4646 bp, Homo sapiens
  Payload ID: 5599
  Gene Symbol: EIF2AK3
  Gene Name: eukaryotic translation initiation factor 2-alpha kinase 3
  Uniprot ID: Q9NZJ5
  ENST ID: ENST00000303236
  CDS Start-End: 303-3653
ggaaagtccaccttccccaacaaggccagcctgggaacatggagtggcagcggccgcagccaatgagagagcaaacgcgcggaaagtttgctcaatgggcgatgtccgagataggctgtcactcaggtggcagcggcagaggccgggctgagacgtggccaggggaacacggctggctgtccaggccgtcggggcggcagtagggtccctagcacgtccttgccttcttgggagctccaagcggcgggagaggcaggcgtcagtggctgcgcctccatgcctgcgcgcggggcgggacgctgatggagcgcgccatcagcccggggctgctggtacgggcgctgctgctgctgctgctgctgctggggctcgcggcaaggacggtggccgcggggcgcgcccgtggcctcccagcgccgacggcggaggcggcgttcggcctcggggcggccgctgctcccacctcagcgacgcgagtaccggcggcgggcgccgtggctgcggccgaggtgactgtggaggacgctgaggcgctgccggcagccgcgggagagcaggagcctcggggtccggaaccagacgatgagacagagttgcgaccgcgcggcaggtcattagtaattatcagcactttagatgggagaattgctgccttggatcctgaaaatcatggtaaaaagcagtgggatttggatgtgggatccggttccttggtgtcatccagccttagcaaaccagaggtatttgggaataagatgatcattccttccctggatggagccctcttccagtgggaccaagaccgtgaaagcatggaaacagttcctttcacagttgaatcacttcttgaatcttcttataaatttggagatgatgttgttttggttggaggaaaatctctgactacatatggactcagtgcatatagtggaaaggtgaggtatatctgttcagctctgggttgtcgccaatgggatagtgacgaaatggaacaagaggaagacatcctgcttctacagcgtacccaaaaaactgttagagctgtcggacctcgcagtggcaatgagaagtggaatttcagtgttggccactttgaacttcggtatattccagacatggaaacgagagccggatttattgaaagcacctttaagcccaatgagaacacagaagagtctaaaattatttcagatgtggaagaacaggaagctgccataatggacatagtgataaaggtttcggttgctgactggaaagttatggcattcagtaagaagggaggacatctggaatgggagtaccagttttgtactccaattgcatctgcctggttacttaaggatgggaaagtcattcccatcagtctttttgatgatacaagttatacatctaatgatgatgttttagaagatgaagaagacattgtagaagctgccagaggagccacagaaaacagtgtttacttgggaatgtatagaggccagctgtatctgcagtcatcagtcagaatttcagaaaagtttccttcaagtcccaaggctttggaatctgtcactaatgaaaacgcaattattcctttaccaacaatcaaatggaaacccttaattcattctccttccagaactcctgtcttggtaggatctgatgaatttgacaaatgtctcagtaatgataagttttctcatgaagaatatagtaatggtgcactttcaatcttgcagtatccatatgataatggttattatctaccatactacaagagggagaggaacaaacgaagcacacagattacagtcagattcctcgacaacccacattacaacaagaatatccgcaaaaaggatcctgttcttcttttacactggtggaaagaaatagttgcaacgattttgttttgtatcatagcaacaacgtttattgtgcgcaggcttttccatcctcatcctcacaggcaaaggaaggagtctgaaactcagtgtcaaactgaaaataaatatgattctgtaagtggtgaagccaatgacagtagctggaatgacataaaaaactctggatatatatcacgatatctaactgattttgagccaattcaatgcctgggacgtggtggctttggagttgtttttgaagctaaaaacaaagtagatgactgcaattatgctatcaagaggatccgtctccccaatagggaattggctcgggaaaaggtaatgcgagaagttaaagccttagccaagcttgaacacccgggcattgttagatatttcaatgcctggctcgaagcaccaccagagaagtggcaagaaaagatggatgaaatttggctgaaagatgaaagcacagactggccactcagctctcctagcccaatggatgcaccatcagttaaaatacgcagaatggatcctttcgctacaaaagaacatattgaaatcatagctccttcaccacaaagaagcaggtctttttcagtagggatttcctgtgaccagacaagttcatctgagagccagttctcaccactggaattctcaggaatggaccatgaggacatcagtgagtcagtggatgcagcatacaacctccaggacagttgccttacagactgtgatgtggaagatgggactatggatggcaatgatgaggggcactcctttgaactttgtccttctgaagcttctccttatgtaaggtcaagggagagaacctcctcttcaatagtatttgaagattctggctgtgataatgcttccagtaaagaagagccgaaaactaatcgattgcatattggcaaccattgtgctaataaactaactgctttcaagcccaccagtagcaaatcttcttctgaagctacattgtctatttctcctccaagaccaaccactttaagtttagatctcactaaaaacaccacagaaaaactccagcccagttcaccaaaggtgtatctttacattcaaatgcagctgtgcagaaaagaaaacctcaaagactggatgaatggacgatgtaccatagaggagagagagaggagcgtgtgtctgcacatcttcctgcagatcgcagaggcagtggagtttcttcacagtaaaggactgatgcacagggacctcaagccatccaacatattctttacaatggatgatgtggtcaaggttggagactttgggttagtgactgcaatggaccaggatgaggaagagcagacggttctgaccccaatgccagcttatgccagacacacaggacaagtagggaccaaactgtatatgagcccagagcagattcatggaaacagctattctcataaagtggacatcttttctttaggcctgattctatttgaattgctgtatccattcagcactcagatggagagagtcaggaccttaactgatgtaagaaatctcaaatttccaccattatttactcagaaatatccttgtgagtacgtgatggttcaagacatgctctctccatcccccatggaacgacctgaagctataaacatcattgaaaatgctgtatttgaggacttggactttccaggaaaaacagtgctcagacagaggtctcgctccttgagttcatcgggaacaaaacattcaagacagtccaacaactcccatagccctttgccaagcaattagccttaagttgtgctagcaaccctaataggtgatgcagataatagcctacttcttagaatatgcctgtccaaaattgcagacttgaaaagtttgttcttcgctcaatttttttgtggactactttttttatatcaaatttaagctggatttgggggcataacctaatttgagccaactcctgagttttgctatacttaaggaaagggctatctttgttctttgttagtctcttgaaactggctgctggccaagctttatagccctcaccatttgcctaaggaggtagcagcaatccctaatatatatatatagtgagaactaaaatggatatatttttataatgcagaagaaggaaagtccccctgtgtggtaactgtattgttctagaaatatgctttctagagatatgatgattttgaaactgatttctagaaaaagctgactccatttttgtccctggcgggtaaattaggaatctgcactattttggaggacaagtagcacaaactgtataacggtttatgtccgtagttttatagtcctatttgtagcattcaatagctttattccttagatggttctagggtgggtttacagctttttgtacttttacctccaataaagggaaaatgaagctttttatgtaaattggttgaaaggtctagttttgggaggaaaaaagccgtagtaagaaatggatcatatatattacaactaacttcttcaactatggactttttaagcctaatgaaatcttaagtgtcttatatgtaatcctgtaggttggtacttcccccaaactgattataggtaacagtttaatcatctcacttgctaacatgtttttatttttcactgtaaatatgtttatgttttatttataaaaattctgaaatcaatccatttgggttggtggtgtacagaacacacttaagtgtgttaacttgtgacttctttcaagtctaaatgatttaataaaactttttttaaatt

SEQ ID NO: 131094 - DNA, 4222 bp, Homo sapiens
  Payload ID: 5599
  Gene Symbol: EIF2AK3
  Gene Name: eukaryotic translation initiation factor 2-alpha kinase 3
  ENST ID: ENST00000419748
  CDS Start-End: 330-3227
agttcagatgagaggtttagtgtaaagtggtataggacagaggggacagagttgagatatttgatgcaaaatctaggttcctggcaagtgaatgcattcttcctttcttggtacccttgtccagagattgagactgcgtggccagaagttgacaaaagaggtttaagggagcagggaagaaaaggtcattagtaattatcagcactttagatgggagaattgctgccttggatcctgaaaatcatggtaaaaagcagtgggatttggatgtgggatccggttccttggtgtcatccagccttagcaaaccagaggtatttgggaataagatgatcattccttccctggatggagccctcttccagtgggaccaagaccgtgaaagcatggaaacagttcctttcacagttgaatcacttcttgaatcttcttataaatttggagatgatgttgttttggttggaggaaaatctctgactacatatggactcagtgcatatagtggaaaggtgaggtatatctgttcagctctgggttgtcgccaatgggatagtgacgaaatggaacaagaggaagacatcctgcttctacagcgtacccaaaaaactgttagagctgtcggacctcgcagtggcaatgagaagtggaatttcagtgttggccactttgaacttcggtatattccagacatggaaacgagagccggatttattgaaagcacctttaagcccaatgagaacacagaagagtctaaaattatttcagatgtggaagaacaggaagctgccataatggacatagtgataaaggtttcggttgctgactggaaagttatggcattcagtaagaagggaggacatctggaatgggagtaccagttttgtactccaattgcatctgcctggttacttaaggatgggaaagtcattcccatcagtctttttgatgatacaagttatacatctaatgatgatgttttagaagatgaagaagacattgtagaagctgccagaggagccacagaaaacagtgtttacttgggaatgtatagaggccagctgtatctgcagtcatcagtcagaatttcagaaaagtttccttcaagtcccaaggctttggaatctgtcactaatgaaaacgcaattattcctttaccaacaatcaaatggaaacccttaattcattctccttccagaactcctgtcttggtaggatctgatgaatttgacaaatgtctcagtaatgataagttttctcatgaagaatatagtaatggtgcactttcaatcttgcagtatccatatgataatggttattatctaccatactacaagagggagaggaacaaacgaagcacacagattacagtcagattcctcgacaacccacattacaacaagaatatccgcaaaaaggatcctgttcttcttttacactggtggaaagaaatagttgcaacgattttgttttgtatcatagcaacaacgtttattgtgcgcaggcttttccatcctcatcctcacaggcaaaggaaggagtctgaaactcagtgtcaaactgaaaataaatatgattctgtaagtggtgaagccaatgacagtagctggaatgacataaaaaactctggatatatatcacgatatctaactgattttgagccaattcaatgcctgggacgtggtggctttggagttgtttttgaagctaaaaacaaagtagatgactgcaattatgctatcaagaggatccgtctccccaatagggaattggctcgggaaaaggtaatgcgagaagttaaagccttagccaagcttgaacacccgggcattgttagatatttcaatgcctggctcgaagcaccaccagagaagtggcaagaaaagatggatgaaatttggctgaaagatgaaagcacagactggccactcagctctcctagcccaatggatgcaccatcagttaaaatacgcagaatggatcctttcgctacaaaagaacatattgaaatcatagctccttcaccacaaagaagcaggtctttttcagtagggatttcctgtgaccagacaagttcatctgagagccagttctcaccactggaattctcaggaatggaccatgaggacatcagtgagtcagtggatgcagcatacaacctccaggacagttgccttacagactgtgatgtggaagatgggactatggatggcaatgatgaggggcactcctttgaactttgtccttctgaagcttctccttatgtaaggtcaagggagagaacctcctcttcaatagtatttgaagattctggctgtgataatgcttccagtaaagaagagccgaaaactaatcgattgcatattggcaaccattgtgctaataaactaactgctttcaagcccaccagtagcaaatcttcttctgaagctacattgtctatttctcctccaagaccaaccactttaagtttagatctcactaaaaacaccacagaaaaactccagcccagttcaccaaaggtgtatctttacattcaaatgcagctgtgcagaaaagaaaacctcaaagactggatgaatggacgatgtaccatagaggagagagagaggagcgtgtgtctgcacatcttcctgcagatcgcagaggcagtggagtttcttcacagtaaaggactgatgcacagggacctcaagccatccaacatattctttacaatggatgatgtggtcaaggttggagactttgggttagtgactgcaatggaccaggatgaggaagagcagacggttctgaccccaatgccagcttatgccagacacacaggacaagtagggaccaaactgtatatgagcccagagcagattcatggaaacagctattctcataaagtggacatcttttctttaggcctgattctatttgaattgctgtatccattcagcactcagatggagagagtcaggaccttaactgatgtaagaaatctcaaatttccaccattatttactcagaaatatccttgtgagtacgtgatggttcaagacatgctctctccatcccccatggaacgacctgaagctataaacatcattgaaaatgctgtatttgaggacttggactttccaggaaaaacagtgctcagacagaggtctcgctccttgagttcatcgggaacaaaacattcaagacagtccaacaactcccatagccctttgccaagcaattagccttaagttgtgctagcaaccctaataggtgatgcagataatagcctacttcttagaatatgcctgtccaaaattgcagacttgaaaagtttgttcttcgctcaatttttttgtggactactttttttatatcaaatttaagctggatttgggggcataacctaatttgagccaactcctgagttttgctatacttaaggaaagggctatctttgttctttgttagtctcttgaaactggctgctggccaagctttatagccctcaccatttgcctaaggaggtagcagcaatccctaatatatatatatagtgagaactaaaatggatatatttttataatgcagaagaaggaaagtccccctgtgtggtaactgtattgttctagaaatatgctttctagagatatgatgattttgaaactgatttctagaaaaagctgactccatttttgtccctggcgggtaaattaggaatctgcactattttggaggacaagtagcacaaactgtataacggtttatgtccgtagttttatagtcctatttgtagcattcaatagctttattccttagatggttctagggtgggtttacagctttttgtacttttacctccaataaagggaaaatgaagctttttatgtaaattggttgaaaggtctagttttgggaggaaaaaagccgtagtaagaaatggatcatatatattacaactaacttcttcaactatggactttttaagcctaatgaaatcttaagtgtcttatatgtaatcctgtaggttggtacttcccccaaactgattataggtaacagtttaatcatctcacttgctaacatgtttttatttttcactgtaaatatgtttatgttttatttataaaaattctgaaatcaatccatttgggttggtggtgtacagaacacacttaagtgtgttaacttgtgacttctttcaagtctaaatgatttaataaaactttttttaaattaa

SEQ ID NO: 131095 - DNA, 2902 bp, Homo sapiens
  Payload ID: 5599
  Gene Symbol: EIF2AK3
  Gene Name: eukaryotic translation initiation factor 2-alpha kinase 3
  ENST ID: ENST00000415570
  CDS Start-End: 33-2902
aattacttttggttgatggactgcactgcttcatgtgctactcagaaggaggctggagtacatcaggatcaagactccagctcttaattactattattcttttaaaggtatttgggaataagatgatcattccttccctggatggagccctcttccagtgggaccaagaccgtgaaagcatggaaacagttcctttcacagttgaatcacttcttgaatcttcttataaatttggagatgatgttgttttggttggaggaaaatctctgactacatatggactcagtgcatatagtggaaaggtgaggtatatctgttcagctctgggttgtcgccaatgggatagtgacgaaatggaacaagaggaagacatcctgcttctacagcgtacccaaaaaactgttagagctgtcggacctcgcagtggcaatgagaagtggaatttcagtgttggccactttgaacttcggtatattccagacatggaaacgagagccggatttattgaaagcacctttaagcccaatgagaacacagaagagtctaaaattatttcagatgtggaagaacaggaagctgccataatggacatagtgataaaggtttcggttgctgactggaaagttatggcattcagtaagaagggaggacatctggaatgggagtaccagttttgtactccaattgcatctgcctggttacttaaggatgggaaagtcattcccatcagtctttttgatgatacaagttatacatctaatgatgatgttttagaagatgaagaagacattgtagaagctgccagaggagccacagaaaacagtgtttacttgggaatgtatagaggccagctgtatctgcagtcatcagtcagaatttcagaaaagtttccttcaagtcccaaggctttggaatctgtcactaatgaaaacgcaattattcctttaccaacaatcaaatggaaacccttaattcattctccttccagaactcctgtcttggtaggatctgatgaatttgacaaatgtctcagtaatgataagttttctcatgaagaatatagtaatggtgcactttcaatcttgcagtatccatatgataatggttattatctaccatactacaagagggagaggaacaaacgaagcacacagattacagtcagattcctcgacaacccacattacaacaagaatatccgcaaaaaggatcctgttcttcttttacactggtggaaagaaatagttgcaacgattttgttttgtatcatagcaacaacgtttattgtgcgcaggcttttccatcctcatcctcacaggcaaaggaaggagtctgaaactcagtgtcaaactgaaaataaatatgattctgtaagtggtgaagccaatgacagtagctggaatgacataaaaaactctggatatatatcacgatatctaactgattttgagccaattcaatgcctgggacgtggtggctttggagttgtttttgaagctaaaaacaaagtagatgactgcaattatgctatcaagaggatccgtctccccaatagggaattggctcgggaaaaggtaatgcgagaagttaaagccttagccaagcttgaacacccgggcattgttagatatttcaatgcctggctcgaagcaccaccagagaagtggcaagaaaagatggatgaaatttggctgaaagatgaaagcacagactggccactcagctctcctagcccaatggatgcaccatcagttaaaatacgcagaatggatcctttcgctacaaaagaacatattgaaatcatagctccttcaccacaaagaagcaggtctttttcagtagggatttcctgtgaccagacaagttcatctgagagccagttctcaccactggaattctcaggaatggaccatgaggacatcagtgagtcagtggatgcagcatacaacctccaggacagttgccttacagactgtgatgtggaagatgggactatggatggcaatgatgaggggcactcctttgaactttgtccttctgaagcttctccttatgtaaggtcaagggagagaacctcctcttcaatagtatttgaagattctggctgtgataatgcttccagtaaagaagagccgaaaactaatcgattgcatattggcaaccattgtgctaataaactaactgctttcaagcccaccagtagcaaatcttcttctgaagctacattgtctatttctcctccaagaccaaccactttaagtttagatctcactaaaaacaccacagaaaaactccagcccagttcaccaaaggtgtatctttacattcaaatgcagctgtgcagaaaagaaaacctcaaagactggatgaatggacgatgtaccatagaggagagagagaggagcgtgtgtctgcacatcttcctgcagatcgcagaggcagtggagtttcttcacagtaaaggactgatgcacagggacctcaagccatccaacatattctttacaatggatgatgtggtcaaggttggagactttgggttagtgactgcaatggaccaggatgaggaagagcagacggttctgaccccaatgccagcttatgccagacacacaggacaagtagggaccaaactgtatatgagcccagagcagattcatggaaacagctattctcataaagtggacatcttttctttaggcctgattctatttgaattgctgtatccattcagcactcagatggagagagtcaggaccttaactgatgtaagaaatctcaaatttccaccattatttactcagaaatatccttgtgagtacgtgatggttcaagacatgctctctccatcccccatggaacgacctgaagctataaacatcattgaaaatgctgtatttga

SEQ ID NO: 131096 - DNA, 2477 bp, Homo sapiens
  Payload ID: 5600
  Gene Symbol: EIF2B1
  Gene Name: eukaryotic translation initiation factor 2B, subunit 1 alpha, 26kDa
  Uniprot ID: Q14232
  ENST ID: ENST00000424014
  CDS Start-End: 210-1127
cgaggtgctgtgactcgtgccagccccctaatctgcggaagtggagtgcggggagtgcgccggaagaggggtacggaagtgcgccggaagtggggtgcggaggtgtgcagcgcgctgtcagactggctcgcaggcggcgcggccggcggacccgttcgagacagcgcgggcggctcgggtcccctggggctccgcagcaggaggacgccatggacgacaaggagttaattgaatactttaagtctcagatgaaagaagatcctgacatggcctcagcagtggctgccatccggacgttgctggagttcttgaagagagataaaggggagacaatccagggtctgagggcgaatctcaccagtgccatagaaaccctgtgtggtgtggactcctctgtggcagtgtcctctggcggggagctcttcctccgcttcatcagtcttgcctccctggaatactccgattactccaaatgtaaaaagatcatgattgagcggggagaactttttctcaggagaatatcactgtcaagaaacaaaattgcagatctgtgccatactttcatcaaagatggagcgacaatattgactcacgcctactccagagtggtcctgagagtcctggaagcagccgtggcggccaagaagcgatttagtgtatacgtcacagagtcacagcctgatttgtcaggtaagaaaatggccaaagccctctgccacctcaacgtccctgtcactgtggtgctagatgctgctgtcggctacatcatggagaaagcagatcttgtcatagttggtgctgaaggagttgttgaaaacggaggaattattaacaagattggaaccaaccagatggctgtgtgtgccaaagcacagaacaaacctttctatgtggttgcagaaagtttcaagtttgtccggctctttccactaaaccagcaagacgtcccagataagtttaagtataaggcagacactctcaaggtcgcgcagactggacaagacctcaaagaggagcatccgtgggtcgactacactgccccttccttaatcactctgctgtttacagacctgggcgtgctgacaccctcagcagtcagcgatgagctcatcaagctctatctgtaacctgtgagccctttcctgccaaggtgcagcttacgtagttgaggcagggtgagtagctgcttgacaccccagtgagtcaggccaaaactgagatgtgtttaatgaagatttatggagtaaggacttaaaatcatacatcttggagaacctttcttactcatttcagtcccatctaaaaatgtgtcagctattctaaatcccaacttaaattgttcttacggtttctagaaactttccttttcagtttccagaaatacaagttagataattggctacttaactgatgaaagatgagcccaagtccacctgtcttcatcctcccctgcactccagactgatctgcctaaagcacgcgagatgcaggcgaaaagcagccacacccctctgccacaaatgaccaacagctggtcaggacgttacacgcggtgccttgtaagaggcaagaaacacttgctgaatctgcatctggcttccagtggtaagcacattcctcagcaggatcaagccaaacagtaaaaactaccaagagaacacgaggaaggcagaaacgatgtttagcaacagtattctgcatggttcactgcttaagaaaatgccttctggaatatttgtaaactgaaattctgtatgtgtaagagatgtttaaatatgtttgggtcctaaacagctttttaaaattatacttgggaataaattcagcatcttttcaaataaactctatgaaagacgctgatgtggtgttgcatcaatactgcaagctgaccaggccatctaggggaaaacactgtccagctacatttacacacttaagacccaggcaatcaggacaccatttattcaacaggaggcataaaaactataattctctttcccggaatatgacttaatccctctgtttttcagctattcaccaataaaacaatactgtgactattaacacagaaaaaccccagcacattagccacccctgcaggacatcaaaggataactgaagcccagggccaagcacattcaggaggtcaaatgcctgaagatactgaggaatggttttgaaaatcagaagtcaagaagacttctgtatctttatgtttaaaaataactataaaatagcctcagaaaaaagagcttatatatatatatatatatatatatatatatatatatatatatatataatatgtacatatgtctatatgtgacccatcatgataaatactgacatctattatttacactcaaataattttacattttcttctgttagactactccaagactggaattgttttgttttgttgtttttaatgagagggtctcgctgtgttcccaggctggtcttgaactcctggg

SEQ ID NO: 131097 - DNA, 848 bp, Homo sapiens
  Payload ID: 5600
  Gene Symbol: EIF2B1
  Gene Name: eukaryotic translation initiation factor 2B, subunit 1 alpha, 26kDa
  ENST ID: ENST00000539951
  CDS Start-End: 28-636
gagttaattgaatactttaagtctcagatgaaagaagatcctgacatggcctcagcagtggctgccatccggacgttgctggagttcttgaagagagataaaggggagacaatccagggtctgagggcgaatctcaccagtgccatagaaaccctgtgtggtgtggactcctctgtggcagtgtcctctggcggggagctcttcctccgcttcatcagtcttgcctccctggaatactccgattactccaaatgtaaaaagatcatgattgagcggggagaactttttctcaggagaatatcactgtcaagaaacaaaattgcagatctgtgccatactttcatcaaagatggagcgacaatattgactcacgcctactccagagtggtcctgagagtcctggaagcagccgtggcggccaagaagcgatttagtgtatacgtcacagagtcacagcctgatttgtcaggtaagaaaatggccaaagccctctgccacctcaacgtccctgtcactgtggtgctagatgctgctgtcggattggaaccaaccagatggctgtgtgtgccaaagcacagaacaaacctttctatgtggttgcagaaagtttcaagtttgtccggctctttccactaaaccagcaagacgtcccagataagtttaagtataaggcagacactctcaaggtcgcgcagactggacaagacctcaaagaggagcatccgtgggtcgactacactgccccttccttaatcactctgctgtttacagacctgggcgtgctgacaccctcagcagtcagcgatgagctcatcaagctctatctgtaacctgtgagccctttcctg

SEQ ID NO: 131098 - DNA, 618 bp, Homo sapiens
  Payload ID: 5600
  Gene Symbol: EIF2B1
  Gene Name: eukaryotic translation initiation factor 2B, subunit 1 alpha, 26kDa
  ENST ID: ENST00000534960
  CDS Start-End: 1-458
agcgcgggcggctcgggtcccctggggctccgcagcaggaggacgccatggacgacaaggagttaattgaatactttaagtctcagatgaaagaagatcctgacatggcctcagcagtggctgccatccggacgttgctggagttcttgaagagagataaaggggagacaatccagggtctgagggcgaatctcaccagtgccatagaaaccctgtgtggtgtggactcctctgtggcagtgtcctctggcggggagctcttcctccgcttcatcagtcttgcctccctggaatactccgattactccaaatgtaaaaagatcatgattgagcggggagaactttttctcaggagaatatcactgtcaagaaacaaaattgcagatctgtgccatactttcatcaaagatggagcgctacatcatggagaaagcagatcttgtcatagttggtgctgaaggagttgttgaaaacggaggaattattaacaagattggaaccaaccagatggctgtgtgtgccaaagcacagaacaaacctttctatgtggttgcagaaagtttcaagtttgtccggctctttccactaaaccagcaagacgtcccagataagtttaag

SEQ ID NO: 131099 - DNA, 1768 bp, Homo sapiens
  Payload ID: 5600
  Gene Symbol: EIF2B1
  Gene Name: eukaryotic translation initiation factor 2B, subunit 1 alpha, 26kDa
  Uniprot ID: Q14232
  ENST ID: ENST00000537073
  CDS Start-End: 210-878
cgaggtgctgtgactcgtgccagccccctaatctgcggaagtggagtgcggggagtgcgccggaagaggggtacggaagtgcgccggaagtggggtgcggaggtgtgcagcgcgctgtcagactggctcgcaggcggcgcggccggcggacccgttcgagacagcgcgggcggctcgggtcccctggggctccgcagcaggaggacgccatggacgacaaggagttaattgaatactttaagtctcagatgaaagaagatcctgacatggcctcagcagtggctgccatccggacgttgctggagttcttgaagagagataaaggggagacaatccagggtctgagggcgaatctcaccagtgccatagaaaccctgtgtggtgtggactcctctgtggcagtgtcctctggcggggagctcttcctccgcttcatcagtcttgcctccctggaatactccgattactccaaatgtaaaaagatcatgattgagcggggagaactttttctcaggagaatatcactgtcaagaaacaaaattgcagatctgtgccatactttcatcaaagatggagcgacaatattgactcacgcctactccagagtggtcctgagagtcctggaagcagccgtggcggccaagaagcgatttagtgtatacgtcacagagtcacagcctgatttgtcagggcaagtacctttctgttcagttatgtgcccagccataattttacagagcaaactgcggattacagtccaacaggatcagaaccagaatgtgcccccagcttgccagcagtcagcactgcctttcattgtaccttttcctgcctttggaagaaaaatcactgaatttgcagcaggccgcagtatatgatctaggggtttcacttaagtagttaactccgtggaagagcagagattgtattgatgaagatttttatcaaggaataggtaacttatatctccctctctctagacgataatcaaagcaaaacttcctccttttttcctgaatttacatctcttacccagagtctaagagtatagttttccaaaaatacttctttctaaagaactcaaattcttgtttccttagtccaaagtattgggatctgccccttaacccattagtattaatgtgagtttcaagcaaacatccactgtccacattaggtgacatacatcactgtggtactgtcttgtactttctctaacgttctcaaaatgtcatcttcagtaagaaaatggccaaagccctctgccacctcaacgtccctgtcactgtggtgctagatgctgctgtcgggtgagtgcccatcttccccagccataatcacctcccccaccccatgctggcttacagcaagttttcagattgaaagtttgagtcccgttcataaagccacaccaggtagcgtcctacttcttaattaatagctgccctaaaccagcaagcttgttatgaggttgtgatagcatacaaagaagacagagctgtaggatgttggggagagtgggagttgtgtctatagctttatggctgtaagtgttgagtttgttgttgttgttgtttttgtttgtttgttttttgtttttttgagatggagtcttgccctgttgcccaggctggagtgcaatggcatgatcttggttcactgcaatctccacctcccaggttcaagcgattctcctgcctcagcctcctaagtagctgggattaccggcgcatgccaccatgccacgttaattcttttatatttttag

SEQ ID NO: 131100 - DNA, 4314 bp, Homo sapiens
  Payload ID: 5601
  Gene Symbol: EIF2B2
  Gene Name: eukaryotic translation initiation factor 2B, subunit 2 beta, 39kDa
  Uniprot ID: P49770
  ENST ID: ENST00000266126
  CDS Start-End: 81-1136
cgcccgccccggaagtgcaaactgtgtggtctggcaggtgtggattccgccggtgaaggctgaaggcagctaccttaaagatgccgggatccgcagcgaagggctcggagttgtcagagaggatcgagagcttcgtggagaccctgaagcggggtggtgggccgcgcagctccgaggaaatggctcgggagaccctagggttgctgcgccagatcatcacggaccaccgctggagcaacgcgggggagctgatggagctgatccgcagagagggcaggaggatgacggccgctcagccctccgagaccaccgtgggcaacatggtgcggagagtgctcaagattatccgggaggagtatggcagactccatggacgcagcgacgagagtgatcagcaggagtccctgcacaaactgttgacatccggaggcctaaacgaggatttcagcttccattatgcccaactccagtccaacatcattgaggcgattaatgagctgctagtggagctggaagggacaatggagaacattgcagcccaggctctggagcacattcactccaatgaggtgatcatgaccattggcttctcccgaacagtagaggccttcctcaaagaggctgcccgaaagaggaaattccatgtcattgtagcagagtgtgctcctttctgccagggtcatgaaatggctgtgaatttgtccaaagcaggtattgagacaactgtcatgactgatgctgccatttttgccgttatgtcaagagtcaacaaggtgatcattggcacgaagaccatcctggccaatggggccctgagagctgtgacaggaactcacactctggcactggcagcaaaacaccattccaccccactcatcgtctgtgcacctatgttcaaactttctccacagttccccaatgaagaagactcatttcataagtttgtggctcctgaagaagtcctgccattcacagaaggggacattctggagaaggtcagcgtgcattgccctgtgtttgactacgttcccccagagctcattaccctctttatctccaacattggtgggaatgcaccttcctacatctaccgcctgatgagtgaactctaccatcctgatgatcatgttttatgaccgaccacacgtgtcctaagcagattgcttaggcagatacagaatgaagaggagacttgagtgttgctgctgaagcacatccttgcaatgtgggagtgcacaggagtccacctaaaaaaaaaatccttgatactgttgcctgcctttttagtcaccccgtaacaagggcacacatccaggactgtgtcttgcctttcagatcttaacagagcagcagggcttaacttgttgattttggagcctcttagtgacctggttgcgtctgtgtcaggaacttaaactttctggttcagtagtgtgttaaacataacactgaataccttactgggatacagatttttgctcagaaatggctatgacactttttctaggctctaccaataaaagccacttgaaggttccatagttggtttatttattgtcctactctgacagaactgcttgaaacagcagcagcagagccttttttgtgtttgcatagagggctgtagttagcgggaaaagtgtacaacatggtagtactggccagatgcagtggctcccacttgtaatcctggactttgggaggctgaggtgggaggcttgtttgaggcttgtttgaggcctggagtttgagattagcctggcaacatagcaagatcctgtctctacaaaaaaatattttaaaaaattagccagacatggtggcacatgcctgtggcctcgctatgctggaggctgaggtgggaggatcacttgagcccatgagttcaaggcttcagtgagctatcattgtaccactgcactcctgcctggatgatagagcaagactctgtctctaaaaaaataacaagtacaaatgaaagtatagtttcctttacaattcactgctcctggccccaaagtttgttcatagtctaaaacagtagttccaaaacctcgctgatcatcagaatcacctgagagtgattccgatcactcactcacacagtcttgggtttcatctcagtcctactgcatctgatctcagggttactacctgggaatctgtttaaagcttcccagaaaaggatagtctcatgtagtgtttataggactataaattggtacagccttttagagggcaatttggaagctgtatttctagaattatttgtacaagcaaaaagatttatacagagtgttcagtgtagtagttgtaatgtcatagcctaagtgtccagcaataggagaaaggttaagtattgacagttacaccgtggaacattatacatggcaatagaagtttcaaaaggatggctggaggggcagtgtctggattgaaggcatttgggctggttcactgcatttaatgtgaatttgttaccaatatttaaaaatctggagattgcacatttcaaaaattcagatttcttgcttttcttgaaaactcaaatttggcaactctgggccaacatttccaaatggcagtagttagtttgtggttgggtaacatctgatgccattggatggaacatctccagttttctgcagttcctactggatccatttaactcatttatgttatctgcctaacccctgtaggcatttgagttgtgatcctggtgttaaaagaatgggacagatttgcaaggaagtccatttgatactctgttagttaaaaacaagctggggaaaaaaaacacaacaagctgcagagcaatatgcataatacggactcatttccataaaacaacactggctgggcgcaatggctcacgcctataatcccagcactttgggaggctgaggagggcagatcacttgaggtcaggagtttgagaccagcctggtcaaaatggcgaaactaaaatactataataaaatttttagttccactaaaaatacaaaaattagccaggtgtggttgtgggtacctgtagtcccagctactcgggaggctgaacttgggaagtagaggttgcagtgagcagtgccattgggccactgcactttagcctgggcaacagtgggtgagactctgtctcacaaaaacaaaacaaaattatatgtacacgcatagggaaacagtatagaagtataataccaagcacagcaagcagagggacatcctctaattttgttgacatgtttatgcttacatattgtttccggtttttaacctaaaaagtctcccaggtgatccagattttctgccatgtttaggaactagtggtccaaagcagggcctcttgtgcagtgtctgtgtgggtggagggagcactaagaatctgcatgtttaacaaatagcctgtgggctttgaacaggtgatttgaaaccacattttggttaacactgggcagaggtaggttctgagggaaaggtctctattctttgatatctctttgagagcgatctttgccttaggtcttccagagaggggaaaaaagtaagacctcagaaagtcggcattttacactgacctaaaagctgtatgactcagaagagcctgactcactcaggctcagtctttctattatttcttaaagcatctaagaccccacgctttctcagtgaagtggcttgtagctaccaattacgagcaattgtctcctccaaaggcaccaattctaacagcaattcacttgggtacaattgtgtggtttggagtaagagcagcagtgaggcaaggaacttaaatctgttcctggctccaaaaatgctttatgatacttgtcctttgtccatcttagtctctgtgtctaaaattagcaccaacatccttcccaggcatgactgagttggatgaaggttataagggtagaagctctctttctggtcagctcttacagtgcctagaacagaactgcaggaatgcatactttttagaatctttatgaccccaattaagtaaaccctattaaggctcatcttcttatttcccctctctccgtttccctatttgaggaggggtaagtatcagaaagagagaacctgaactgaacaggaggaaacagaagttccacatcaactcactacctgtcagccttggtatcaggggtgcccacctcccacccctgccttgctggcggaaccgagaaactcggaaaaaaacaaacaaaaaaacaactgttgtagcttggagagaattaatagaactaggattccatggatgtgaaagtcttcctcaatatgctaaataaaccaagttagataaca

SEQ ID NO: 131101 - DNA, 896 bp, Homo sapiens
  Payload ID: 5601
  Gene Symbol: EIF2B2
  Gene Name: eukaryotic translation initiation factor 2B, subunit 2 beta, 39kDa
  ENST ID: ENST00000553401
  CDS Start-End: 1-603
gagttgtcagagaggatcgagagcttcgtggagaccctgaagcggggtggtgggccgcgcagctccgaggaaatggctcgggagaccctagggttgctgcgccagatcatcacggaccaccgctggagcaacgcgggggagctgatggagctgatccgcagagagggcaggaggatgacggccgctcagccctccgagaccaccgtgggcaacatggtgcggagagtgctcaagattatccgggaggagtatggcagactccatggacgcagcgacgagagtgatcagcaggagtccctgcacaaactgttgacatccggaggcctaaacgaggatttcagcttccattatgcccaactccagtccaacatcattgaggcgattaatgagctgctagtggagctggaagggacaatggagaacattgcagcccaggctctggagcacattcactccaatgaggtgatcatgaccattggcttctcccgaacagtagaggccttcctcaaagaggctgcccgaaagaggaaattccatgtcattgtagcagagtgtgctcctttctgccagaatcagcctttccctcccattgcagggtcatgaaatggctgtgaatttgtccaaagcaggtattgagacaactgtcatgactgatgctgccatttttgccgttatgtcaagagtcaacaaggtgatcattggcacgaagaccatcctggccaatggggccctgagagctgtgacaggaactcacactctggcactggcagcaaaacaccattccaccccactcatcgtctgtgcacctatgttcaaactttctccacagttccccaatgaagaagactcatttcataagtttgtggctcctgaagaagtcctgccattcacagaag

SEQ ID NO: 131102 - DNA, 831 bp, Homo sapiens
  Payload ID: 5601
  Gene Symbol: EIF2B2
  Gene Name: eukaryotic translation initiation factor 2B, subunit 2 beta, 39kDa
  ENST ID: ENST00000556028
  CDS Start-End: 18-638
aggcagctaccttaaagatgccgggatccgcagcgaagggctcggagttgtcagagaggatcgagagcttcgtggagaccctgaagcggggtggtgggccgcgcagctccgaggaaatggctcgggagaccctagggttgctgcgccagatcatcacggaccaccgctggagcaacgcgggggagctgatggagctgatccgcagagagggcaggaggatgacggccgctcagccctccgagaccaccgtgggcaacatggtgcggagagtgctcaagattatccgggaggagtatggcagactccatggacgcagcgacgagagtgatcagcaggagtccctgcacaaactgttgacatccggaggcctaaacgaggatttcagcttccattatgcccaactccagtccaacatcattgaggcgattaatgagctgctagtggagctggaagggacaatggagaacattgcagcccaggctctggagcacattcactccaatgaggtgatcatgaccattggcttctcccgaacagtagaggccttcctcaaagaggctgcccgaaagaggaaattccatgtcattgtagcagagtgtgctcctttctgccagcaggtattgagacaactgtcatgactgatgctgccatttttgccgttatgtcaagagtcaacaaggtgatcattggcacgaagaccatcctggccaatggggccctgagagctgtgacaggaactcacactctggcactggcagcaaaacaccattccaccccactcatcgtctgtgcacctatgttcaaactttctccacagttccccaatgaaga

SEQ ID NO: 131103 - DNA, 551 bp, Homo sapiens
  Payload ID: 5601
  Gene Symbol: EIF2B2
  Gene Name: eukaryotic translation initiation factor 2B, subunit 2 beta, 39kDa
  ENST ID: ENST00000554748
  CDS Start-End: 1-216
gagacaactgtcatgactgatgctgccatttttgccgttatgtcaagagtcaacaaggtgatcattggcacgaagaccatcctggccaatggggccctgagagctgtgacaggaactcacactctggcactggcagcaaaacaccattccaccccactcatcgtctgtgcacctatgttcaaactttctccacagggcctgtcctttgtaacctgaatacaagcaaggactaagtgaagagccatttcatcagtgatagaagctatttgctttgaaaacatcaacctatttataggtctctattttttaaattgaggtgaaattcacataacatacaattaaccattttaaagtatacaatttagtgatatctagtacattcacagcattgtacaaccaccactctctagtttcaaaactttttctccactgtagaaaaacaccctgtacccattaagtaatctctccctatttgtccttctccccatctcctccaatctgctcctgtctctatggatttgcccattttgtataaaaggaatcatataata

SEQ ID NO: 131104 - DNA, 1659 bp, Homo sapiens
  Payload ID: 5602
  Gene Symbol: EIF2B3
  Gene Name: eukaryotic translation initiation factor 2B, subunit 3 gamma, 58kDa
  Uniprot ID: Q9NR50
  ENST ID: ENST00000360403
  CDS Start-End: 128-1486
attgggctgtcagtcagaggcggcgtggagatcgctgggagcggttgcggcgtgccgggagctgagttatagctgtgacttctgccctgccaggccgcacacaagctggctgacccggtttgtaaaaatggaatttcaagcagtagtgatggcagtaggtggaggatctcggatgacagacctaacttccagcattcccaaacctctgcttccagttgggaacaaacctttaatttggtacccattgaacctgcttgagcgtgttggatttgaagaagtcattgtggttacaaccagggatgttcaaaaggctctatgtgcagaattcaagatgaaaatgaagccagatattgtgtgtattcctgatgacgctgacatgggaactgcagattctttgcgctacatatatccaaaacttaagacagatgtgctggtgctgagctgtgatctgataacagacgttgccttacatgaggttgtggacctgtttagagcttatgatgcatcacttgctatgttgatgagaaaaggccaagatagcatagaacctgttcccggtcaaaaggggaaaaaaaaagcagtggagcagcgtgacttcattggagtggacagcacaggaaagaggctgctcttcatggctaatgaagcagacttggatgaagagctggtcattaagggatccatcctacagaagcatcctagaatacgtttccacacgggtcttgtggatgcccacctctactgtttgaaaaaatacatcgtggatttcctaatggaaaatgggtcaataacttctatccggagtgaactgattccatatttagtgagaaaacagttttcctcagcttcctcacaacagggacaagaagaaaaagaggaggatctaaagaaaaaggagctgaagtccttagatatctacagttttataaaagaagccaatacactgaacctggctccctatgatgcctgctggaatgcctgtcgaggagacaggtgggaagacttgtccagatcacaggtgcgctgctatgtccacatcatgaaagaggggctctgctctcgagtgagcacactgggactctacatggaagcaaacagacaggtgcccaaattgctgtctgctctctgtccagaagaaccaccagtccattcgtcagcccagattgtcagcaaacacctggttggagttgacagcctcattgggccagagacacagattggagagaagtcatccattaagcgctcagtcattggctcatcctgtctcataaaagatagagtgactattaccaattgccttctcatgaactcagtcactgtggaggaaggaagcaatatccaaggcagtgtcatctgcaacaatgctgtgatcgagaagggtgcagacatcaaggactgcttgattggaagtggccagaggattgaagccaaagctaaacgagtgaatgaggtgatcgtggggaatgaccagctcatggagatctgagttctgagcaagtcagactccttccttttggcctccaaagccacagatgttggccggcccacctgtttaactctgtatttatttcccaataaagaagggcttccaaaggcatgctggagacttgtggagcagtccaaagctccatgtcaggtgggctccaggtgtacacagtg

SEQ ID NO: 131105 - DNA, 1457 bp, Homo sapiens
  Payload ID: 5602
  Gene Symbol: EIF2B3
  Gene Name: eukaryotic translation initiation factor 2B, subunit 3 gamma, 58kDa
  Uniprot ID: Q9NR50
  ENST ID: ENST00000372183
  CDS Start-End: 105-1343
cgtggagatcgctgggagcggttgcggcgtgccgggagctgagttatagctgtgacttctgccctgccaggccgcacacaagctggctgacccggtttgtaaaaatggaatttcaagcagtagtgatggcagtaggtggaggatctcggatgacagacctaacttccagcattcccaaacctctgcttccagttgggaacaaacctttaatttggtacccattgaacctgcttgagcgtgttggatttgaagaagtcattgtggttacaaccagggatgttcaaaaggctctatgtgcagaattcaagatgaaaatgaagccagatattgtgtgtattcctgatgacgctgacatgggaactgcagattctttgcgctacatatatccaaaacttaagacagatgtgctggtgctgagctgtgatctgataacagacgttgccttacatgaggttgtggacctgtttagagcttatgatgcatcacttgctatgttgatgagaaaaggccaagatagcatagaacctgttcccggtcaaaaggggaaaaaaaaagcagtggagcagcgtgacttcattggagtggacagcacaggaaagaggctgctcttcatggctaatgaagcagacttggatgaagagctggtcattaagggatccatcctacagaagcatcctagaatacgtttccacacgggtcttgtggatgcccacctctactgtttgaaaaaatacatcgtggatttcctaatggaaaatgggtcaataacttctatccggagtgaactgattccatatttagtgagaaaacagttttcctcagcttcctcacaacagggacaagaagaaaaagaggaggatctaaagaaaaaggagctgaagtccttagatatctacagttttataaaagaagccaatacactgaacctggctccctatgatgcctgctggaatgcctgtcgaggagacaggtgggaagacttgtccagatcacaggtgcgctgctatgtccacatcatgaaagaggggctctgctctcgagtgagcacactgggactctacatggaagcaaacagacaggtgcccaaattgctgtctgctctctgtccagaagaaccaccagtccattcgtcagcccagattgtcagcaaacacctggttggagttgacagcctcattgggccagagacacagattggagagaagtcatccattaagcgctcagtcattggctcatcctgtctcataaaagatagagtgactattaccaattgccttctcatgaactcagtcactgtggaggaagggtatgtttccccctgtacccacttgaggcaaagataatggaaaaatgccttcaaaattctgaaggaaggttaattttaacctaaaattgtatacccaggcaaagtgctaatcaagagggcaatagaataaaaacattttcagatatcaaaa

SEQ ID NO: 131106 - DNA, 892 bp, Homo sapiens
  Payload ID: 5602
  Gene Symbol: EIF2B3
  Gene Name: eukaryotic translation initiation factor 2B, subunit 3 gamma, 58kDa
  ENST ID: ENST00000439363
  CDS Start-End: 1-668
tggtcattaagggatccatcctacagaagcatcctagaatacgtttccacacgggtcttgtggatgcccacctctactgtttgaaaaaatacatcgtggatttcctaatggaaaatgggtcaataacttctatccggagtgaactgattccatatttagtgagaaaacagttttcctcagcttcctcacaacagggacaagaagaaaaagaggaggatctaaagaaaaaggagctgaagtccttagatatctacagttttataaaagaagccaatacactgaacctggctccctatgatgcctgctggaatgcctgtcgaggagacaggtgggaagacttgtccagatcacaggtgcgctgctatgtccacatcatgaaagaggggctctgctctcgagtgagcacactgggactctacatggaagcaaacagacaggtgcccaaattgctgtctgctctctgtccagaagaaccaccagtccattcgtcagcccagattgtcagcaaacacctggttggagttgacagcctcattgggccagagacacagattggagagaagtcatccattaagcgctcagtcattggctcatcctgtctcataaaagatagagtgactattaccaattgccttctcatgaactcagtcactgtggaggaaggctaaacgagtgaatgaggtgatcgtggggaatgaccagctcatggagatctgagttctgagcaagtcagactccttccttttggcctccaaagccacagatgttggccggcccacctgtttaactctgtatttatttcccaataaagaagggcttccaaaggcatgctggagacttgtggagcagtccaaagctccatgtcaggtgggctccaggtgtacacagtgta

SEQ ID NO: 131107 - DNA, 1923 bp, Homo sapiens
  Payload ID: 5602
  Gene Symbol: EIF2B3
  Gene Name: eukaryotic translation initiation factor 2B, subunit 3 gamma, 58kDa
  Uniprot ID: Q9NR50
  ENST ID: ENST00000620860
  CDS Start-End: 240-1445
ctctccgctgagtgtgcttcccctccgtcatccatcgctcggcggtcttctcttctccatgggtctgctctgcgcgttccatcgagtttctcggccatcgcgcgcctgcgccattgggctgtcagtcagaggcggcgtggagatcgctgggagcggttgcggcgtgccgggagctgagttatagctgtgacttctgccctgccaggccgcacacaagctggctgacccggtttgtaaaaatggaatttcaagcagtagtgatggcagtaggtggaggatctcggatgacagacctaacttccagcattcccaaacctctgcttccagttgggaacaaacctttaatttggtacccattgaacctgcttgagcgtgttggatttgaagaagtcattgtggttacaaccagggatgttcaaaaggctctatgtgcagaattcaagatgaaaatgaagccagatattgtgtgtattcctgatgacgctgacatgggaactgcagattctttgcgctacatatatccaaaacttaagacagatgtgctggtgctgagctgtgatctgataacagacgttgccttacatgaggttgtggacctgtttagagcttatgatgcatcacttgctatgttgatgagaaaaggccaagatagcatagaacctgttcccggtcaaaaggggaaaaaaaaagcagtggagcagcgtgacttcattggagtggacagcacaggaaagaggctgctcttcatggctaatgaagcagacttggatgaagagctggtcattaagggatccatcctacagaagcatcctagaatacgtttccacacgggtcttgtggatgcccacctctactgtttgaaaaaatacatcgtggatttcctaatggaaaatgggtcaataacttctatccggagtgaactgattccatatttagtgagaaaacagttttcctcagcttcctcacaacagggacaagaagaaaaagaggaggatctaaagaaaaaggagctgaagtccttagatatctacagttttataaaagaagccaatacactgaacctggctccctatgatgcctgctggaatgcctgtcgaggagacaggtgggaagacttgtccagatcacaggtgcgctgctatgtccacatcatgaaagaggggctctgctctcgagtgagcacactgggactctacatggaagcaaacagacaggtgcccaaattgctgtctgctctctgtccagaagaaccaccagtccattcgtcagcccagattgtcagcaaacacctggttggagttgacagcctcattgggccagagacacagattggagagaagtcatccattaagcgctcagtcattggctcatcctgtctcataaaagatagagtgactattaccaattgccttctcatgaactcagtcactgtggaggaaggctaaacgagtgaatgaggtgatcgtggggaatgaccagctcatggagatctgagttctgagcaagtcagactccttccttttggcctccaaagccacagatgttggccggcccacctgtttaactctgtatttatttcccaataaagaagggcttccaaaggcatgctggagacttgtggagcagtccaaagctccatgtcaggtgggctccaggtgtacacagtgtatgttcatgtgtcatgtggtaaagatcatctggagcaagtgtgtgggacaggacagatacagtggcctaactcttgtgtgccaagatgtatcggtggggcagcagctgtccaatgtaaagctcctaggaaggctactttctgactggctgacccaacccagtcctgaaagtatccctcacctaaaaggacctgggagtacttcagtcccttatcctaatcagcctttctagacccataggcctagctgctggcag

SEQ ID NO: 131108 - DNA, 1082 bp, Homo sapiens
  Payload ID: 5602
  Gene Symbol: EIF2B3
  Gene Name: eukaryotic translation initiation factor 2B, subunit 3 gamma, 58kDa
  ENST ID: ENST00000480675
  CDS Start-End: 117-503
agtcagaggcggcgtggagatcgctgggagcggttgcggcgtgccgggagctgagttatagctgtgacttctgccctgccaggccgcacacaagctggctgacccggtttgtaaaaatggaatttcaagcagtagtgatggcagtaggtggaggatctcggatgacagacctaacttccagcattcccaaacctctgcttccagttgggaacaaacctttaatttggtacccattgaacctgcttgagcgtgttggatttgaagaagtcattgtggttacaaccagggatgttcaaaaggctctatgtgcagaattcaagatgaaaatgaagccagatattgtgtgtattcctgatgacgctgacatgggaactgcagattctttgcgctacatatatccaaaacttaagctacccaaacctctttccctgacttatcaagagagattattggttcattcattctcccaggccctggacagatgtgctggtgctgagctgtgatctgataacagacgttgccttacatgaggttgtggacctgtttagagcttatgatgcatcacttgctatgttgatgagaaaaggccaagatagcatagaacctgttcccggtcaaaaggggaaaaaaaaagcagtggagcagcgtgacttcattggagtggacagcacaggaaagaggctgctcttcatggctaatgaagcagacttggatgaagagctggtcattaagggatccatcctacagaaacatttgagttgctgccacctcttggctattgtgaatagtgctgcagtgaacgtgggtgtacagacatctcttcaagaccttgctttcagttcttttggatatatatttagaagtgggattactggatcatatggtagagaactatgatgtttaattttttgaggaaactacatactgtttccatggcattttcactattttacaatcccaccaacagtgcataagagccccagtttctccacaccagtacttacatggtagctggtctcagatacagaaggaaaagagaattcatttatgttatatcaaaacaaataaaacatctgggcaga

SEQ ID NO: 131109 - DNA, 1792 bp, Homo sapiens
  Payload ID: 5603
  Gene Symbol: EIF2B4
  Gene Name: eukaryotic translation initiation factor 2B, subunit 4 delta, 67kDa
  Uniprot ID: Q9UI10
  ENST ID: ENST00000347454
  CDS Start-End: 173-1744
agtgcggggcggggcctcggggcccgtcggaaattgtagtccgattggggctgcgcgcttcgcttctgcggctcagcctccagcccaggtggcgctgtggaccctgcagccgcggagcgaggcagcggggcggctccgtgaccacggcgggcggagcctaggactgagggcgatggctgctgtggccgtggctgttcgcgaggactcgggatccgggatgaaggcggagcttccccctgggcctggggcagtggggagggaaatgaccaaagaagaaaagctgcagcttcggaaggaaaagaaacagcagaagaagaaacggaaggaagaaaagggggcagaaccagagactggctctgctgtatctgcagcccaatgtcaagtaggcccaaccagagaactgccagaatcgggcattcagttgggcactcctcgggagaaagttccagctggtcggagtaaggccgaacttcgggctgagcgtcgagccaagcaggaggccgagcgggccctgaaacaggcaagaaaaggggaacaaggaggaccacctcctaaggccagccccagcacagctggagaaaccccctcaggagtgaagcgtctccctgagtaccctcaggttgatgacctacttctgagaaggcttgttaaaaaaccagagcgtcaacaggttcctacacgaaaggattatggatccaaagtcagtctcttctctcacctaccccagtacagcagacaaaactctctgacccagtttatgagcatcccatcctctgtgatccacccagccatggtgcgactcggcctgcagtactcccagggcctggtcagtggctccaatgcccggtgtattgccctgcttcgtgccttgcagcaggtgattcaggattacacaacaccgcctaatgaagaactctccagggatctagtgaataaactaaaaccctacatgagcttcctgactcagtgccgtcccctgtcagcgagcatgcacaacgccatcaagttccttaacaaggaaatcaccagtgtgggcagttccaagcgggaagaggaggccaagtcagaacttcgagcagccattgatcggtatgtgcaagagaagattgtgctagcagctcaggcaatttcacgctttgcttaccagaagatcagtaatggagatgtgatcctggtatatggatgctcatctctggtatcacgaattcttcaggaggcttggacagagggccggcggtttcgggtggtagtggtggacagccggccatggctggaaggaaggcacacactacgttctctagtccatgctggtgtcccagcctcctacctgctgattcctgcagcctcctatgtgctcccagaggtttccaaggtgctattgggagctcatgcactcttggccaacgggtctgtgatgtcacgggtagggacagcacagttagccctggtggctcgagcccataatgtaccagtgctggtttgctgtgaaacatacaagttctgtgagcgtgtgcagactgatgcctttgtctctaatgagctagatgaccctgatgatctgcaatgtaagcggggagaacatgttgcgctggctaactggcagaaccacgcatccctacggttgttgaatctagtctatgatgtgactcccccagagcttgtggatctggtgatcacggagctggggatgatcccttgcagttctgtacctgttgttctacgagtcaagagcagtgaccagtgacgggggaaacacagggttaataaatgccatactccctaccctcagcaa

SEQ ID NO: 131110 - DNA, 1570 bp, Homo sapiens
  Payload ID: 5603
  Gene Symbol: EIF2B4
  Gene Name: eukaryotic translation initiation factor 2B, subunit 4 delta, 67kDa
  ENST ID: ENST00000405940
  CDS Start-End: 2-709
gatggctgctgtggccgtggctgttcgcgaggactcgggatccgggatgaaggcggagcttccccctgggcctggggcagtggggagggaaatgaccaaagaagaaaagctgcagcttcggaaggaaaagaaacagcagaagaagaaacggaaggaagaaaagggggcagaaccagagactggctctgctgtatctgcagcccaatgtcaagtaggcccaaccagagaactgccagaatcgggcattcagttgggcactcctcgggagaaagttccagctggtcggagtaaggccgaacttcgggctgagcgtcgagccaagcaggaggccgagcgggccctgaaacaggcaagaaaaggggaacaaggaggaccacctcctaaggccagccccagcacagctggagaaaccccctcaggagtgaagcgtctccctgagtaccctcaggttgatgacctacttctgagaaggcttgttaaaaaaccagagcgtcaacaggttcctacacgaaaggattatggatccaaagtcagtctcttctctcacctaccccagtacagcagacaaaactctctgacccagtttatgagccatggtgcgactcggcctgcagtactcccagggcctggtcagtggctccaatgcccggtgtattgccctgcttcgtgccttgcagcaggtgattcaggattacacaacaccgcctaatgaagaactctccagggatctagtgaataaactaaaaccctacatgagcttcctgactcagtgccgtcccctgtcagcgagcatgcacaacgccatcaagttccttaacaaggaaatcaccagtgtgggcagttccaagcgggaagaggaggccaagtcagaacttcgagcagccattgatcggtatgtgcaagagaagattgtgctagcagctcaggcaatttcacgctttgcttaccagaagatcagtaatggagatgtgatcctggtatatggatgctcatctctggtatcacgaattcttcaggaggcttggacagagggccggcggtttcgggtggtagtggtggacagccggccatggctggaaggaaggcacacactacgttctctagtccatgctggtgtcccagcctcctacctgctgattcctgcagcctcctatgtgctcccagaggtttccaaggtgctattgggagctcatgcactcttggccaacgggtctgtgatgtcacgggtagggacagcacagttagccctggtggctcgagcccataatgtaccagtgctggtttgctgtgaaacatacaagttctgtgagcgtgtgcagactgatgcctttgtctctaatgagctagatgaccctgatgatctgcaatgtaagcggggagaacatgttgcgctggctaactggcagaaccacgcatccctacggttgttgaatctagtctatgatgtgactcccccagagcttgtggatctggtgatcacggagctggggatgatcccttgcagttctgtacctgttgttctacgagtcaagagcagtgaccagtgacgggggaaacacagggttaataa

SEQ ID NO: 131111 - DNA, 1608 bp, Homo sapiens
  Payload ID: 5603
  Gene Symbol: EIF2B4
  Gene Name: eukaryotic translation initiation factor 2B, subunit 4 delta, 67kDa
  Uniprot ID: Q9UI10
  ENST ID: ENST00000445933
  CDS Start-End: 21-1589
ggagcctaggactgagggcgatggctgctgtggccgtggctgttcgcgaggactcgggatccgggatgaaggcggagcttccccctgggcctggggcagtggggagggaaatgaccaaagaagaaaagctgcagcttcggaaggaaaagaaacagcagaagaagaaacggaaggaagaaaagggggcagaaccagagactggctctgctgtatctgcagcccaatgtcaaggcccaaccagagaactgccagaatcgggcattcagttgggcactcctcgggagaaagttccagctggtcggagtaaggccgaacttcgggctgagcgtcgagccaagcaggaggccgagcgggccctgaaacaggcaagaaaaggggaacaaggaggaccacctcctaaggccagccccagcacagctggagaaaccccctcaggagtgaagcgtctccctgagtaccctcaggttgatgacctacttctgagaaggcttgttaaaaaaccagagcgtcaacaggttcctacacgaaaggattatggatccaaagtcagtctcttctctcacctaccccagtacagcagacaaaactctctgacccagtttatgagcatcccatcctctgtgatccacccagccatggtgcgactcggcctgcagtactcccagggcctggtcagtggctccaatgcccggtgtattgccctgcttcgtgccttgcagcaggtgattcaggattacacaacaccgcctaatgaagaactctccagggatctagtgaataaactaaaaccctacatgagcttcctgactcagtgccgtcccctgtcagcgagcatgcacaacgccatcaagttccttaacaaggaaatcaccagtgtgggcagttccaagcgggaagaggaggccaagtcagaacttcgagcagccattgatcggtatgtgcaagagaagattgtgctagcagctcaggcaatttcacgctttgcttaccagaagatcagtaatggagatgtgatcctggtatatggatgctcatctctggtatcacgaattcttcaggaggcttggacagagggccggcggtttcgggtggtagtggtggacagccggccatggctggaaggaaggcacacactacgttctctagtccatgctggtgtcccagcctcctacctgctgattcctgcagcctcctatgtgctcccagaggtttccaaggtgctattgggagctcatgcactcttggccaacgggtctgtgatgtcacgggtagggacagcacagttagccctggtggctcgagcccataatgtaccagtgctggtttgctgtgaaacatacaagttctgtgagcgtgtgcagactgatgcctttgtctctaatgagctagatgaccctgatgatctgcaatgtaagcggggagaacatgttgcgctggctaactggcagaaccacgcatccctacggttgttgaatctagtctatgatgtgactcccccagagcttgtggatctggtgatcacggagctggggatgatcccttgcagttctgtacctgttgttctacgagtcaagagcagtgaccagtgacgggggaaacacagggtta

SEQ ID NO: 131112 - DNA, 1633 bp, Homo sapiens
  Payload ID: 5603
  Gene Symbol: EIF2B4
  Gene Name: eukaryotic translation initiation factor 2B, subunit 4 delta, 67kDa
  Uniprot ID: Q9UI10
  ENST ID: ENST00000451130
  CDS Start-End: 1-1632
atgccaacccagcagccggctgcgccgagtactcgtgcccccaaaccctcccggagtctctctggctcactttgtgccctgttttctgatgcagactcgggatccgggatgaaggcggagcttccccctgggcctggggcagtggggagggaaatgaccaaagaagaaaagctgcagcttcggaaggaaaagaaacagcagaagaagaaacggaaggaagaaaagggggcagaaccagagactggctctgctgtatctgcagcccaatgtcaaggcccaaccagagaactgccagaatcgggcattcagttgggcactcctcgggagaaagttccagctggtcggagtaaggccgaacttcgggctgagcgtcgagccaagcaggaggccgagcgggccctgaaacaggcaagaaaaggggaacaaggaggaccacctcctaaggccagccccagcacagctggagaaaccccctcaggagtgaagcgtctccctgagtaccctcaggttgatgacctacttctgagaaggcttgttaaaaaaccagagcgtcaacaggttcctacacgaaaggattatggatccaaagtcagtctcttctctcacctaccccagtacagcagacaaaactctctgacccagtttatgagcatcccatcctctgtgatccacccagccatggtgcgactcggcctgcagtactcccagggcctggtcagtggctccaatgcccggtgtattgccctgcttcgtgccttgcagcaggtgattcaggattacacaacaccgcctaatgaagaactctccagggatctagtgaataaactaaaaccctacatgagcttcctgactcagtgccgtcccctgtcagcgagcatgcacaacgccatcaagttccttaacaaggaaatcaccagtgtgggcagttccaagcgggaagaggaggccaagtcagaacttcgagcagccattgatcggtatgtgcaagagaagattgtgctagcagctcaggcaatttcacgctttgcttaccagaagatcagtaatggagatgtgatcctggtatatggatgctcatctctggtatcacgaattcttcaggaggcttggacagagggccggcggtttcgggtggtagtggtggacagccggccatggctggaaggaaggcacacactacgttctctagtccatgctggtgtcccagcctcctacctgctgattcctgcagcctcctatgtgctcccagaggtttccaaggtgctattgggagctcatgcactcttggccaacgggtctgtgatgtcacgggtagggacagcacagttagccctggtggctcgagcccataatgtaccagtgctggtttgctgtgaaacatacaagttctgtgagcgtgtgcagactgatgcctttgtctctaatgagctagatgaccctgatgatctgcaatgtaagcggggagaacatgttgcgctggctaactggcagaaccacgcatccctacggttgttgaatctagtctatgatgtgactcccccagagcttgtggatctggtgatcacggagctggggatgatcccttgcagttctgtacctgttgttctacgagtcaagagcagtgaccagtgac

SEQ ID NO: 131113 - DNA, 761 bp, Homo sapiens
  Payload ID: 5603
  Gene Symbol: EIF2B4
  Gene Name: eukaryotic translation initiation factor 2B, subunit 4 delta, 67kDa
  ENST ID: ENST00000417567
  CDS Start-End: 1-584
agcgtctccctgagtaccctcaggttgatgacctacttctgagaaggcttgttaaaaaaccagagcgtcaacaggttcctacacgaaaggattatggatccaaagtcagtctcttctctcacctaccccagtacagcagacaaaactctctgacccagtttatgagcatcccatcctctgtgatccacccagccatggtgcgactcggcctgcagtactcccagggcctggtcagtggctccaatgcccggtgtattgccctgcttcgtgccttgcagcaggtgattcaggattacacaacaccgcctaatgaagaactctccagggatctagtgaataaactaaaaccctacatgagcttcctgactcagtgccgtcccctgtcagcgagcatgcacaacgccatcaagttccttaacaaggaaatcaccagtgtgggcagttccaagcgggaagaggaggcttgtcatcatacacatattcaagcacctggcatgatcatcagagggataaaagtgtccatttcttgttcactaaggattttactccatttaggccaagtcagaacttcgagcagccattgatcgctcatctctggtatcacgaattcttcaggaggcttggacagagggccggcggtttcgggtggtagtggtggacagccggccatggctggaaggaaggcacacactacgttctctagtccatgctggtgtcccagcctcctacctgctgattcctgcagcctcctatgtgctccc

SEQ ID NO: 131114 - DNA, 742 bp, Homo sapiens
  Payload ID: 5603
  Gene Symbol: EIF2B4
  Gene Name: eukaryotic translation initiation factor 2B, subunit 4 delta, 67kDa
  ENST ID: ENST00000418146
  CDS Start-End: 16-54
ctaggactgagggcgatggctgctgtggccgtggctgttcgcgagggtgagtgaagagccgggcctgcctactggtacgcggagccgacgagctccggacagctagtgccgggccttgagcgcctttgggccccgccgctccgttccagcgccacgctgggctccggtctacacagtctcgagcgcagtcccgcgccgcgcaccggctggttgctgtgaggaggactcgggatccgggatgaaggcggagcttccccctgggcctggggcagtggggagggaaatgaccaaagaagaaaagctgcagcttcggaaggaaaagaaacagcagaagaagaaacggaaggaagaaaagggggcagaaccagagactggctctgctgtatctgcagcccaatgtcaagtaggcccaaccagagaactgccagaatcgggcattcagttgggcactcctcgggagaaagttccagctggtcggagtaaggccgaacttcgggctgagcgtcgagccaagcaggaggccgagcgggccctgaaacaggcaagaaaaggggaacaaggaggaccacctcctaaggccagccccagcacagctggagaaaccccctcaggagtgaagcgtctccctgagtaccctcaggttgatgacctacttctgagaaggcttgttaaaaaaccagagcgtcaacaggttcctacacgaaaggattatggatccaaagtcagtctcttctctcaccta

SEQ ID NO: 131115 - DNA, 1949 bp, Homo sapiens
  Payload ID: 5603
  Gene Symbol: EIF2B4
  Gene Name: eukaryotic translation initiation factor 2B, subunit 4 delta, 67kDa
  ENST ID: ENST00000493344
  CDS Start-End: 314-1948
ggactgagggcgatggctgctgtggccgtggctgttcgcgagggtgagtgaagagccgggcctgcctactggtacgcggagccgacgagctccggacagctagtgccgggccttgagcgcctttgggccccgccgctccgttccagcgccacgctgggctccggtctacacagtctcgagcgcagtcccgcgccgcgcaccggctggttgctgtgaggagggtcggtgacccctccattcctttgatccgccgcgcagtgcgtccccacgcggatccctggctcgcctcgcgcctgccggcggatccgtggtcatgccaacccagcagccggctgcgccgagtactcgtgcccccaaaccctcccggagtctctctggctcactttgtgccctgttttctgatgcagactcgggatccgggatgaaggcggagcttccccctgggcctggggcagtggggagggaaatgaccaaagaagaaaagctgcagcttcggaaggaaaagaaacagcagaagaagaaacggaaggaagaaaagggggcagaaccagagactggctctgctgtatctgcagcccaatgtcaagtaggcccaaccagagaactgccagaatcgggcattcagttgggcactcctcgggagaaagttccagctggtcggagtaaggccgaacttcgggctgagcgtcgagccaagcaggaggccgagcgggccctgaaacaggcaagaaaaggggaacaaggaggaccacctcctaaggccagccccagcacagctggagaaaccccctcaggagtgaagcgtctccctgagtaccctcaggttgatgacctacttctgagaaggcttgttaaaaaaccagagcgtcaacaggttcctacacgaaaggattatggatccaaagtcagtctcttctctcacctaccccagtacagcagacaaaactctctgacccagtttatgagcatcccatcctctgtgatccacccagccatggtgcgactcggcctgcagtactcccagggcctggtcagtggctccaatgcccggtgtattgccctgcttcgtgccttgcagcaggtgattcaggattacacaacaccgcctaatgaagaactctccagggatctagtgaataaactaaaaccctacatgagcttcctgactcagtgccgtcccctgtcagcgagcatgcacaacgccatcaagttccttaacaaggaaatcaccagtgtgggcagttccaagcgggaagaggaggccaagtcagaacttcgagcagccattgatcggtatgtgcaagagaagattgtgctagcagctcaggcaatttcacgctttgcttaccagaagatcagtaatggagatgtgatcctggtatatggatgctcatctctggtatcacgaattcttcaggaggcttggacagagggccggcggtttcgggtggtagtggtggacagccggccatggctggaaggaaggcacacactacgttctctagtccatgctggtgtcccagcctcctacctgctgattcctgcagcctcctatgtgctcccagaggtttccaaggtgctattgggagctcatgcactcttggccaacgggtctgtgatgtcacgggtagggacagcacagttagccctggtggctcgagcccataatgtaccagtgctggtttgctgtgaaacatacaagttctgtgagcgtgtgcagactgatgcctttgtctctaatgagctagatgaccctgatgatctgcaatgtaagcggggagaacatgttgcgctggctaactggcagaaccacgcatccctacggttgttgaatctagtctatgatgtgactcccccagagcttgtggatctggtgatcacggagctggggatgatcccttgcagttctgtacctgttgttctacgagtcaagagcagtgaccagtgac

SEQ ID NO: 131116 - DNA, 1754 bp, Homo sapiens
  Payload ID: 5603
  Gene Symbol: EIF2B4
  Gene Name: eukaryotic translation initiation factor 2B, subunit 4 delta, 67kDa
  ENST ID: ENST00000616081
  CDS Start-End: 144-1706
gaaattgtagtccgattggggctgcgcgcttcgcttctgcggctcagcctccagcccaggtggcgctgtggaccctgcagccgcggagcgaggcagcggggcggctccgtgaccacggcgggcggagcctaggactgagggcgatggctgctgtggccgtggctgttcgcgaggactcgggatccgggatgaaggcggagtccccctgggcctgggtggggagggaaatgaccaaagaagaaaagctgcagcttcggaaggaaaagaaacagcagaagaagaaacggaaggaagaaaagggggcagaaccagagactggctctgctgtatctgcagcccaatgtcaaggcccaaccagagaactgccagaatcgggcattcagttgggcactcctcgggagaaagttccagctggtcggagtaaggccgaacttcgggctgagcgtcgagccaagcaggaggccgagcgggccctgaaacaggcaagaaaaggggaacaaggaggaccacctcctaaggccagccccagcacagctggagaaaccccctcaggagtgaagcgtctccctgagtaccctcaggttgatgacctacttctgagaaggcttgttaaaaaaccagagcgtcaacaggttcctacacgaaaggattatggatccaaagtcagtctcttctctcacctaccccagtacagcagacaaaactctctgacccagtttatgagcatcccatcctctgtgatccacccagccatggtgcgactcggcctgcagtactcccagggcctggtcagtggctccaatgcccggtgtattgccctgcttcgtgccttgcagcaggtgattcaggattacacaacaccgcctaatgaagaactctccagggatctagtgaataaactaaaaccctacatgagcttcctgactcagtgccgtcccctgtcagcgagcatgcacaacgccatcaagttccttaacaaggaaatcaccagtgtgggcagttccaagcgggaagaggaggccaagtcagaacttcgagcagccattgatcggtatgtgcaagagaagattgtgctagcagctcaggcaatttcacgctttgcttaccagaagatcagtaatggagatgtgatcctggtatatggatgctcatctctggtatcacgaattcttcaggaggcttggacagagggccggcggtttcgggtggtagtggtggacagccggccatggctggaaggaaggcacacactacgttctctagtccatgctggtgtcccagcctcctacctgctgattcctgcagcctcctatgtgctcccagaggtttccaaggtgctattgggagctcatgcactcttggccaacgggtctgtgatgtcacgggtagggacagcacagttagccctggtggctcgagcccataatgtaccagtgctggtttgctgtgaaacatacaagttctgtgagcgtgtgcagactgatgcctttgtctctaatgagctagatgaccctgatgatctgcaatgtaagcggggagaacatgttgcgctggctaactggcagaaccacgcatccctacggttgttgaatctagtctatgatgtgactcccccagagcttgtggatctggtgatcacggagctggggatgatcccttgcagttctgtacctgttgttctacgagtcaagagcagtgaccagtgacgggggaaacacagggttaataaatgccatactccctaccctcagcaa

SEQ ID NO: 131117 - DNA, 1771 bp, Homo sapiens
  Payload ID: 5603
  Gene Symbol: EIF2B4
  Gene Name: eukaryotic translation initiation factor 2B, subunit 4 delta, 67kDa
  ENST ID: ENST00000622434
  CDS Start-End: 210-896
cgtggctgttcgcgagggtgagtgaagagccgggcctgcctactggtacgcggagccgacgagctccggacagctagtgccgggccttgagcgcctttgggccccgccgctccgttccagcgccacgctgggctccggtctacacagtctcgagcgcagtcccgcgccgcgcaccggctggttgctgtgaggaggactcgggatccgggatgaaggcggagcttccccctgggcctggggcagtggggagggaaatgaccaaagaagaaaagctgcagcttcggaaggaaaagaaacagcagaagaagaaacggaaggaagaaaagggggcagaaccagagactggctctgctgtatctgcagcccaatgtcaagtaggcccaaccagagaactgccagaatcgggcattcagttgggcactcctcgggagaaagttccagctggtcggagtaaggccgaacttcgggctgagcgtcgagccaagcaggaggccgagcgggccctgaaacaggcaagaaaaggggaacaaggaggaccacctcctaaggccagccccagcacagctggagaaaccccctcaggagtgaagcgtctccctgagtaccctcaggttgatgacctacttctgagaaggcttgttaaaaaaccagagcgtcaacaggttcctacacgaaaggattatggatccaaagtcagtctcttctctcacctaccccagtacagcagacaaaactctctgacccagtttatgagcatcccatcctctgtgatccacccagccatggtgcgactcggcctgcagtactcccagggcctggtcagtggctccaatgcccggtgtattgccctgcttcgtgccttgcagcaggtgattcaggattacacaaccgcctaatgaagaactctccagggatctagtgaataaactaaaaccctacatgagcttcctgactcagtgccgtcccctgtcagcgagcatgcacaacgccatcaagttccttaacaaggaaatcaccagtgtgggcagttccaagcgggaagaggaggccaagtcagaacttcgagcagccattgatcggtatgtgcaagagaagattgtgctagcagctcaggcaatttcacgctttgcttaccagaagatcagtaatggagatgtgatcctggtatatggatgctcatctctggtatcacgaattcttcaggaggcttggacagagggccggcggtttcgggtggtagtggtggacagccggccatggctggaaggaaggcacacactacgttctctagtccatgctggtgtcccagcctcctacctgctgattcctgcagcctcctatgtgctcccagaggtttccaaggtgctattgggagctcatgcactcttggccaacgggtctgtgatgtcacgggtagggacagcacagttagccctggtggctcgagcccataatgtaccagtgctggtttgctgtgaaacatacaagttctgtgagcgtgtgcagactgatgcctttgtctctaatgagctagatgaccctgatgatctgcaatgtaagcggggagaacatgttgcgctggctaactggcagaaccacgcatccctacggttgttgaatctagtctatgatgtgactcccccagagcttgtggatctggtgatcacggagctggggatgatcccttgcagttctgtacctgttgttctacgagtcaagagcagtgaccagtgacgggggaaacacagggttaataaatgccatactccct

SEQ ID NO: 131118 - DNA, 2655 bp, Homo sapiens
  Payload ID: 5604
  Gene Symbol: EIF2B5
  Gene Name: eukaryotic translation initiation factor 2B, subunit 5 epsilon, 82kDa
  Uniprot ID: Q13144
  ENST ID: ENST00000273783
  CDS Start-End: 123-2288
tccctcctcgtctccttcccttcgttaattagtccatcgcatttcaagtgctggatcctttttgtcccctactgcgtgcggtggcagcttccttgcggaagtggtgaccgtgagagaagaagatggcggcccctgtagtggcgccgcctggtgtggtggttagtcgggctaacaagcgcagcggcgcggggccgggaggcagcggtggcgggggagccagaggggcggaggaggaaccgccgccgcccctacaagcagttctggtggccgatagcttcgatcgccgcttcttccccatctccaaggaccagcctcgggtcctcttgcccctggccaatgtggcattaattgactacactctggaattcctgactgccacaggtgtacaggaaacatttgtcttttgttgctggaaagctgctcaaatcaaagaacatttactgaagtcaaagtggtgccgccctacatctctcaatgtggttcgaataattacatcagagctctatcgatcactgggagatgtcctccgtgatgttgatgccaaggctttggtgcgctctgactttcttctggtgtatggggatgtcatctcaaacatcaatatcaccagagcccttgaggaacacaggttgagacggaagctagaaaaaaatgtttctgtgatgacgatgatcttcaaggagtcatcccccagccacccaactcgttgccacgaagacaatgtggtagtggctgtggatagtaccacaaacagggttctccattttcagaagacccagggtctccggcgttttgcatttcctctgagcctgtttcagggcagtagtgatggagtggaggttcgatatgatttactggattgtcatatcagcatctgttctcctcaggtggcacaactctttacagacaactttgactaccaaactcgagatgactttgtgcgaggtctcttagtgaatgaggagatcctagggaaccagatccacatgcacgtaacagctaaggaatatggtgcccgtgtctccaacctacacatgtactcagctgtctgtgctgacgtcatccgccgatgggtctaccctctcaccccagaggcgaacttcactgacagcaccacccagagctgcactcattcccggcacaacatctaccgagggcctgaggtcagcctgggccatggcagcatcctagaggaaaatgtgctcctgggctctggcactgtcattggcagcaattgctttatcaccaacagtgtcattggccccggctgccacattggtgataacgtggtgctggaccagacctacctgtggcagggtgttcgagtggcggctggagcacagatccatcagtctctgctttgtgacaatgctgaggtcaaggaacgagtgacactgaaaccacgctctgtcctcacttcccaggtggtcgtgggcccaaatatcacgctgcctgagggctcggtgatctctttgcaccctccagatgcagaggaagatgaagatgatggcgagttcagtgatgattctggggctgaccaagaaaaggacaaagtgaagatgaaaggttacaatccagcagaagtaggagctgctggcaagggctacctctggaaagctgcaggcatgaacatggaggaagaggaggaactgcagcagaatctgtggggactcaagatcaacatggaagaagagagtgaaagtgaaagtgagcaaagtatggattctgaggagccggacagccggggaggctcccctcagatggatgacatcaaagtgttccagaatgaagttttaggaacactacagcggggcaaagaggagaacatttcttgtgacaatctcgtcctggaaatcaactctctcaagtatgcctataacataagtctaaaggaggtgatgcaggtactgagccacgtggtcctggagttccccctgcaacagatggattccccgcttgactcaagccgctactgtgccctgctgcttcctctgctaaaggcctggagccctgtttttaggaactacataaagcgcgcagccgaccatttggaagcgttagcagccattgaggacttcttcctagagcatgaagctcttggtatttccatggccaaggtactgatggctttctaccagctggagatcctggctgaggaaacaattctgagctggttcagccaaagagatacaactgacaagggccagcagttgcgcaagaatcaacagctgcagaggttcatccagtggctaaaagaggcagaagaggagtcatctgaagatgactgaagtcacactgcctgctcctttgggtgtgattgagtgccctcctggctcctgggctgggacaagtgaggaactagctgcagagggatgagtgaccaccatccaggctgagactgaaaggagcagaggctggaactacagtattctttcccctgctagcaaccatgtgcctcccatcctgactgtggagttgggatgtggaagtggggctggaacaaagcttctgcctagggaggagctaagcaggcccggcagttggaggaaggccagaggaacagctttgtgctccggctttccctcagggaacagcagagagcagttggctctttctgctgcttgtatatgttaatattaaaagagagagtggtgt

SEQ ID NO: 131119 - DNA, 597 bp, Homo sapiens
  Payload ID: 5604
  Gene Symbol: EIF2B5
  Gene Name: eukaryotic translation initiation factor 2B, subunit 5 epsilon, 82kDa
  ENST ID: ENST00000432982
  CDS Start-End: 1-277
agtggcgccgcctggtgtggtggttagtcgggctaacaagcgcagcggcgcggggccgggaggcagcggtggcgggggagccagaggggcggaggaggaaccgccgccgcccctacaagcagttctggtggccgatagcttcgatcgccgcttcttccccatctccaaggaccagcctcgggtcctcttgcccctggccaatgtggcattaattgactacactctggaattcctgactgccacaggtggtcgtgggcccaaatatcacgctgcctgagggctcggtgatctctttgcaccctccagatgcagaggaagatgaagatgatggcgagttcagtgatgattctggggctgaccaagaaaaggacaaagtgaagatgaaaggttacaatccagcagaagtaggagctgctggcaagggctacctctggaaagctgcaggcatgaacatggaggaagaggaggaactgcagcagaatctgtggggactcaagatcaacatggaagaagagagtgaaagtgaaagtgagcaaagtatggattctgaggagccggacagccggggaggctcccctcagatggatgacatcaaag

SEQ ID NO: 131120 - DNA, 2389 bp, Homo sapiens
  Payload ID: 5604
  Gene Symbol: EIF2B5
  Gene Name: eukaryotic translation initiation factor 2B, subunit 5 epsilon, 82kDa
  ENST ID: ENST00000444495
  CDS Start-End: 11-2128
agagaagaagatggcggcccctgtagtggcgccgcctggtgtggtggttagtcgggctaacaagcgcagcggcgcggggccgggaggcagcggtggcgggggagccagaggggcggaggaggaaccgccgccgcccctacaagcagttctggtggccgatagcttcgatcgccgcttcttccccatctccaaggaccagcctcgggtcctcttgcccctggccaatgtggcattaattgactacactctggaattcctgactgccacaggtgtacaggaaacatttgtcttttgttgctggaaagctgctcaaatcaaagaacatttactgaagtcaaagtggtgccgccctacatctctcaatgtggttcgaataattacatcagagctctatcgatcactgggagatgtcctccgtgatgttgatgccaaggctttggtgcgctctgactttcttctggtgtatggggatgtcatctcaaacatcaatatcaccagagcccttgaggaacacaggttgagacggaagctagaaaaaaatgtttctgtgatgacgatgatcttcaaggagtcatcccccagccacccaactcgttgccacgaagacaatgtggtagtggctgtggatagtaccacaaacagggttctccattttcagaagacccagggtctccggcgttttgcatttcctctgagcctgtttcagggcagtagtgatggagtggaggttcgatatgatttactggattgtcatatcagcatctgttctcctcaggtggcacaactctttacagacaactttgactaccaaactcgagatgactttgtgcgaggtctcttagtgaatgaggagatcctagggaaccagatccacatgcacgtaacagctaaggaatatggtgcccgtgtctccaacctacacatgtactcagctgtctgtgctgacgtcatccgccgatgggtctaccctctcaccccagaggcgaacttcactgacagcaccacccagagctgcactcattcccggcacaacatctaccgagggcctgaggtcagcctgggccatggcagcatcctagaggaaaatgtgctcctgggctctggcactgtcattggcagcaattgctttatcaccaacagtgtcattggccccggctgccacattggtgataacgtggtgctggaccagacctacctgtggcagggtgttcgagtggcggctggagcacagatccatcagtctctgctttgtgacaatgctgaggtcaaggaacgagtgacactgaaaccacgctctgtcctcacttcccaggtggtcgtgggcccaaatatcacgctgcctgagggctcggtgatctctttgcaccctccagatgcagaggaagatgaagatgatggcgagttcagtgatgattctggggctgaccaagaaaaggacaaagtgaagatgaaaggttacaatccagcagaagtaggagctgctggcaagggctacctctggaaagctgcaggcatgaacatggaggaagaggaggaactgcagcagaatctgtggggactcaagatcaacatggaagaagagagtgaaagtgaaagtgagcaaagtatggattctgaggagccggacagccggggaggctcccctcagatggatgacatcaaagtgttccagaatgaagttttaggaacactacagcggggcaaagaggagaacatttcttgtgacaatctcgtcctggaaatcaactctctcaagtatgcctataacataagtctaaaggaggtgatgcaggtactgagccacgtggtcctggagttccccctgcaacagatggattccccgcttgactcaagccgctactgtgccctgctgcttcctctgctaaaggcctggagccctgtttttaggaactacataaagcgcgcagccgaccatttggaagcgttagcagccattgaggacttcttcctagagcatgaagctcttggtatttccatggccaaggtactgatggctttctaccagctggagatcctggctgaggaaacaattctgagctggttcagccaaagagatacaactgacaagggccagcagttgcgcaagaatcaacaggtggtgtgttaaaggcttgactaaacgggattcagtttttctacttttgtaagacttcaaatacaaatgttcttaagtcagaggtgcctccacccacatgatggactcacctgcagccattcagaaggaggacgggcaaaccgcacagtggcacggaaagacaaggatgatggccgcgaagtgggggcagcatccgatccacattctaaaagtagcataatcaccattactaaacactaaaaaaaggaaaataaagaggtaggagagcggggg

SEQ ID NO: 131121 - DNA, 984 bp, Homo sapiens
  Payload ID: 5604
  Gene Symbol: EIF2B5
  Gene Name: eukaryotic translation initiation factor 2B, subunit 5 epsilon, 82kDa
  ENST ID: ENST00000432569
  CDS Start-End: 22-345
tggtgaccgtgagagaagaagatggcggcccctgtagtggcgccgcctggtgtggtggttagtcgggctaacaagcgcagcggcgcggggccgggaggcagcggtggcgggggagccagaggggcggaggaggaaccgccgccgcccctacaagcagttctggtggccgatagcttcgatcgccgcttcttccccatctccaaggaccagcctcgggtcctcttgcccctggccaatgtggcattaattgactacactctggaattcctgactgccacaggtgtacaggaaacatttgtcttttgttgctggaaagctgctcaaatcaaagaacatttactgtaaggccctgcaacttttctttccatgtttcgccatctttttccagttttttcaggatgaatgtaactaaggggaaatgtgagaggggaaaaatgtgtctacttagatgtcattgtaagttctaagggtattttctacacttatcaggaggtgagcagctgaaactttgtatctgtctgtcttgggttttctgtgacaaagattaaagaataaacttgggttttttctgaatctcattataaagtttggtgccagtggactttgcttttatttaatggcttcagtatggaagttacaatgataacatctttgttttcccactgagtttctaaatcttgtttgttctcaccttcaaggatataaatgagctccttgtcatctttgtattcccactgcctagctcagtcccaagcatatagtgagcacttacatgtttgttgaaatcttgaaaactagggaatcgcattgcttatggaagtccaggatgtaaagactaggacattagcatggtctccatcagacagttcctaaatgttatatggattgcagaaggggaaagctgacgtgaagcgtgttcccaggctactttgtgtaccctaggcttcagcaggattttgagttcaaattgatgtttagggacaa

SEQ ID NO: 131122 - DNA, 2005 bp, Homo sapiens
  Payload ID: 5605
  Gene Symbol: EIF2D
  Gene Name: eukaryotic translation initiation factor 2D
  Uniprot ID: P41214
  ENST ID: ENST00000271764
  CDS Start-End: 118-1872
cgcggccgggccccagcatggctgcccccacggctgagggcctggcagctgctgcgccctcgctttcttgacattccctggcttctgtgctctcttccccaggccaccccagcagacatgtttgccaaggcctttcgggtcaagtccaacacggccatcaaggggtcggacaggagaaagcttcgagctgatgtgacaactgctttccccacccttggaactgatcaagtctctgagttagtacctggaaaggaggagctcaacattgtgaagttgtatgctcacaaaggggatgcagtgactgtgtacgtgagtggtggtaaccccatcctctttgaactggagaaaaatctgtatccaacagtgtacacgctgtggtcctatcctgatcttctgccaacctttacaacatggcctctggtgctcgagaaactggtagggggagcagatttgatgctgcctggactggtgatgccccctgctggtctgcctcaggtacagaagggcgacctctgtgccatttctttggtggggaacagagcccctgtagccattggagttgcagccatgtccacagctgagatgctcacgtcaggcctgaagggaaggggcttctctgtgctccacacttaccaggaccacttgtggcggtctggaaacaagtcctctccaccttccattgctccactggccctggattcagcagatctcagtgaagagaaggggtctgtccagatggactccaccctgcagggagacatgaggcacatgaccctggagggggaagaggagaatggggaggttcaccaggcacgtgaagacaagtctctctcagaagccccagaagacaccagcaccaggggcctgaaccaagactccacagatagcaaaacgcttcaagaacaaatggatgagctgttacagcaatgcttcttacatgccttgaagtgccgagtcaaaaaggctgacctccctttactcaccagcactttccttggcagccacatgttctcctgctgccccgaaggacgacaactggacataaagaagtcaagctacaaaaagctctctaagttcctgcagcaaatgcagcaggagcagattatacaggtgaaggagctgagcaaaggggtggagagcattgtggctgtggactggaaacacccgaggattacatctttcgtcatacccgagccctccccgacctcccagactatccaggagggtagcagggaacagccctatcaccctccagatataaaacccctctactgtgtcccagccagcatgaccctgctcttccaggagtctggccacaagaaggggagctttctggagggcagtgaggtccgaacgatcgtcattaactacgccaagaaaaatgacctggttgatgcagacaacaaaaatcttgtgagattggatcccatcctatgtgactgcatcttagagaaaaatgaacagcatacagtcatgaagcttccatgggacagtcttctgaccaggtgtttggaaaaattacagcctgcctatcaagtgacccttcccggacaagagcccattgtgaagaaagggagaatctgtccaattgacatcaccctagcacaaagagcgtctaataaaaaggtgaccgtggtccggaacttggaggcctatggtctggacccatactcagtggctgccatccttcagcagcgatgccaggctagcaccaccgtcaatcctgcccctggggccaaggacagccttcaggtgcagatccagggaaaccaggtccaccacctcggctggctattgcttgaagagtatcagctccctcgaaaacacatccaaggtctagaaaaggccctcaaacctggcaagaagaagtgacagactcttttgtctcacgtggtggatccggtggaaatccaagctctgggctggtaatttttatgagcattttcagcttttgcaaatacaaaatataattctttacaaaaataaatttttattctaatctaaa

SEQ ID NO: 131123 - DNA, 1633 bp, Homo sapiens
  Payload ID: 5605
  Gene Symbol: EIF2D
  Gene Name: eukaryotic translation initiation factor 2D
  Uniprot ID: P41214
  ENST ID: ENST00000367114
  CDS Start-End: 118-1500
cgcggccgggccccagcatggctgcccccacggctgagggcctggcagctgctgcgccctcgctttcttgacattccctggcttctgtgctctcttccccaggccaccccagcagacatgtttgccaaggcctttcgggtcaagtccaacacggccatcaaggggtcggacaggagaaagcttcgagctgatgtgacaactgctttccccacccttggaactgatcaagtctctgagttagtacctggaaaggaggagctcaacattgtgaagttgtatgctcacaaaggggatgcagtgactgtgtacgtgagtggtggtaaccccatcctctttgaactggagaaaaatctgtatccaacagtgtacacgctgtggtcctatcctgatcttctgccaacctttacaacatggcctctggtgctcgagaaactggtagggggagcagatttgatgctgcctggactggtgatgccccctgctggtctgcctcaggtacagaagggcgacctctgtgccatttctttggtggggaacagagcccctgtagccattggagttgcagccatgtccacagctgagatgctcacgtcaggcctgaagggaaggggcttctctgtgctccacacttaccaggaccacttgtgccccgaaggacgacaactggacataaagaagtcaagctacaaaaagctctctaagttcctgcagcaaatgcagcaggagcagattatacaggtgaaggagctgagcaaaggggtggagagcattgtggctgtggactggaaacacccgaggattacatctttcgtcatacccgagccctccccgacctcccagactatccaggagggtagcagggaacagccctatcaccctccagatataaaacccctctactgtgtcccagccagcatgaccctgctcttccaggagtctggccacaagaaggggagctttctggagggcagtgaggtccgaacgatcgtcattaactacgccaagaaaaatgacctggttgatgcagacaacaaaaatcttgtgagattggatcccatcctatgtgactgcatcttagagaaaaatgaacagcatacagtcatgaagcttccatgggacagtcttctgaccaggtgtttggaaaaattacagcctgcctatcaagtgacccttcccggacaagagcccattgtgaagaaagggagaatctgtccaattgacatcaccctagcacaaagagcgtctaataaaaaggtgaccgtggtccggaacttggaggcctatggtctggacccatactcagtggctgccatccttcagcagcgatgccaggctagcaccaccgtcaatcctgcccctggggccaaggacagccttcaggtgcagatccagggaaaccaggtccaccacctcggctggctattgcttgaagagtatcagctccctcgaaaacacatccaaggtctagaaaaggccctcaaacctggcaagaagaagtgacagactcttttgtctcacgtggtggatccggtggaaatccaagctctgggctggtaatttttatgagcattttcagcttttgcaaatacaaaatataattctttacaaaaataaatttttattctaatctaaa

SEQ ID NO: 131124 - DNA, 920 bp, Homo sapiens
  Payload ID: 5605
  Gene Symbol: EIF2D
  Gene Name: eukaryotic translation initiation factor 2D
  ENST ID: ENST00000437518
  CDS Start-End: 109-920
gccccagcatggctgcccccacggctgagggcctggcagctgctgcgccctcgctttcttgacattccctggcttctgtgctctcttccccaggccaccccagcagacatgtttgccaaggcctttcgggtcaagtccaacacggccatcaaggggtcggacaggagaaagcttcgagctgatgtgacaactgctttccccacccttggaactgatcaagtctctgagttagtacctggaaaggaggagctcaacattgtgaagttgtatgctcacaaaggggatgcagtgactgtgtacgtgagtggtggtaaccccatcctctttgaactggagaaaaatctgtatccaacagatttgatgctgcctggactggtgatgccccctgctggtctgcctcaggtacagaagggcgacctctgtgccatttctttggtggggaacagagcccctgtagccattggagttgcagccatgtccacagctgagatgctcacgtcaggcctgaagggaaggggcttctctgtgctccacacttaccaggaccacttgtggcggtctggaaacaagtcctctccaccttccattgctccactggccctggattcagcagatctcagtgaagagaaggggtctgtccagatggactccaccctgcagggagacatgaggcacatgaccctggagggggaagaggagaatggggaggttcaccaggcacgtgaagacaagtctctctcagaagccccagaagacaccagcaccaggggcctgaaccaagactccacagatagcaaaacgcttcaagaacaaatggatgagctgttacagcaatgcttcttacatgccttgaagtgccgagtcaaaaaggctgacctccctttactcaccagcactttccttggcagccacatgttctc

SEQ ID NO: 131125 - DNA, 479 bp, Homo sapiens
  Payload ID: 5605
  Gene Symbol: EIF2D
  Gene Name: eukaryotic translation initiation factor 2D
  ENST ID: ENST00000484492
  CDS Start-End: 1-199
gcttcaagaacaaatggatgagctgttacagcaatgcttcttacatgccttgaagtgccgagtcaaaaaggctgacctccctttactcaccagcactttccttggcagccacatgttctcctgctgccccgaaggacgacaactggacataaagaagtcaagctacaaaaaggaaggggagctttctggagggcagtgaggtccgaacgatcgtcattaactacgccaagaaaaatgacctggttgatgcagacaacaaaaatcttgtgagattggatcccatcctatgtgactgcatcttagagaaaaatgaacagcatacagtcatgaagcttccatgggacagtcttctgaccaggtgtttggaaaaattacagcctgcctatcaagtgacccttcccggacaagagcccattgtgaagaaagggagaatctgtccaattgacatcaccctagcacaaagagcgtctaataaaaag

SEQ ID NO: 131126 - DNA, 750 bp, Homo sapiens
  Payload ID: 5605
  Gene Symbol: EIF2D
  Gene Name: eukaryotic translation initiation factor 2D
  ENST ID: ENST00000472709
  CDS Start-End: 1-189
gacagtcttctgaccaggtgtttggaaaaattacagcctgcctatcaagtgacccttcccggacaagagcccattgtgaagaaagggagaatctgtccaattgacatcaccctagcacaaagagcgtctaataaaaagataacaaaactgaggctgagtttaagaaacatgcctgtggtcccctgctagtaagaagctaagtaggaactggaatcaaatccatctaaggcccatgctcttctcaattcaccatgtagccaccatgggacggcatcttttgctgaaggggccggcctgccacacccataatgatcactgaaactctgtgctgcggggctgggatgagcagctgttaaaccaaagcctgtctctggaactgaaccttgattctgttgcagaccacccaagggcaagcagctctggccatctcccacttgccggagaaattaaaacgtttttgtggacctctaaagtcgtgtgtgcctgtggcacgatgcctgctgtgcctcatggagaagtgaccatactttccagctgttcagtcccagaccaccctgaaccagagtactgcagagttaattaaggatggacggtgggtaggtgagtgagtggatcccaataccccatcccaggccaactctctcctaagctctctcagttctttcaggccaatttagagagtattcctttgcaaatgatatatgccataagggattgatatgcagaatatataaactaccacaatacaaa

SEQ ID NO: 131127 - DNA, 437 bp, Homo sapiens
  Payload ID: 5605
  Gene Symbol: EIF2D
  Gene Name: eukaryotic translation initiation factor 2D
  ENST ID: ENST00000613435
  CDS Start-End: 1-220
ggtgctcgagaaactggtagggggagcagatttgatgctgcctggactggtgatgccccctgctggtctgcctcagccccgaaggacgacaactggacataaagaagtcaagctacaaaaaggaaggggagctttctggagggcagtgaggtccgaacgatcgtcattaactacgccaagaaaaatgacctggttgatgcagacaacaaaaatcttgtgagattggatcccatcctatgtgactgcatcttagagaaaaatgaacagcatacagtcatgaagcttccatgggacagtcttctgaccaggtgtttggaaaaattacagcctgcctatcaagtgacccttcccggacaagagcccattgtgaagaaagggagaatctgtccaattgacatcaccctagcacaaagagcgtctaataaaaaggtaatttt

SEQ ID NO: 131128 - DNA, 7540 bp, Homo sapiens
  Payload ID: 5606
  Gene Symbol: EIF3F
  Gene Name: Eukaryotic translation initiation factor 3 subunit F
  ENST ID: ENST00000626223
  CDS Start-End: 627-1700
aaatcgcttctgggtgcagccacaggagtggggttgttggtccaggtggagccatggttgagggaaaaactaaaacatgacagagtttattcatcaatgggaacttttatatactgttagaaggcatgtaaattggaacagcctctttggaaaacaagtctgcattatcttcctcgagcttctgggctcaaacgatccttccgcctcggtctcccgaagtgctgagattacaggcgtgagccaccgcgcctggccttaaaatcctttttaaaggcactttgacatccattatctcatttaagtctaaaacacgaatttcgacctccgcgctgctttctggttccacctggcggcagctgcacaaagtgtttctcttcgaacgccgtcccaagttttacccggaactacttagcccagggtttcctgagtgctcctcgggccaaaagcagagcgcacaaattccagaagaaattaccaacggcgggactatttcagtgctccgagaagtatcaccagtaaccaatcagcaaaaagctctagctcacgtggtgtatattcagcctatcaagctcctgatattcatgaatgctgtcatttccgcttccgcctccttctttctcgacaagatggccacaccggcggtaccagtaagtgctcctccggccacgccaaccccagtcccggcggcggccccagcctcagttccagcgccaacgccagcaccggctgcggctccggttcccgctgcggctccagcctcatcctcagaccctgcggcagcagcggctgcaactgcggctcctggccagaccccggcctcagcgcaagctccagcgcagaccccagcgcccgctctgcctggtcctgctcttccagggcccttccccggcggccgcgtggtcaggctgcacccagtcattttggcctccattgtggacagctacgagagacgcaacgagggtgctgcccgagttatcgggaccctgttgggaactgtcgacaaacactcagtggaggtcaccaattgcttttcagtgccgcacaatgagtcagaagatgaagtggctgttgacatggaatttgctaagaatatgtatgaactgcataaaaaagtttctccaaatgagctcatcctgggctggtacgctacgggccatgacatcacagagcactctgtgctgatccacgagtactacagccgagaggcccccaaccccatccacctcactgtggacacaagtctccagaacggccgcatgagcatcaaagcctacgtcagcactttaatgggagtccctgggaggaccatgggagtgatgttcacgcctctgacagtgaaatacgcgtactacgacactgaacgcatcggagttgacctgatcatgaagacctgctttagccccaacagagtgattggactctcaagtgacttgcagcaagtaggaggggcatcagctcgcatccaggatgccctgagtacagtgttgcaatatgcagaggatgtactgtctggaaaggtgtcagctgacaatactgtgggccgcttcctgatgagcctggttaaccaagtaccgaaaatagttcccgatgactttgagaccatgctcaacagcaacatcaatgaccttttgatggtgacctacctggccaacctcacacagtcacagattgcactcaatgaaaaacttgtaaacctgtgaatggaccccaagcagtacacttgctggtctaggtattaaccccaggactcagaagtgaaggagaaatgggttttttgtggtcttgagtcacactgagatagtcagttgtgtgtgactctaataaacggagcctaccttttgtaaattaatttcatcttatgtgagtttattgccgggtggaagggaggaaaatgttttagatcacacagaaactaggaagtgaatattgtaggtagagaagttggttatgtgtttggcatgttactgttttaccaaactgttcttttggttttcaatatggaaaggtgtccattggcaaaacaaccttttcttgaggattcatgtgatttctacaggaaatgaaaataagaatccatggagaaaaaatagctaagaaaattggatgcttaatctgaactaaaagagtagagtgtgtagtcactatcttaaaatacattaatagtaagatggagctctttgccactttggttcggggaggcagaattaagatctgtgggttaaagattaaagaggtttccccaaaacttcagaaaattcttaggtgctatctgtaactcgaggatagagccttgagttatactgaggtctgccagtggctcaatttaagcaaagactagatggcatttcccagaggccttgtaggctagagtacttgcctgtgtaacttcagacatccatttcctctggtatcctggagttccgcctcgccactgtgtgtcttagaaataagtcattattcaagaactcaggaaattatacgttggagtgaaaaggtgagtgaaggcaatggggaatcaaaaaggcctggatcctagttctgaggtatgtgtagccttaggaaagataaattataagagtcataagatatggatcataaacatacatagtccattagggtattatgaggattccatgaattaataaatgtcaggttaatcaacacttgtggagaatatcacctggtatgtagtaagcacagataagtggtagatactatgatgcctaaaggtgaatagtttgaaagtaataagcaacatgaaccccagcctggaactcagttctgagatatgtacctcaggaaatataagttatgggagtcataaagtgtggatagtaatgatagataatttcttacaggtagggaaatgtaaacagatcttatcggcaaaatgataatgacaggccaaattgttaaaggtaggttaaaagtagacagcatggtgggaaggttaatcagagtcaaaatgtttcagtgttcttacatttttgggagtagccagttaatatcaacttagtctttttaagtatgcatgataaaattccgaggttaattgctagaagtatatataatctctcaatgaatagtgatgagagatggtgggataatagggaagaaacaaaattttaaatttgagaaataagcatagaaaaggtggataaaacaaaagatggcaaaacaagtccaaatagatcagtaattacaataaatgtataagtattaaactagcccaaggaaaaattgaatattaaaacaaaccccaatcatatgctgtttacaggagacacatctaaaacaaggacataaagttgtcctgcagctgtgagtaacaatataggtgaatgttaataataatgttgaatgaaaaaagctggtgtcagaagacatgtacattatgatactccagaagttcaaaaacaagtgaaacttgtttagacatgcggttggctgtctgtatatgtgggttccacatctatggactcaaccaactacaggttgaaaatattgagggggaaaattgtgtctggactaaacctgtacagacatttttccttgtcatttttccctaaacaatacaaagtattagatggtgtttatactgtattcggtattataagtaatctagagatgacttaaaagtatatgagaaggtatgcacaggttatatccaaatacttcatattagggacttgagcatcagaggatttttatatccaaggaaggttctggaaccaatcctccacggatactaaacggtgactgtgtgtgtatatatatatgtatagtctgttctcattatctatagtagttatgttttataaagtcaccatgaacactgaattagagagtactgaaccattattcccaagggaaatacagggttgggttcctatgaacctctgggcacagtttcatcaacccatcagtacataaacttgttacatgtgtttctgtttgaagacaccttagtatatatggttgacccattaacactgaacttagcccacgacacttattcctgaatgaagcttacctcagtttctccaggcggcacatcacagtcttcttgcacttaggaacacttggcactgtgcgtgggggtcactttaagcagcaaaatccacaaaaatgcaaaagacatggcactaaatagactgaaaaggatacttgtttataagaactgaaacaagaaggccttgttccacctcagctgggaacatggagagcaggcaattcaaattttttcacatgctgcatgtccgcaaatggctgcaaaagcccagcaagtactgatactggagttagaaataaattttagcaagaggtaaattcacacatacggagtctgcaaaaaatgagaattgactattatgtgtgtgtatattatatatatgataaaaaacaaaagaatgataaaaattcccaataatgtttactttggtggtgagaagaggatggcaagtaaaataagtctgtattgttatcagcaattatctagtttgaggttggacagtggtttcatcataggtattgattatattataaatagcccaacctgaactcatgaccatagtgtggtgttattacttagcgttattctagacttattagccattgtatttaaacaagaggaaatagagacattgaagataaagtggagccaggcacagtggctcatgcctgtaatcccagcactttggcaggctgagatgggttaatcaagaccagaagttcaagaccagcgtggccaacatggcaaaaccccgtctctactaaaaaaaaacaaaaaatacaaaaattagccaggcgtggtggcacgcacctgtagtcccagctacttgggaagctgaggcaggagaatctcgaacccaggaggtaggggttgcagtgagctgagatcgcaccactgcaccccagcctgggtgacagcaagatcctttctcaagaaaaaaagtgaaaaggaggagggtttttaaaaaattagtactacccagttgatacggtggaagaaaacttgaaaatgctaatgagaaacatgagatgtaatcacttgaaggcatatcatgttcttgaataagaagactcaacattattttaacaggtgttaattttccctgttaaactacatatttgtcataattacaataaaatacaaagagctattttggaactgggcaagctgtttctaaatgtatatggaaaaataaaaatgtctccaaaaaatccctgcagagggaaactagcccttccagatataaaatatattatagaactgtgtaattaaagcaatatggtactggtccataaaagaacataaaaccaaatagttcagtagactcaaaatgcaagcgttggtgagggtatggagaaaagggaacccttttacacttggtgtgaatgtaaattagtacagacattgtggaaaacagtttgtagagcttcctcaataaaaacacatatgatccagcaatcccactactgggtatatatccaaaggaaatgaaatcagtatgttgaagagatacttccacgttcactgaagcattgttcacaatcgccaagacatcaacctaagtgtccatcaacagaagatagatagggctgagcgcggtggcccacgcctgtaatcccagcactttgggaggccaaggcaggtggatcatttgaggtcagaagttcttgaccagcctggccaacatgatgaaaccccgtctctacaaaagatacaaaaattagccaggcatcttggagggcgcctgtaatcccacctactcgggctgaagtgagaatggcttgaacccaggaagtggagatttcagtgagctgagattccgccactgcagtccagcctgagcgacaagagtgagaagagtgagacttcatctcaaaaaaaaaaaaggtacatctacacaatggaatattattaaccttaaaagaaggaaataactgatttacaacaacatggatggacctggaggacactatgctagtgaaataagccatgatctcacttggatatggaatcacaaaattgaactcacaagcagagtgtagaaaggtggtttcatggactggagggaggggataaatggggagatgttggtcaagggtacaaagtttcagttaaacaggagtagtacgttccggagacctgttgtgcagcagggtgactagttaatgtatacttgaaaattgctaggagtagatctcaccaggagaaatgaatatgtgaggtgatggatgtaactagcttgattgtggtaatcaatttcgcaatgtgtacatatatcaaaacatcacattgtacaaaatacatacagtttttgtcaatttaaagatatcagaattctagaatatgataaagttgtgttttcaagcaagtaaagatagattacttaagagcgaatgagtggtaatttggaaacaatgttggattcctacttcgttacctgcaccaaaataagttgctcatggaataaaaacttgtctgaaaaaaaaaccataaatatgagggaaaaaacacagcaatgtgtttttaatgatttatgagtgaggaagaactttctaagaactgagaatccaggagttattttaaaagactgacaaatttagcaacatttttaaaatctgagtgtcaaattacacacatacacaaatagtcaatacaaatataaaactgggaaaatatttgcagttcatatcaaaaaaagggctaatattcttgtcccagaattcctacagttttttaaggccagtaatttgatacattagtgtgtaaaggatatgaccagacagctcacacacagacacacaaatgtgaaaagatgcttgatctcactgataaagcataaattaaaacgatgtcatttttaaaaatcagattcgcaaattttaaaagttgctaacactggaatggccagagtaagaggaaacgtgacacaggcacagattgctggtagacatataagttggtacagccctctctatgtaattttgtgtttgtcaaaattacaaatatgcatgcccttaacccaggaattccactcctcattatatatcctacaaataaactggtctcgttatgacacaatgtaatgaatacatagataagtactgaaatacttggttatcatagcgtaaagatggtaatcaacccaaatgactattaccagaatagaaattaaacaaagtatgatatatccataaaacacaatactatgcagctgttaagcagaatgagacagtcctctatatatcaatatggataaagagtaagtgaaaaaagccaggagagaatgttgtctataatatgctgttgttgtgtacgggaaaataaataatataaatacctagaatatttgtgaaggtacagccaagaaactactatcactgattgtcttaaggtactagatggggcacaggacaggacgaaagatttacttcttattgtttcttctgtataacttttgaattttatgctgttaatgtaatttttcaaaaaaatatataaaaatataaaaacatgaaaaacatgaaacaa

SEQ ID NO: 131129 - DNA, 1254 bp, Homo sapiens
  Payload ID: 5606
  Gene Symbol: EIF3F
  Gene Name: Eukaryotic translation initiation factor 3 subunit F
  ENST ID: ENST00000628056
  CDS Start-End: 34-1107
atttccgcttccgcctccttctttctcgacaagatggccacaccggcggtaccagtaagtgctcctccggccacgccaaccccagtcccggcggcggccccagcctcagttccagcgccaacgccagcaccggctgcggctccggttcccgctgcggctccagcctcatcctcagaccctgcggcagcagcggctgcaactgcggctcctggccagaccccggcctcagcgcaagctccagcgcagaccccagcgcccgctctgcctggtcctgctcttccagggcccttccccggcggccgcgtggtcaggctgcacccagtcattttggcctccattgtggacagctacgagagacgcaacgagggtgctgcccgagttatcgggaccctgttgggaactgtcgacaaacactcagtggaggtcaccaattgcttttcagtgccgcacaatgagtcagaagatgaagtggctgttgacatggaatttgctaagaatatgtatgaactgcataaaaaagtttctccaaatgagctcatcctgggctggtacgctacgggccatgacatcacagagcactctgtgctgatccacgagtactacagccgagaggcccccaaccccatccacctcactgtggacacaagtctccagaacggccgcatgagcatcaaagcctacgtcagcactttaatgggagtccctgggaggaccatgggagtgatgttcacgcctctgacagtgaaatacgcgtactacgacactgaacgcatcggagttgacctgatcatgaagacctgctttagccccaacagagtgattggactctcaagtgacttgcagcaagtaggaggggcatcagctcgcatccaggatgccctgagtacagtgttgcaatatgcagaggatgtactgtctggaaaggtgtcagctgacaatactgtgggccgcttcctgatgagcctggttaaccaagtaccgaaaatagttcccgatgactttgagaccatgctcaacagcaacatcaatgaccttttgatggtgacctacctggccaacctcacacagtcacagattgcactcaatgaaaaacttgtaaacctgtgaatggaccccaagcagtacacttgctggtctaggtattaaccccaggactcagaagtgaaggagaaatgggttttttgtggtcttgagtcacactgagatagtcagttgtgtgtgactctaataaacggagcctaccttttgtaaatt

SEQ ID NO: 131130 - DNA, 1072 bp, Homo sapiens
  Payload ID: 5606
  Gene Symbol: EIF3F
  Gene Name: Eukaryotic translation initiation factor 3 subunit F
  ENST ID: ENST00000630137
  CDS Start-End: 17-391
cttctttctcgacaagatggccacaccggcggtaccagtaagtgctcctccggccacgccaaccccagtcccggcggcggccccagcctcagttccagcgccaacgccagcaccggctgcggctccggttcccgctgcggctccagcctcatcctcagaccctgcggcagcagcggctgcaactgcggctcctggccagaccccggcctcagcgcaagctccagcgcagaccccagcgcccgctctgcctggtcctgctcttccagggcccttccccggcggccgcgtggtcaggctgcacccagtcattttggcctccattgtggacagctacgagagacgcaacgagggtgctgcccgagttatcgggaccctgttgggtggctgttgacatggaatttgctaagaatatgtatgaactgcataaaaaagtttctccaaatgagctcatcctgggctggtacgctacgggccatgacatcacagagcactctgtgctgatccacgagtactacagccgagaggcccccaaccccatccacctcactgtggacacaagtctccagaacggccgcatgagcatcaaagcctacgtcagcactttaatgggagtccctgggaggaccatgggagtgatgttcacgcctctgacagtgaaatacgcgtactacgacactgaacgcatcggagttgacctgatcatgaagacctgctttagccccaacagagtgattggactctcaagtgacttgcagcaagtaggaggggcatcagctcgcatccaggatgccctgagtacagtgttgcaatatgcagaggatgtactgtctggaaaggtgtcagctgacaatactgtgggccgcttcctgatgagcctggttaaccaagtaccgaaaatagttcccgatgactttgagaccatgctcaacagcaacatcaatgaccttttgatggtgacctacctggccaacctcacacagtcacagattgcactcaatgaaaaacttgtaaacctgtgaatggaccccaagcagtacacttgctggtctaggtattaaccccaggactcaga

SEQ ID NO: 131131 - DNA, 485 bp, Homo sapiens
  Payload ID: 5606
  Gene Symbol: EIF3F
  Gene Name: Eukaryotic translation initiation factor 3 subunit F
  ENST ID: ENST00000629098
  CDS Start-End: 1-303
aacagagtgattggactctcaagtgacttgcagcaagtaggaggggcatcagctcgcatccaggatgccctgagtacagtgttgcaatatgcagaggatgtactgtctggaaaggtgtcagctgacaatactgtgggccgcttcctgatgagcctggttaaccaagtaccgaaaatagttcccgatgactttgagaccatgctcaacagcaacatcaatgtgagtgcccttcctgagccccttcttgcctggtttcttcccccacctcagcacatacactcaaatgtgaaaagagttgggtgaggtgacctggagtaggatagagacagggcttcacctatagccccactgaagtccaggttgggaggaaggaagaggtgtgttatgcgtggttggagacttccttccttctcccatgattccattgtctcatttactgctgatactactgtgacttactgtctaaattcgtgatggaaagaaac

SEQ ID NO: 131132 - DNA, 6646 bp, Homo sapiens
  Payload ID: 5607
  Gene Symbol: EIF3A
  Gene Name: eukaryotic translation initiation factor 3, subunit A
  Uniprot ID: Q14152
  ENST ID: ENST00000369144
  CDS Start-End: 129-4277
ggccggctgggcgcgggcgactgctggcgaggcgcgtgggaccttacgctggttccccttcgtctcctctcccggcccgggccactagagagttcgctgacgccgggtgagctgagcctgccgccaagatgccggcctattttcagaggccggaaaatgccctcaaacgcgccaacgaatttcttgaggttggcaaaaagcagcctgctctggatgttctttatgatgttatgaaaagtaaaaaacatagaacatggcaaaagatacacgaaccaattatgttgaaatacttggaactttgcgtggatcttcgcaagagccacttggcaaaggaggggttataccagtataagaacatttgtcaacaggtgaacataaaatctctggaggatgttgttagggcatatttgaaaatggcagaggaaaaaactgaagctgctaaagaagaatctcagcagatggtcttagatatagaggatctagataatattcaaactcctgagagtgttctcctaagtgctgtaagtggtgaagacactcaggatcgtactgacagattacttttaactccatgggttaaattcctgtgggagtcttacaggcagtgtttggaccttcttagaaacaattctagagtagagcgcctgtaccatgatattgcccagcaagctttcaaattctgcctccaatacacgcgtaaggctgaattccgtaaactgtgtgacaatttgagaatgcacttatcgcagattcagcgccaccataaccaaagtacggcaatcaatcttaataatccagagagccagtccatgcatttggaaaccagacttgttcagctggacagtgctatcagcatggaattgtggcaggaagcattcaaagctgtggaagatattcacgggctattctccttgtctaaaaaaccacctaaacctcagttgatggcaaattactataacaaagtctcaactgtgttttggaaatctggaaatgctctttttcatgcatctacactccatcgtctttaccatctctctagagaaatgagaaagaatctcacacaagatgagatgcaaagaatgtctactagagtccttttagccactctttccatccctattactcctgagcgtacggatattgctcgacttctggatatggatggcattatagttgaaaaacagcgtcgccttgcaacactactaggtcttcaagccccaccgacacgaattggccttattaatgatatggtcagatttaatgtactacaatatgttgtcccagaagtgaaagacctttacaattggcttgaagtagaatttaacccattaaaactctgtgagcgagtcacaaaggttctaaattgggttagggaacaacctgaaaaggaaccggaattgcagcagtatgtgccacaactgcaaaacaacaccatcctccgccttctgcagcaggtgtcacagatttatcagagcattgagttttctcgtttgacttctttggttccttttgttgatgctttccaactggaacgggccatagtagatgcagccaggcattgcgacttgcaggttcgtattgatcacacttctcggaccctgagttttggatctgatttgaattatgctactcgagaagatgctccgattggtcctcatttgcaaagcatgccttcagagcagataagaaaccagctgacagccatgtcctcagtacttgcaaaagcacttgaagtcattaaaccagctcatatactgcaagagaaagaagaacagcatcagttggctgtcactgcataccttaaaaattcacgaaaagagcaccagcggatcctggctcgccgccagacaattgaggagagaaaagagcgccttgagagtctgaatattcagcgtgagaaagaagaattggaacagagggaagctgaactccagaaagtgcggaaggctgaggaagagaggctgcgccaggaagcaaaggagagagagaaggagcgtatcttacaggaacatgaacaaatcaaaaagaaaactgtccgagagcgtttggagcagatcaagaaaacagaactgggtgccaaagcattcaaagatattgatattgaagaccttgaggaattggatccagattttatcatggctaaacaggttgaacaactggagaaagaaaagaaagaacttcaagaacgcctaaagaatcaagaaaagaagattgactattttgaaagagccaaacgtttggaagaaattcctttgataaagagcgcttacgaggaacagagaattaaagacatggatctgtgggagcaacaagaggaagaaagaattactacaatgcagctagaacgtgaaaaggctcttgaacataagaatcgaatgtcacgaatgcttgaagacagagatttattcgtaatgcgactcaaagctgcacggcagtctgtttatgaggaaaaacttaaacagtttgaagagcgattagcagaagaaaggcataatcgattggaagaacggaaaaggcagcgtaaagaagaacgcaggataacatactatagagaaaaagaagaggaggagcagagaagggcagaagaacaaatgctaaaagagcgggaagagagagagcgcgccgaacgagcaaaacgcgaggaagagctacgagagtatcaggagcgggtgaagaaattagaagaagtggaaaggaaaaaacgccaaagggagttggaaattgaagaacgagaacggcgtagagaggaagagagaagacttggcgatagttccctttctagaaaggactctcgttggggagatagagattcagaaggcacctggagaaaaggacctgaagcagattctgagtggagaagaggcccgccagagaaggagtggagacgtggagaagggcgagatgaggacaggtctcatagaagagatgaagagcggccccggcgtctgggggatgatgaagatagagagccctctcttagaccagacgatgatcgggttccccggcgtggcatggatgatgacagaggccctagacgtggtcctgaggaagataggttctctcgtcgtggggcagacgatgaccggccttcctggcgtaacacagatgatgacaggcctcccagacgaattgccgatgaagacaggggaaactggcgtcatgcggatgatgacagaccacctagacgaggactggatgaggacagaggaagctggcgaacagctgatgaggacagaggaccaagacgtgggatggatgatgaccgggggccgaggcgaggaggcgctgatgatgagcgatcatcctggcgtaatgctgatgatgaccggggtcccaggcgagggttggatgatgatcggggtcccaggcgaggcatggatgatgaccggggtcccaggcgaggcatggatgatgaccggggtcccaggcgaggcatggatgatgaccggggtcccaggcgagggttggatgatgatcgaggaccttggaggaacgccgatgatgacagaattcccaggcgtggtgcagaggatgacaggggcccttggagaaacatggatgatgatcgcctttcaagacgtgctgatgatgatcggtttcccagacggggtgatgactcaagacctggtccttggagaccattagtcaagccaggtggatggagagagaaagaaaaagccagagaggagagctggggtccacctcgagaatcaaggccatcagaagaacgtgaatgggacagagaaaaagaaagggacagagataatcaagatcgggaggagaatgacaaggaccctgagagagaaagggacagagagagagatgtggatcgagaggatcgcttcagaagacctagggatgaaggtggctggagaagaggaccagctgaggaatcttcaagctggagagactcaagtcgccgggacgatagggatagggatgaccgtcgccgtgagagggatgaccggcgtgatctaagagaaagacgagatctaagagacgacagggaccgaagaggacctccactcagatcagaacgtgaagaagtaagttcttggagacgtgctgatgacaggaaagatgaccgggtggaagagcgggaccctcctcgtcgagttcctcccccagctctttcaagagaccgagaaagagaccgagaccgagaaagagaaggtgaaaaagagaaggcctcatggagagctgagaaagatagggaatctctccgtcgtactaaaaatgagactgatgaagatggatggaccacagtacgacgttaagtctcaagataatggatttaaactggtgtcttaaataggtttgatcacattcaaggattattatacttgtgcttcaaccaatctaaattggattctttaatgttgtttcaccataacacaaaaagcatgaacttgtattaatcctatataatagattgatcatgcaccatatccacaggaggttggaaaaaccatgccattttctggaatttaagggtgttgcattatttcatcaatcatttgttgacaaaaaagaaaaactaaaaaataaatttaaaatgtgacccttcaggtattgagtaacacctttatcttggtatagaactgatactttttttttgattttgaaatatctgataataatttggaatgaagtaaggttctgttaaaatatatttgaagaccctttaaagcagtgaatctgaaacaattttcacacccttaagtggttgatacgtacctattttaggtattttgaggtatttaccataaactaaatttagaaattttttagattcacttgaagtaaacattacaaacattggatacggtggggttttctttagattttacttgagagaaggtgagtacaaagcaatttgcagttgttgtaatgacaagattactgcgcaagtgtgaatccaaacagtatagcttttaaattttaaagcatttggtaaattatcgctgagtttttttctgttgccaatagcaaactgcttttccattaatggagaattcatgcctttcaagcattttaaatatgacaatatttataaatgtatggtttggaggaatcgtttaaattctctttcctaattttctttcttttgaagatagattctttcaacaagtaatttgtagtaatgactgtgttgacttcaattttggagcgcagtagctatgttaaagatgaactatttggtctcattgaagccaacacagaacttgctgctgtgttttttcttcagtgataaataaaatacttacagaatttgttttagtgttgatttgtggttatagtattttgtttataatggtaagtttgcatattcagttgagttttttttacttgaatttttatcagtgccattaaatgtctgtgtttagtatcaatgaaaatgaacctaaatataacaaagaaagcatatgtggctaggatgtccccctaacatgtcttcctttgttaatgcaggaattccttagtttccttgtaacgctgtcctctgagtttgtgtgtgcatgtgcgtgtttgaagtaccaccttgggttttcacctgaaattagaaaaatcgtagttaatttgagaaaatgttacaaattcatcatggctgtaggcacttatttctgttattgagtagtggtgagaattcctattggtacagctgtagggccagaagagggagtattgatgctttttaacttaaccagatgcagctatttttgtttgatgttaccaatgatagaaatcattttaaacaccttagtatctggtatttcaaatacgtagaagtctttaaaggtctttcgtggggagaaggacttttctttcataacaagagaatttcagatcagtgattacaagtggggcagtaacttgctaagagtttgcttcctggagagtagatctgtatgtgtgacatcacaggtaagccccaagaatttatttaatcagatttgttcagacgagttactgctgcctacgttagagttagatttcaaggcgagtcagcaaacccatcctttctgctcagtctcccgtactgttctcccaagttctttgttctgggagtcagaacccaagtgcaagaggagggcagaagagtctgatgctgttactttgcgatcctgctcttggtttccactgtccaggccatacaactctgtctactcccattagtatttaccaacaggtgttaaaggaaagctgaacaagcagcctactcaccgatctgctaggtggtcttccatgttcatggtggcttctgcagtttcattgagagtaacattgctgttaatacagatagatccagtagtagagacatcatcggtccaaaagactttgcatctcattagttgtccatagtgactaccaggaggtggctggcatctataacgtgtgggacgtttttatgtaaagaactgcctgtgtttttttttttttttaaccaaagacactgaccatagattgacttatacttttataagtctaattgaaatacttggggtactatgaaaggactgttccttgagtggctacgattagaaaatcaggactaacaaacttttctttgtctggaagcatatatatttgtgatataattttaatatgtataattttggtttaataaatcaaatctatgacaaaa

SEQ ID NO: 131133 - DNA, 4495 bp, Homo sapiens
  Payload ID: 5607
  Gene Symbol: EIF3A
  Gene Name: eukaryotic translation initiation factor 3, subunit A
  Uniprot ID: Q14152
  ENST ID: ENST00000541549
  CDS Start-End: 148-4296
ctccttcctttccgtctctggccggctgggcgcgggcgactgctggcgaggcgcgtgggaccttacgctggttccccttcgtctcctctcccggcccgggccactagagagttcgctgacgccgggtgagctgagcctgccgccaagatgccggcctattttcagaggccggaaaatgccctcaaacgcgccaacgaatttcttgaggttggcaaaaagcagcctgctctggatgttctttatgatgttatgaaaagtaaaaaacatagaacatggcaaaagatacacgaaccaattatgttgaaatacttggaactttgcgtggatcttcgcaagagccacttggcaaaggaggggttataccagtataagaacatttgtcaacaggtgaacataaaatctctggaggatgttgttagggcatatttgaaaatggcagaggaaaaaactgaagctgctaaagaagaatctcagcagatggtcttagatatagaggatctagataatattcaaactcctgagagtgttctcctaagtgctgtaagtggtgaagacactcaggatcgtactgacagattacttttaactccatgggttaaattcctgtgggagtcttacaggcagtgtttggaccttcttagaaacaattctagagtagagcgcctgtaccatgatattgcccagcaagctttcaaattctgcctccaatacacgcgtaaggctgaattccgtaaactgtgtgacaatttgagaatgcacttatcgcagattcagcgccaccataaccaaagtacggcaatcaatcttaataatccagagagccagtccatgcatttggaaaccagacttgttcagctggacagtgctatcagcatggaattgtggcaggaagcattcaaagctgtggaagatattcacgggctattctccttgtctaaaaaaccacctaaacctcagttgatggcaaattactataacaaagtctcaactgtgttttggaaatctggaaatgctctttttcatgcatctacactccatcgtctttaccatctctctagagaaatgagaaagaatctcacacaagatgagatgcaaagaatgtctactagagtccttttagccactctttccatccctattactcctgagcgtacggatattgctcgacttctggatatggatggcattatagttgaaaaacagcgtcgccttgcaacactactaggtcttcaagccccaccgacacgaattggccttattaatgatatggtcagatttaatgtactacaatatgttgtcccagaagtgaaagacctttacaattggcttgaagtagaatttaacccattaaaactctgtgagcgagtcacaaaggttctaaattgggttagggaacaacctgaaaaggaaccggaattgcagcagtatgtgccacaactgcaaaacaacaccatcctccgccttctgcagcaggtgtcacagatttatcagagcattgagttttctcgtttgacttctttggttccttttgttgatgctttccaactggaacgggccatagtagatgcagccaggcattgcgacttgcaggttcgtattgatcacacttctcggaccctgagttttggatctgatttgaattatgctactcgagaagatgctccgattggtcctcatttgcaaagcatgccttcagagcagataagaaaccagctgacagccatgtcctcagtacttgcaaaagcacttgaagtcattaaaccagctcatatactgcaagagaaagaagaacagcatcagttggctgtcactgcataccttaaaaattcacgaaaagagcaccagcggatcctggctcgccgccagacaattgaggagagaaaagagcgccttgagagtctgaatattcagcgtgagaaagaagaattggaacagagggaagctgaactccagaaagtgcggaaggctgaggaagagaggctgcgccaggaagcaaaggagagagagaaggagcgtatcttacaggaacatgaacaaatcaaaaagaaaactgtccgagagcgtttggagcagatcaagaaaacagaactgggtgccaaagcattcaaagatattgatattgaagaccttgaggaattggatccagattttatcatggctaaacaggttgaacaactggagaaagaaaagaaagaacttcaagaacgcctaaagaatcaagaaaagaagattgactattttgaaagagccaaacgtttggaagaaattcctttgataaagagcgcttacgaggaacagagaattaaagacatggatctgtgggagcaacaagaggaagaaagaattactacaatgcagctagaacgtgaaaaggctcttgaacataagaatcgaatgtcacgaatgcttgaagacagagatttattcgtaatgcgactcaaagctgcacggcagtctgtttatgaggaaaaacttaaacagtttgaagagcgattagcagaagaaaggcataatcgattggaagaacggaaaaggcagcgtaaagaagaacgcaggataacatactatagagaaaaagaagaggaggagcagagaagggcagaagaacaaatgctaaaagagcgggaagagagagagcgcgccgaacgagcaaaacgcgaggaagagctacgagagtatcaggagcgggtgaagaaattagaagaagtggaaaggaaaaaacgccaaagggagttggaaattgaagaacgagaacggcgtagagaggaagagagaagacttggcgatagttccctttctagaaaggactctcgttggggagatagagattcagaaggcacctggagaaaaggacctgaagcagattctgagtggagaagaggcccgccagagaaggagtggagacgtggagaagggcgagatgaggacaggtctcatagaagagatgaagagcggccccggcgtctgggggatgatgaagatagagagccctctcttagaccagacgatgatcgggttccccggcgtggcatggatgatgacagaggccctagacgtggtcctgaggaagataggttctctcgtcgtggggcagacgatgaccggccttcctggcgtaacacagatgatgacaggcctcccagacgaattgccgatgaagacaggggaaactggcgtcatgcggatgatgacagaccacctagacgaggactggatgaggacagaggaagctggcgaacagctgatgaggacagaggaccaagacgtgggatggatgatgaccgggggccgaggcgaggaggcgctgatgatgagcgatcatcctggcgtaatgctgatgatgaccggggtcccaggcgagggttggatgatgatcggggtcccaggcgaggcatggatgatgaccggggtcccaggcgaggcatggatgatgaccggggtcccaggcgaggcatggatgatgaccggggtcccaggcgagggttggatgatgatcgaggaccttggaggaacgccgatgatgacagaattcccaggcgtggtgcagaggatgacaggggcccttggagaaacatggatgatgatcgcctttcaagacgtgctgatgatgatcggtttcccagacggggtgatgactcaagacctggtccttggagaccattagtcaagccaggtggatggagagagaaagaaaaagccagagaggagagctggggtccacctcgagaatcaaggccatcagaagaacgtgaatgggacagagaaaaagaaagggacagagataatcaagatcgggaggagaatgacaaggaccctgagagagaaagggacagagagagagatgtggatcgagaggatcgcttcagaagacctagggatgaaggtggctggagaagaggaccagctgaggaatcttcaagctggagagactcaagtcgccgggacgatagggatagggatgaccgtcgccgtgagagggatgaccggcgtgatctaagagaaagacgagatctaagagacgacagggaccgaagaggacctccactcagatcagaacgtgaagaagtaagttcttggagacgtgctgatgacaggaaagatgaccgggtggaagagcgggaccctcctcgtcgagttcctcccccagctctttcaagagaccgagaaagagaccgagaccgagaaagagaaggtgaaaaagagaaggcctcatggagagctgagaaagatagggaatctctccgtcgtactaaaaatgagactgatgaagatggatggaccacagtacgacgttaagtctcaaggattattatacttgtgcttcaaccaatctaaattggattctttaatgttgtttcaccataacacaaaaagcatgaacttgtattaatcctatataatagattgatcatgcaccatatccacaggaggttggaaaaaccatgccattttctggaatttaagggtgttgcattatttcatcaatcatttgttg

SEQ ID NO: 131134 - DNA, 3055 bp, Homo sapiens
  Payload ID: 5608
  Gene Symbol: EIF3B
  Gene Name: eukaryotic translation initiation factor 3, subunit B
  Uniprot ID: P55884
  ENST ID: ENST00000360876
  CDS Start-End: 57-2501
gggagagtcggaagcgcggcggccgcggagccctgcgagtaggcagcgttgggcccatgcaggacgcggagaacgtggcggtgcccgaggcggccgaggagcgcgccgagcccggccagcagcagccggccgccgagccgccgccagccgaggggctgctgcggcccgcggggcccggcgctccggaggccgcggggaccgaggcctccagtgaggaggtggggatcgcggaggccgggccggagtccgaggtgaggaccgagccggcggccgaggcagaggcggcctccggcccgtccgagtcgccctcgccgccggccgccgaggagctgcccgggtcgcatgctgagccccctgtcccggcacagggcgaggccccaggagagcaggctcgggacgagcgctccgacagccgggcccaggcggtgtccgaggacgcgggaggaaacgagggcagagcggccgaggccgaaccccgggcgctggagaacggcgacgcggacgagccctccttcagcgaccccgaggacttcgtggacgacgtgagcgaggaagaattactgggagatgtactcaaagatcggccccaggaagcagatggaatcgattcggtgattgtagtggacaatgtccctcaggtgggacccgaccgacttgagaaactcaaaaatgtcatccacaagatcttttccaagtttgggaaaatcacaaatgatttttatcctgaagaggatgggaagacaaaagggtatattttcctggagtacgcgtcccctgcccacgctgtggatgctgtgaagaacgccgacggctacaagcttgacaagcagcacacattccgggtcaacctctttacggattttgacaagtatatgacgatcagtgacgagtgggatattccagagaaacagcctttcaaagacctggggaacttacgttactggcttgaagaggcagaatgcagagatcagtacagtgtgatttttgagagtggagaccgcacttccatattctggaatgacgtaaaagaccctgtctcaattgaagaaagagcgagatggacagagacgtatgtgcgttggtctcctaagggcacctacctggctacctttcatcaaagaggcattgctctatgggggggagagaaattcaagcaaattcagagattcagccaccaaggggttcagcttattgacttctcaccttgtgaaaggtacctggtgacctttagccccctgatggacacgcaggatgaccctcaggccataatcatctgggacatccttacggggcacaagaagaggggttttcactgtgagagctcagcccattggcctatttttaagtggagccatgatggcaaattctttgccagaatgaccctggatacgcttagcatctatgaaactccttctatgggtcttttggacaagaagagtttgaagatctctgggataaaagacttttcttggtctcctggtggtaacataatcgccttctgggtgcctgaagacaaagatattccagccagggtaaccctgatgcagctccctaccaggcaagagatccgagtgaggaacctgttcaatgtggtggactgcaagctccattggcagaagaacggagactacttgtgtgtgaaagtagataggactccgaaaggcacccagggtgttgtcacaaattttgaaattttccgaatgagggagaaacaggtacctgtggatgtggtcgagatgaaagaaaccatcatagcctttgcctgggaaccaaatggaagtaagtttgctgtgctgcacggagaggctccgcggatatctgtgtctttctaccacgtcaaaaacaacgggaagattgaactcatcaagatgttcgacaagcagcaggcgaacaccatcttctggagcccccaaggacagttcgtggtgttggcgggcctgaggagtatgaacggtgccttagcgtttgtggacacttcggactgcacggtcatgaacatcgcagagcactacatggcttccgacgtcgaatgggatcctactgggcgctacgtcgtcacctctgtgtcctggtggagccataaggtggacaacgcgtactggctgtggactttccagggacgcctcctgcagaagaacaacaaggaccgcttctgccagctgctgtggcggccccggcctcccacactcctgagccaggaacagatcaagcaaattaaaaaggatctgaagaaatactctaagatctttgaacagaaggatcgtttgagtcagtccaaagcctcaaaggaattggtggagagaaggcgcaccatgatggaagatttccggaagtaccggaaaatggcccaggagctctatatggagcagaaaaacgagcgcctggagttgcgaggaggggtggacactgacgagctggacagcaacgtggacgactgggaagaggagaccattgagttcttcgtcactgaagaaatcattcccctcgggaatcaggagtgacctggagcactgtggggacggactccgcctgctgttcccgcgctgagctacaggactcccgagtgtgagccgcggttcctctgttgcagcgcagccgtgtgtgctgtggagccgaggccgtcctgcaggaagccgcgtgactcccgcctcctccctgtgctctctggctctggactgtgactgcgcctggattctgccattgcgacacatttttgtgcctttcagcccctggtgtctgcagtgggggatttaaggcacccgcttccacttctttcttgtttggagttttctgttggaaccgccggcgttggctccgaagacttagcgacgccactggcggcaccttctcctgcgcccagtgatgtttccacggtgcctgtacacagccgagcagcatttccgttgaaggacttgcatccccattgcgggcagtgctggacgtgtcccggagacccaccgggagggcgccgccatgccttgtacccccaccgtgcaggttgtggccggttttctccgcaggttgaacatggaaataaaagcaaacttgtatgaaa

SEQ ID NO: 131135 - DNA, 2966 bp, Homo sapiens
  Payload ID: 5608
  Gene Symbol: EIF3B
  Gene Name: eukaryotic translation initiation factor 3, subunit B
  Uniprot ID: P55884
  ENST ID: ENST00000397011
  CDS Start-End: 41-2485
cggcggccgcggagccctgcgagtaggcagcgttgggcccatgcaggacgcggagaacgtggcggtgcccgaggcggccgaggagcgcgccgagcccggccagcagcagccggccgccgagccgccgccagccgaggggctgctgcggcccgcggggcccggcgctccggaggccgcggggaccgaggcctccagtgaggaggtggggatcgcggaggccgggccggagtccgaggtgaggaccgagccggcggccgaggcagaggcggcctccggcccgtccgagtcgccctcgccgccggccgccgaggagctgcccgggtcgcatgctgagccccctgtcccggcacagggcgaggccccaggagagcaggctcgggacgagcgctccgacagccgggcccaggcggtgtccgaggacgcgggaggaaacgagggcagagcggccgaggccgaaccccgggcgctggagaacggcgacgcggacgagccctccttcagcgaccccgaggacttcgtggacgacgtgagcgaggaagaattactgggagatgtactcaaagatcggccccaggaagcagatggaatcgattcggtgattgtagtggacaatgtccctcaggtgggacccgaccgacttgagaaactcaaaaatgtcatccacaagatcttttccaagtttgggaaaatcacaaatgatttttatcctgaagaggatgggaagacaaaagggtatattttcctggagtacgcgtcccctgcccacgctgtggatgctgtgaagaacgccgacggctacaagcttgacaagcagcacacattccgggtcaacctctttacggattttgacaagtatatgacgatcagtgacgagtgggatattccagagaaacagcctttcaaagacctggggaacttacgttactggcttgaagaggcagaatgcagagatcagtacagtgtgatttttgagagtggagaccgcacttccatattctggaatgacgtaaaagaccctgtctcaattgaagaaagagcgagatggacagagacgtatgtgcgttggtctcctaagggcacctacctggctacctttcatcaaagaggcattgctctatgggggggagagaaattcaagcaaattcagagattcagccaccaaggggttcagcttattgacttctcaccttgtgaaaggtacctggtgacctttagccccctgatggacacgcaggatgaccctcaggccataatcatctgggacatccttacggggcacaagaagaggggttttcactgtgagagctcagcccattggcctatttttaagtggagccatgatggcaaattctttgccagaatgaccctggatacgcttagcatctatgaaactccttctatgggtcttttggacaagaagagtttgaagatctctgggataaaagacttttcttggtctcctggtggtaacataatcgccttctgggtgcctgaagacaaagatattccagccagggtaaccctgatgcagctccctaccaggcaagagatccgagtgaggaacctgttcaatgtggtggactgcaagctccattggcagaagaacggagactacttgtgtgtgaaagtagataggactccgaaaggcacccagggtgttgtcacaaattttgaaattttccgaatgagggagaaacaggtacctgtggatgtggtcgagatgaaagaaaccatcatagcctttgcctgggaaccaaatggaagtaagtttgctgtgctgcacggagaggctccgcggatatctgtgtctttctaccacgtcaaaaacaacgggaagattgaactcatcaagatgttcgacaagcagcaggcgaacaccatcttctggagcccccaaggacagttcgtggtgttggcgggcctgaggagtatgaacggtgccttagcgtttgtggacacttcggactgcacggtcatgaacatcgcagagcactacatggcttccgacgtcgaatgggatcctactgggcgctacgtcgtcacctctgtgtcctggtggagccataaggtggacaacgcgtactggctgtggactttccagggacgcctcctgcagaagaacaacaaggaccgcttctgccagctgctgtggcggccccggcctcccacactcctgagccaggaacagatcaagcaaattaaaaaggatctgaagaaatactctaagatctttgaacagaaggatcgtttgagtcagtccaaagcctcaaaggaattggtggagagaaggcgcaccatgatggaagatttccggaagtaccggaaaatggcccaggagctctatatggagcagaaaaacgagcgcctggagttgcgaggaggggtggacactgacgagctggacagcaacgtggacgactgggaagaggagaccattgagttcttcgtcactgaagaaatcattcccctcgggaatcaggagtgacctggagcactgtgcgcagccgtgtgtgctgtggagccgaggccgtcctgcaggaagccgcgtgactcccgcctcctccctgtgctctctggctctggactgtgactgcgcctggattctgccattgcgacacatttttgtgcctttcagcccctggtgtctgcagtgggggatttaaggcacccgcttccacttctttcttgtttggagttttctgttggaaccgccggcgttggctccgaagacttagcgacgccactggcggcaccttctcctgcgcccagtgatgtttccacggtgcctgtacacagccgagcagcatttccgttgaaggacttgcatccccattgcgggcagtgctggacgtgtcccggagacccaccgggagggcgccgccatgccttgtacccccaccgtgcaggttgtggccggttttctccgcaggttgaacatggaaataaaagcaaacttgtatgaaaaa

SEQ ID NO: 131136 - DNA, 962 bp, Homo sapiens
  Payload ID: 5608
  Gene Symbol: EIF3B
  Gene Name: eukaryotic translation initiation factor 3, subunit B
  ENST ID: ENST00000413917
  CDS Start-End: 56-962
ggagagtcggaagcgcggcggccgcggagccctgcgagtaggcagcgttgggcccatgcaggacgcggagaacgtggcggtgcccgaggcggccgaggagcgcgccgagcccggccagcagcagccggccgccgagccgccgccagccgaggggctgctgcggcccgcggggcccggcgctccggaggccgcggggaccgaggcctccagtgaggaggtggggatcgcggaggccgggccggagtccgagggcgaggccccaggagagcaggctcgggacgagcgctccgacagccgggcccaggcggtgtccgaggacgcgggaggaaacgagggcagagcggccgaggccgaaccccgggcgctggagaacggcgacgcggacgagccctccttcagcgaccccgaggacttcgtggacgacgtgagcgaggaagaattactgggagatgtactcaaagatcggccccaggaagcagatggaatcgattcggtgattgtagtggacaatgtccctcaggtgggacccgaccgacttgagaaactcaaaaatgtcatccacaagatcttttccaagtttgggaaaatcacaaatgatttttatcctgaagaggatgggaagacaaaagggtatattttcctggagtacgcgtcccctgcccacgctgtggatgctgtgaagaacgccgacggctacaagcttgacaagcagcacacattccgggtcaacctctttacggattttgacaagtatatgacgatcagtgacgagtgggatattccagagaaacagcctttcaaagacctggggaacttacgttactggcttgaagaggcagaatgcagagatcagtacagtgtgatttttgagagtggagaccgcacttccatattctggaatgacgtaaaagaccctgtctcaattgaagaaagagcgagatggacagagacgtatgtgcgtt

SEQ ID NO: 131137 - DNA, 1074 bp, Homo sapiens
  Payload ID: 5608
  Gene Symbol: EIF3B
  Gene Name: eukaryotic translation initiation factor 3, subunit B
  ENST ID: ENST00000431643
  CDS Start-End: 615-1074
gtgacccgcgctgtcccgcgctgaaggcggcggcctcggatggactgaaccactgtgaaagcccgaatggggggaaacaggcagtgacggccgctagggaaggactggggggcgaggccccaggagagcaggctcgggacgagcgctccgacagccgggcccaggcggtgtccgaggacgcgggaggaaacgagggcagagcggccgaggccgaaccccgggcgctggagaacggcgacgcggacgagccctccttcagcgaccccgaggacttcgtggacgacgtgagcgaggaagaattactgggagatgtactcaaagatcggccccaggaagcagatggaatcgattcggtgattgtagtggacaatgtccctcaggtgggacccgaccgacttgagaaactcaaaaatgtcatccacaagatcttttccaagtttgggaaaatcacaaatgatttttatcctgaagaggatgggaagacaaaagggtatattttcctggagtacgcgtcccctgcccacgctgtggatgctgtgaagaacgccgacggctacaagcttgacaagcagcacacattccgggtcaacctctttacggattttgacaagtatatgacgatcagtgacgagtgggatattccagagaaacagcctttcaaagacctggggaacttacgttactggcttgaagaggcagaatgcagagatcagtacagtgtgatttttgagagtggagaccgcacttccatattctggaatgacgtaaaagaccctgtctcaattgaagaaagagcgagatggacagagacgtatgtgcgttggtctcctaagggcacctacctggctacctttcatcaaagaggcattgctctatgggggggagagaaattcaagcaaattcagagattcagccaccaaggggttcagcttattgacttctcaccttgtgaaaggtacctggtgacctttagccccctgatggacacgcaggatgaccctcaggccataatcatctgggacatccttacggggcacaagaagaggggttttcactgtgagagctcagcccatt

SEQ ID NO: 131138 - DNA, 3145 bp, Homo sapiens
  Payload ID: 5609
  Gene Symbol: EIF3C
  Gene Name: eukaryotic translation initiation factor 3, subunit C
  Uniprot ID: Q99613
  ENST ID: ENST00000331666
  CDS Start-End: 187-2928
aggcttgtccccgcccccttatggcgcgaaggccactgggagttgtagtctcccagtgtagttagtcggcgcttcccggaagtgacgcgaggacccgccttctctctcggcgtttccgctgtcagggccctgcggtgtgactcgcgggctcagctggtccggccgtagcacctccgcgccgtcgccatgtcgcggtttttcaccaccggttcggacagcgagtccgagtcgtccttgtccggggaggagctcgtcaccaaacctgtcggaggcaactatggcaaacagccattgttgctgagcgaggatgaagaagataccaagagagttgtccgcagtgccaaggacaagaggtttgaggagctgaccaaccttatccggaccatccgtaatgccatgaagattcgtgatgtcaccaagtgcctggaagagtttgagctcctgggaaaagcatatgggaaggccaaaagcattgtggacaaagaaggtgtcccccggttctatatccgcatcctggctgacctagaggactatcttaatgagctttgggaagataaggaagggaagaagaagatgaacaagaacaatgccaaggctctgagcaccttgcgtcagaagatccgaaaatacaaccgtgatttcgagtcccatatcacaagctacaagcagaaccccgagcagtctgcggatgaagatgctgagaaaaatgaggaggattcagaaggctcttcagatgaggatgaggatgaggacggagtcagtgctgcaactttcttgaagaagaaatcagaagctccttctggggagagtcgcaagttcctcaaaaagatggatgatgaagatgaggactcagaagattccgaagatgatgaagactgggacacaggttccacatcttccgattccgactcagaggaggaagaagggaaacaaaccgcgctggcctcaagatttcttaaaaaggcacccaccacagatgaggacaagaaggcagccgagaagaaacgggaggacaaagctaagaagaagcacgacaggaaatccaagcgcctggatgaggaggaggaggacaatgaaggcggggagtgggaaagggtccggggcggagtgccgttggttaaggagaagccaaaaatgtttgccaagggaactgagatcacccatgctgttgttatcaagaaactgaatgagatcctacaggcacgaggcaagaagggaactgatcgtgctgcccagattgagctgctgcaactgctggttcagattgcagcggaaaacaacctgggagagggcgtcattgtcaagatcaagttcaatatcatcgcctctctctatgactacaaccccaacctggcaacctacatgaagccagagatgtgggggaagtgcctggactgcatcaatgagctgatggatatcctgtttgcaaatcccaacatttttgttggagagaatattctggaagagagtgagaacctgcacaacgctgaccagccactgcgtgtccgtggctgcatcctaactctggtggaacgaatggatgaagaatttaccaaaataatgcaaaatactgaccctcactcccaagagtacgtggagcacttgaaggatgaggcccaggtgtgtgccatcatcgagcgtgtgcagcgctacctggaggagaagggcactaccgaggaggtctgccgcatctacctgctgcgcatcctgcacacctactacaagtttgattacaaggcccatcagcgacagctgaccccgcctgagggctcctcaaagtctgagcaagaccaggcagaaaatgagggcgaggactcggctgtgttgatggagagactgtgcaagtacatctacgccaaggaccgcacagaccggatccgcacatgtgccatcctctgccacatctaccaccatgctctgcactcgcgctggtaccaggcccgcgacctcatgctcatgagccacttgcaggacaacattcagcatgcagacccgccagtgcagatcctttacaaccgcaccatggtgcagctgggcatctgtgccttccgccaaggcctgaccaaggacgcacacaacgccctgctggacatccagtcgagtggccgagccaaggagcttctgggccagggcctgctgctgcgcagcctgcaggagcgcaaccaggagcaggagaaggtggagcggcgccgtcaggtccccttccacctgcacatcaacctggagctgctggagtgtgtctacctggtgtctgccatgctcctggagatcccctacatggccgcccatgagagcgatgcccgccgacgcatgatcagcaagcagttccaccaccagctgcgcgtgggcgagcgacagcccctgctgggtccccctgagtccatgcgggaacatgtggtcgctgcctccaaggccatgaagatgggtgactggaagacctgtcacagttttatcatcaatgagaagatgaatgggaaagtgtgggaccttttccccgaggctgacaaagtccgcaccatgctggttaggaagatccaggaagagtcactgaggacctacctcttcacctacagcagtgtctatgactccatcagcatggagacgctgtcagacatgtttgagctggatctgcccactgtgcactccatcatcagcaaaatgatcattaatgaggagctgatggcctccctggaccagccaacacagacagtggtgatgcaccgcactgagcccactgcccagcagaacctggctctgcagctggccgagaagctgggcagcctggtggagaacaacgaacgggtgtttgaccacaagcagggcacctacgggggctacttccgagaccagaaggacggctaccgcaaaaacgagggctacatgcgccgcggtggctaccgccagcagcagtctcagacggcctactgagctctccactctgtttcccgcctgggccatccaaccttgaagtcctaaaccacacctcagtcactaaaggtctgtttaaagttgttctggttgattgcttgttgccacaaaggtgtgttgagcccattcatttgctgattatatttctgagctgctaccacatgacagacacaaggctcagatgaagaggtgaattgaacacgttcctgacctcaaa

SEQ ID NO: 131139 - DNA, 3137 bp, Homo sapiens
  Payload ID: 5609
  Gene Symbol: EIF3C
  Gene Name: eukaryotic translation initiation factor 3, subunit C
  Uniprot ID: Q99613
  ENST ID: ENST00000395587
  CDS Start-End: 182-2923
agtgtagttagtcggcgcttcccggaagtgacgcgaggacccgccttctctctcggcgtttccgctgtcagggccctgcggtgtgactcgcgggctcagctggttggtattttttgggcctcgtgcttcgtggtgggagacccaggtcgaggtccggccgtagcacctccgcgccgtcgccatgtcgcggtttttcaccaccggttcggacagcgagtccgagtcgtccttgtccggggaggagctcgtcaccaaacctgtcggaggcaactatggcaaacagccattgttgctgagcgaggatgaagaagataccaagagagttgtccgcagtgccaaggacaagaggtttgaggagctgaccaaccttatccggaccatccgtaatgccatgaagattcgtgatgtcaccaagtgcctggaagagtttgagctcctgggaaaagcatatgggaaggccaaaagcattgtggacaaagaaggtgtcccccggttctatatccgcatcctggctgacctagaggactatcttaatgagctttgggaagataaggaagggaagaagaagatgaacaagaacaatgccaaggctctgagcaccttgcgtcagaagatccgaaaatacaaccgtgatttcgagtcccatatcacaagctacaagcagaaccccgagcagtctgcggatgaagatgctgagaaaaatgaggaggattcagaaggctcttcagatgaggatgaggatgaggacggagtcagtgctgcaactttcttgaagaagaaatcagaagctccttctggggagagtcgcaagttcctcaaaaagatggatgatgaagatgaggactcagaagattccgaagatgatgaagactgggacacaggttccacatcttccgattccgactcagaggaggaagaagggaaacaaaccgcgctggcctcaagatttcttaaaaaggcacccaccacagatgaggacaagaaggcagccgagaagaaacgggaggacaaagctaagaagaagcacgacaggaaatccaagcgcctggatgaggaggaggaggacaatgaaggcggggagtgggaaagggtccggggcggagtgccgttggttaaggagaagccaaaaatgtttgccaagggaactgagatcacccatgctgttgttatcaagaaactgaatgagatcctacaggcacgaggcaagaagggaactgatcgtgctgcccagattgagctgctgcaactgctggttcagattgcagcggaaaacaacctgggagagggcgtcattgtcaagatcaagttcaatatcatcgcctctctctatgactacaaccccaacctggcaacctacatgaagccagagatgtgggggaagtgcctggactgcatcaatgagctgatggatatcctgtttgcaaatcccaacatttttgttggagagaatattctggaagagagtgagaacctgcacaacgctgaccagccactgcgtgtccgtggctgcatcctaactctggtggaacgaatggatgaagaatttaccaaaataatgcaaaatactgaccctcactcccaagagtacgtggagcacttgaaggatgaggcccaggtgtgtgccatcatcgagcgtgtgcagcgctacctggaggagaagggcactaccgaggaggtctgccgcatctacctgctgcgcatcctgcacacctactacaagtttgattacaaggcccatcagcgacagctgaccccgcctgagggctcctcaaagtctgagcaagaccaggcagaaaatgagggcgaggactcggctgtgttgatggagagactgtgcaagtacatctacgccaaggaccgcacagaccggatccgcacatgtgccatcctctgccacatctaccaccatgctctgcactcgcgctggtaccaggcccgcgacctcatgctcatgagccacttgcaggacaacattcagcatgcagacccgccagtgcagatcctttacaaccgcaccatggtgcagctgggcatctgtgccttccgccaaggcctgaccaaggacgcacacaacgccctgctggacatccagtcgagtggccgagccaaggagcttctgggccagggcctgctgctgcgcagcctgcaggagcgcaaccaggagcaggagaaggtggagcggcgccgtcaggtccccttccacctgcacatcaacctggagctgctggagtgtgtctacctggtgtctgccatgctcctggagatcccctacatggccgcccatgagagcgatgcccgccgacgcatgatcagcaagcagttccaccaccagctgcgcgtgggcgagcgacagcccctgctgggtccccctgagtccatgcgggaacatgtggtcgctgcctccaaggccatgaagatgggtgactggaagacctgtcacagttttatcatcaatgagaagatgaatgggaaagtgtgggaccttttccccgaggctgacaaagtccgcaccatgctggttaggaagatccaggaagagtcactgaggacctacctcttcacctacagcagtgtctatgactccatcagcatggagacgctgtcagacatgtttgagctggatctgcccactgtgcactccatcatcagcaaaatgatcattaatgaggagctgatggcctccctggaccagccaacacagacagtggtgatgcaccgcactgagcccactgcccagcagaacctggctctgcagctggccgagaagctgggcagcctggtggagaacaacgaacgggtgtttgaccacaagcagggcacctacgggggctacttccgagaccagaaggacggctaccgcaaaaacgagggctacatgcgccgcggtggctaccgccagcagcagtctcagacggcctactgagctctccactctgtttcccgcctgggccatccaaccttgaagtcctaaaccacacctcagtcactaaaggtctgtttaaagttgttctggttgattgcttgttgccacaaaggtgtgttgagcccattcatttgctgattatatttctgagctgctaccacatgacagacacaaggctcagatgaagaggtgaattgaacacgttcctgacctc

SEQ ID NO: 131140 - DNA, 572 bp, Homo sapiens
  Payload ID: 5609
  Gene Symbol: EIF3C
  Gene Name: eukaryotic translation initiation factor 3, subunit C
  ENST ID: ENST00000568426
  CDS Start-End: 175-572
attgagactttctccttgctgttggcctctcatactttgggaaatgttgctaagatctagtttaggccattgttgctgagcgaggatgaagaagataccaagagagttgtccgcagtgccaaggacaagaggtttgaggagctgaccaaccttatccggaccatccgtaatgccatgaagattcgtgatgtcaccaagtgcctggaagagtttgagctcctgggaaaagcatatgggaaggccaaaagcattgtggacaaagaaggtgtcccccggttctatatccgcatcctggctgacctagaggactatcttaatgagctttgggaagataaggaagggaagaagaagatgaacaagaacaatgccaaggctctgagcaccttgcgtcagaagatccgaaaatacaaccgtgatttcgagtcccatatcacaagctacaagcagaaccccgagcagtctgcggatgaagatgctgagaaaaatgaggaggattcagaaggctcttcagatgaggatgaggatgaggacggagtcagtgctgcaactttcttgaagaagaaatcagaagc

SEQ ID NO: 131141 - DNA, 581 bp, Homo sapiens
  Payload ID: 5609
  Gene Symbol: EIF3C
  Gene Name: eukaryotic translation initiation factor 3, subunit C
  ENST ID: ENST00000569690
  CDS Start-End: 136-581
tctctctcggcgtttccgctgtcagggccctgcggtgtgactcgcgggctcagctggttggtattttttgggcctcgtgcttcgtggtgggagacccaggtcgaggtccggccgtagcacctccgcgccgtcgccatgtcgcggtttttcaccaccggttcggacagcgagtccgagtcgtccttgtccggggaggagctcgtcaccaaacctgtcggaggcaactatggcaaacagccattgttgctgagcgaggatgaagaagataccaagagagttgtccgcagtgccaaggacaagaggtttgaggagctgaccaaccttatccggaccatccgtaatgccatgaagattcgtgatgtcaccaagtgcctggaagagtttgagctcctgggaaaagcatatgggaaggccaaaagcattgtggacaaagaaggtgtcccccggttctatatccgcatcctggctgacctagaggactatcttaatgagctttgggaagataaggaagggaagaagaagatgaacaagaacaatgccaaggctctgagcaccttgcgtcagaagatccgaaaatacaa

SEQ ID NO: 131142 - DNA, 2870 bp, Homo sapiens
  Payload ID: 5609
  Gene Symbol: EIF3C
  Gene Name: eukaryotic translation initiation factor 3, subunit C
  Uniprot ID: Q99613
  ENST ID: ENST00000564243
  CDS Start-End: 76-2787
gtttccgctgtcagggccctgcggtgtgactcgcgggctcagctggtccggccgtagcacctccgcgccgtcgccatgtcgcggtttttcaccaccggttcggacagcgagtccgagtcgtccttgtccggggaggagctcgtcaccaaacctgtcggaggcaactatggcaaacagccattgttgctgagcgaggatgaagaagataccaagagagttgtccgcagtgccaaggacaagaggtttgaggagctgaccaaccttatccggaccatccgtaatgccatgaagattcgtgatgtcaccaagtgcctggaagagtttgagctcctgggaaaagcatatgggaaggccaaaagcattgtggacaaagaaggtgtcccccggttctatatccgcatcctggctgacctagaggactatcttaatgagatgaacaagaacaatgccaaggctctgagcaccttgcgtcagaagatccgaaaatacaaccgtgatttcgagtcccatatcacaagctacaagcagaaccccgagcagtctgcggatgaagatgctgagaaaaatgaggaggattcagaaggctcttcagatgaggatgaggatgaggacggagtcagtgctgcaactttcttgaagaagaaatcagaagctccttctggggagagtcgcaagttcctcaaaaagatggatgatgaagatgaggactcagaagattccgaagatgatgaagactgggacacaggttccacatcttccgattccgactcagaggaggaagaagggaaacaaaccgcgctggcctcaagatttcttaaaaaggcacccaccacagatgaggacaagaaggcagccgagaagaaacgggaggacaaagctaagaagaagcacgacaggaaatccaagcgcctggatgaggaggaggaggacaatgaaggcggggagtgggaaagggtccggggcggagtgccgttggttaaggagaagccaaaaatgtttgccaagggaactgagatcacccatgctgttgttatcaagaaactgaatgagatcctacaggcacgaggcaagaagggaactgatcgtgctgcccagattgagctgctgcaactgctggttcagattgcagcggaaaacaacctgggagagggcgtcattgtcaagatcaagttcaatatcatcgcctctctctatgactacaaccccaacctggcaacctacatgaagccagagatgtgggggaagtgcctggactgcatcaatgagctgatggatatcctgtttgcaaatcccaacatttttgttggagagaatattctggaagagagtgagaacctgcacaacgctgaccagccactgcgtgtccgtggctgcatcctaactctggtggaacgaatggatgaagaatttaccaaaataatgcaaaatactgaccctcactcccaagagtacgtggagcacttgaaggatgaggcccaggtgtgtgccatcatcgagcgtgtgcagcgctacctggaggagaagggcactaccgaggaggtctgccgcatctacctgctgcgcatcctgcacacctactacaagtttgattacaaggcccatcagcgacagctgaccccgcctgagggctcctcaaagtctgagcaagaccaggcagaaaatgagggcgaggactcggctgtgttgatggagagactgtgcaagtacatctacgccaaggaccgcacagaccggatccgcacatgtgccatcctctgccacatctaccaccatgctctgcactcgcgctggtaccaggcccgcgacctcatgctcatgagccacttgcaggacaacattcagcatgcagacccgccagtgcagatcctttacaaccgcaccatggtgcagctgggcatctgtgccttccgccaaggcctgaccaaggacgcacacaacgccctgctggacatccagtcgagtggccgagccaaggagcttctgggccagggcctgctgctgcgcagcctgcaggagcgcaaccaggagcaggagaaggtggagcggcgccgtcaggtccccttccacctgcacatcaacctggagctgctggagtgtgtctacctggtgtctgccatgctcctggagatcccctacatggccgcccatgagagcgatgcccgccgacgcatgatcagcaagcagttccaccaccagctgcgcgtgggcgagcgacagcccctgctgggtccccctgagtccatgcgggaacatgtggtcgctgcctccaaggccatgaagatgggtgactggaagacctgtcacagttttatcatcaatgagaagatgaatgggaaagtgtgggaccttttccccgaggctgacaaagtccgcaccatgctggttaggaagatccaggaagagtcactgaggacctacctcttcacctacagcagtgtctatgactccatcagcatggagacgctgtcagacatgtttgagctggatctgcccactgtgcactccatcatcagcaaaatgatcattaatgaggagctgatggcctccctggaccagccaacacagacagtggtgatgcaccgcactgagcccactgcccagcagaacctggctctgcagctggccgagaagctgggcagcctggtggagaacaacgaacgggtgtttgaccacaagcagggcacctacgggggctacttccgagaccagaaggacggctaccgcaaaaacgagggctacatgcgccgcggtggctaccgccagcagcagtctcagacggcctactgagctctccactctgtttcccgcctgggccatccaaccttgaagtcctaaaccacacctcagtcactaaaggtctgtttaaagtt

SEQ ID NO: 131143 - DNA, 516 bp, Homo sapiens
  Payload ID: 5609
  Gene Symbol: EIF3C
  Gene Name: eukaryotic translation initiation factor 3, subunit C
  ENST ID: ENST00000563139
  CDS Start-End: 278-516
ttcttaactggccttaagtctacagcctctacctgtctcctctcattttaccgccgagaagtccttagtgacttctcactgctcacagaaggaaatgcaaaatgcttgattggtatctgggagccccctgatgcgactctgaagtctggtcacctgctgtgtacgcaggccattgttgctgagcgaggatgaagaagataccaagagagttgtccgcagtgccaaggacaagaggtttgaggagctgaccaaccttatccggaccatccgtaatgccatgaagattcgtgatgtcaccaagtgcctggaagagtttgagctcctgggaaaagcatatgggaaggccaaaagcattgtggacaaagaaggtgtcccccggttctatatccgcatcctggctgacctagaggactatcttaatgagctttgggaagataaggaagggaagaagaagatgaacaagaacaatgccaaggctctgagcaccttgcgtcagaagatccgaaaatacaaccg
